United States Patent Application Publication US 2023/0272434 A1 - sequence listing, part 13

SEQ ID NO: 21409 - protein, 1284 aa, Urbanus sp.
MRRSNRIKNKHSAQSGTVAEITSNLSSSSSSTHSLFQSPNSTPLSFEFRSNPVSRSTTVSPMSVDIEQSITLPVSDVARGANAFLPASTKAGKPRVRMTWSQDVNIFIMRTYYHITKLETDLTIYRKKLHELFSIKYPDIKVSEQRVSDQRRMIIRNRYLSDEIINKLKEDVAKQLQEEQNINEVSNHNTQTDIEVNQNTLESQAQLQNNLYQSHNLSQSHTLTFIPTSHSSTQTEFTTLLLENETETIADVAPINNVSFQDMYDKLQAAITHYSGVDPTARPRLPRIKYTKHLTDLVQLFNQHMLHRLISEKMELNDIHTLVYCTALVIAEELNYKITHNITHTKPKDHTKPSWQIRLERDIENLRVDIGRLTQYINNNRSDRLVRKVQQIFNRITLHTKHESNNRKPEEFLDTLKQKLALKTHRLKRYKKAQQRRKDNIQFATNEKLFYRNLCKPRKDITPSEFNQTEITTKEELEMYWSNIWEENIRHNDRAEWITEEQEKWEIIDEMEFQAITEGDITTITARLHNWKAPGVDKVHNYWYKKLTILHKPIAKALTEIILGKQNIPNFITIGITYMLPKTNNSTQPSQYRPITCLPTIYKILTSAITLKINKHIEHHNVLAEEQKGCRRGHMGCKEQLVIDSTIHKHATSKHRNLHCTYIDYKKAFDSIPHSWLIKILQIYRISPIIVDFLRNIMSHWKTTLHLNQGNKFITTRQINIRKGIYQGDSLSPLWFCLALNPLSNLLHNCETGYRLNNSPEETTISHLIYMDDIKLYAKTHRDMQKLLDKTTQFSKDINMQFGLDKCKTLHIIKGKIKSGDYSVNNTDVISAMEPTDVYKYLGYYQLKGLLHTHIKQTLTTEFKRRIDIICKTHLSGKHLTKAINTYSIPILTYSFGIVKWTKTDIEQLERVIRTTLTKHNNLHPKSAVERLNIKRQDGGRGVIDINYLWQKQISKLRHFFFTKSTTSNIHSAITLNDQNLTPLNLSDQTDQYTLNNTNPQLQKIEHWKTKVLHGRHPHDLEHTHVDKIASNKWLKIGNLFPETEGFMIAIQDQVINTKNYRKHIIKDPNVKNDKCRRCHTQPETIQHITGACTNLTQTDYTHRHNQVTNIIHQNLALKHNLIQNTNTPYYKYTPQTVIENTSHKLYYDRAVLTDRTIHYNRPDIILQDKLNKITYLIDIAVPNTHNIQKTIVEKINKYVELKEEVTRIWKQNKVYVVPIVLSTTGVIPYHLHQSIKLIGLKHSIYIPLQKAAILNTCRIVRKFMQIDEKDVGPHNLTQPITSS

SEQ ID NO: 21410 - protein, 1273 aa, Arctia plantaginis
MQNKTNKYNLRPLPGGRRDSIRNHNINNQTDRQTDNDNISLNSLTSLSVTEPYSPSTSSYRPTPVSFVDEDSHETPNPTLAVTQEVNAFLPASTKSGKLRVRMRWSKEVNLFIMRTYYQITKLETDMTTYRKQLHELFTRHYPDINVTEQRIADQRRTIVRNKLLTEETLHILKEEIRMQLQQNEHIYEYIENNSNPQLHNTQSVTTALPTQSQPHTITQSSQISTQPETITLTLDNDIEIMQNVNPSSDNIQKIQEKFRTALALYSRMDPITRPKLPKLKYSRKLSELTHVFNHNILHQFLSEDTQLTDIHTLIYCTALVISEELNYKIIDHPRNILRKNSKPPWQIRLEKDIEQLRADCGRLTQYINNNRSNKIVKRVEQIFRRQSTHTRHENNNRKPEEYLDTLKQKLALKVHRLKRYKKAQQRKNDNMLFTLNEKSFYRNLSKPQTATTRPENIDIPTQTQLETFWSGIWEEPVQHNDKADWITEEENKWNSIEEMEFDCITEDDIAHVTGKLHNWKSPGIDKIHNYWYKKITSFHKPIAKNLTYIILGKQNIPEFIGMGITYMLPKTAHSPQPSQYRPITCLPTIYKILTSAIAHKINMHIEHNHIIAEEQKGCRRGHMGCKEQLIIDSTIHKHATTKNRNLHCTYIDYKKAFDSIPHSWLIKILHIYKINPKITDFMRDIMSHWKTTLHLNMNDRTVTTRQISIKKGIYQGDSLSPLWFCLALNPLSHLLQRCQAGYRLRNSTEETIISHLIYMDDIKLYAKSDKEMTKLLQNTTKFSKDINMEFGLDKCKTLHIIRGKIRPGDYAVDESSTIAAMESTDLYKYLGYKQLKGLDHTSIKQILVTEFKSRTNTLCKTQLSAKNLIKALNTYAIPILTYSFGIIKWTKTDIEQIERTTRTTLTKHNNLHPKSAIERLTIKRENGGRGLIDIYHLWQKQVYNLKTFFRTKSHTSNIHKAITLNDYNFTPLNLNDHTGIHDPNNIDPQADKIENWKKKVLHGRHPHDLEQPHIDTIASNSWLKIGNLFPETEGFIIAIQDQIVNTKNYRKYIIKDATVTDDKCRKCHIQSETIQHITGACITLTQTDYTHRHNQITNIIHQKLALKHHLIQNTNTPYYNYTPQSVLESSSHKLYYDRAILTDRTIHYNRPDITLQDKINKTTYLIDIAVPNTHNLQKTITEKISKYTELKEEIIRIWRQEKVYIVPIVLSTTGVIPKHLHHSLKLINLNESVYFNLQKAAILNTCRTVRKFMDIEENGTAQHTQQPPSTST

SEQ ID NO: 21411 - protein, 1273 aa, Arctia plantaginis
MRNKNNKYNLRPLPGGRRNSIRNNNINNQTDRQTDNDNISLNSLTSLSVTEPYSPSTSSYRPTPVSFVDEDSHETPNPTLAVTQEVNAFLPASTKSGKPRVRMRWSKEVNLFIMRTYYQITKLETDMTTYRKQLHELFTRHYPDINVTEQRIADQRRTIVRNKLLTEETLHILKEEIRMQLHQNEHIYEYIENNSNPQLHNTQSVTTALPTQSQPHTITQSSQISTQPETITLTLENDIEIMQNVNPSSDKIQKIQDKFRTALALYSKMDPITRPKLPKLKYSRKLSELTHFFNHNILHQFLSEDTQLTDIHTLIYCTALVISEELNYKIIDHPRNILRKNSKPPWQIRLEKDIEQLRADCGRLTQYINNNRSNKIVKRVEQIFRRQSTHTRHENNNRKPEEYLDTLKQKLALKVHRLKRYKKAQQRKNDNMLFTLNEKSFYRNLSKPQTATTRPENIDIPTQTQLETFWSGIWEEPVQHNDKADWITEEENKWNSIEEMEFDCITEDDIAHVTGKLHNWKFPGIDKIHNYWYKKITSFHKPIAKNLTYIILGKQNIPEFIGMGITYMLPKTAHSPQPSQYRPITCLPTIYKILTSAIAHKINMHIEHNHIIAEEQKGCRRGHMGCKEQLIIDSTIHKHATTKNRNLHCTYIDYKKAFDSIPHSWLIKILHIYKINPKITDFMRDIMSHWKTTLHLNMNDRTVTTRQISIKKGIYQGDSLSPLWFCLALNPLSHLLQRCQAGYRLRNSTEETIISHLIYMDDIKLYAKSDKEMTKLLQNTTKFSKDINMEFGLDKCKTLHIIRRKIRPGDYAVDESSTIAAMESTDLYKYLGYKQLKGLDHTSIKQILATEYKSRTNTLCKTQLSAKNLIKALNTYAIPILTYSFGIIKWTKTDIEQIERTTRTTLTKHNNLHPKSAIERLTIKRENGGRGLIDIYHLWQKQVYNLKTFFRTKSHTSNIHKAITLNDYNFTPLNLNDHTGIHNPNNIDPQADKIENWKKKVLHGRHPHDLEQPHIDTIASNSWLKIGNLFPETEGFIIAIQDQIVNTKNYRKYIIKDATVTDDKCRKCHIQSETIQHITGACITLTQTDYTHRHNQITNIIHQKLALKHHLIQNTNTPYYNYTPQSVLESSSHKLYYDRAILTDRTIHYNRPDITLQDKINKTTYLIDIAVPNTHNLQKTITEKISKYTELKEEIIRIWRQEKVYIVPIVLSTTGVIPKHLHHSLKLINLNESVYFNLQKAAILNTCRTVRKFMDIEENETAQHTQQPPSTST

SEQ ID NO: 21412 - protein, 763 aa, Noctua janthe
MFYRNLHKPQTDTIDKNNTNIPNLPTKEQLEEYWASIWEDPVQHNDKASWIAEEAVKWRGVDEMEFLEVAETDITHITARLHNWKSPGIDKIHNFWYKKLTSLHKSLAKNLTDIILGQQNTPEFIATGITYMLPKTTNSPQPSQYRPITCLPTIYKILTSTITKKISSHIERHNIIAEEQKGCRQGHMGCKEQLIIDSTIHKHATSKNRNLHCTYIDYKKAFDSVPHSWLIQILEIYRINPKIIDFIRNIMLQWKTTLQINYNHNTVTTRQISIKKGIYQGESLSPLWFCLALNPLSHLLQGCRAGYCLKHTTDETIISHLIYMDDIKLYAKTENDMKKLVDVTAEFSKDINMQFGLEKCKALHIVSGKVRPGDYVVNDTDTISAMEQTDLYKYLGYAQLKGLDHTRIKNTLSNEYKRRVNAICKTQLSGKHLIKALNTFAIPVLTYSFGVIKWSKTDTEQLERTTRTTLTKHNNLHPKSAIERLTIKRQHGGRGLIDIQHLWRKQISRLKSFFHSKSRISSIHKAIVINDLNYTPLNLSHQIETLNTTNDDPQQHKIEDWKRKVLHGRHPHDLEQSHINKLASNKWLKIGSLFPETEGFIIAIQDQIINTKNYRKYIIKDPTATNDKCRKCHSQPETIQHITGACTTLTQTDYTHRHNQVANVVHQKLALKHTLIHNTSTPYYNYKPEATLENTTHKLYYDRAILTDKTIHYNRPDIILQDKINKVTYLIDIAGPNTHNIQKTITEKISKYAELKVEMGCNR

SEQ ID NO: 21413 - protein, 1318 aa, Hydraecia micacea
METRSKRKRLGPLPGGDRRGALGADAECLSMRTVSGEELSRRAPTDKDATADIIDDGDRLTDRTNTPVEPYSPSTVSYTPSRPSTPCVPSSPSISSSPPITSFHSAQPTSTLNVTREVSTFLPASTKAGKARVRMRWSKEVNLFIMRTYLYITKLETDLTTYRKQLHELFTRKYPEITVTEQRISDQRRIIVRNKLLSQDVINQLKEEVRTQLQGESENTEGEITIALTQNTTAYNEQEQPCSQTEPITQSQPYFQSQAYSQTTHTSTQTESITVMLENEIETLADININQSTNTHIQEIHDKFKTALTQYSGMDPAARPRLPKLRYTPKLSQLVHLFNQNILQPYISEETRLIDIHTLIYCTALVISEELNFKITEYTGNSRQKNINKPAWQQRLEKDIEKLRADCGRLTQYINNNRSNKVVKRVEAIFKNMATHTRHENDNRKSEEFLDTLKQKLALKVHRLRRYKKAQERKNDNSLFATNEKNFYRNLQTAQTDTNTRTTENNVELPTTEQLETFWSGIWEEQVQHNKNSNWIIDEETKWSSLEEMEFVELTESDITCVTARLHNWKSPGIDKIHNYWYKKLESLHKVLAKNLTQIILGKQNIPEFIATGITYMLPKAQYSPQPSQYRPITCLPTIYKILTAAITRKINKHIEHHNIIAEEQKGCRRGHMGCKEQLVIDSIIHKHAATKHRNLHCTYIDYKKAFDSIPHSWLIQILQIYKINSKIIDFLQDIMARWRTTLQLNYQNNAITTRQISIKKGIYQGDSLSPLWFCLALNPLSDLLHRSQAGYSLKHATEETIISHLIYMDDIKLYSKSEKEMKKLIDITTEFSKDINMQFGLDKCKTVHIIRGKIKPGDYPINNTDTITAMEPTDLYKYLGYKQLKGLDHSTIKYTLNSEYKRRVVAVCKTQLSGKHLIKALNTYAIPILTYSFGVIKWSKTDIQQIERTTRTTLTKHNNLHPKSAIERLTIKRQYGGRGLIDVHHLWQKQIAKLRTFFHSKSHTSNIHKAVVMNDISYTPLNLHEQIDIQHTGDEDPHKQKLEDWKKKVLHGRHPHDLEQSHIDTIASNKWLKIGNLFPETEGFIIAIQDQIINTKNYRKFIIKDPTIINDKCRKCHSQPETIQHITGACTTLTQTDYTHRHNQVANVIHQKLALKYKLIQDTNTPYYKYVPQTVLESTTHKLYYDRAILTDRTVHYNRPDITLKDKVNNITYLIDIAVPNTHNLQKTIGEKISKYAELKDEVTRIWRQEKVYVVPIVVSTTGVIPNHLHHSLKLIDLKDSIYITLQKAAILNTCRIVRKFLQIEENEISPPNNNSS

SEQ ID NO: 21414 - protein, 1315 aa, Eupsilia transversa
METRSKRKRIGPLPGGDRRGAPGADAGCHSMRTVSGEELNRRAPTDKDATAEISDDGDRLTDRINTPVEPYSPSTVSYTPSRASSLSIPSSPIPSSPPITSLNSIQPTPTLNVAREASSFLPASTKAGKARVRMRWSKEVNLFIMRTYFYITKLETDMTTYRQQLHELFSQQYPEITVSEQRISDQRRAIVRNKLLSQEIIEQLKEETRIKLQETENNTGANDILLSQNITEIAEQPHTQVESYTQSQPYNQTQAYTQTSHTSTQTESITLTLENDIETLTVPDQNLTTDIYIQEIHDKFRTTLAQYSGMDPTVRPKLPKLRYSPNLFRLVNLFNENILNQFISDDTQLIDIHTLIYCTAVVVSEELNFKITQHTGNTRPKQNIKPAWQQRLEKDIEKLRADCSRLTQYINNIRSSKVVRRVEAIFRSSPMHTRHENNNRKPEEFLDTLKQKLALKVHRLRRYKKAQQRKNDNAIFATNEKMFYRNLHKLDTDTNDENNTDAPSQPTKEQLETYWGSIWEEQEQHKDKATWITEEETKWRAIDEMEFVEITEADITHLTGRLHNWKSPGIDKIHNFWYKKLTSLYKPIAKNLTEIILGQQNIPDFIATGITYMLPKTKNSPQPSQYRPITCLPTIYKILTSAITTKINSHIEHHNIMAEEQKGCRRGHMGCKEQLIIDSTIHKHAATKNRNLHCTYIDYKKAFDSVPHSWLIHILEIYRINSKIIDFLRNIMPLWKTTLQLNCNQNNVTTRQIFIKKGIYQGDSLSPLWFCLALNPLSHLLQRCRAGYCFKHTTEQTTVSHLIYMDDIKLYAQTEKDMKKLVEATAEFSLDINMQFGLDKCKTLHIIRGKIRPGNYVVNNTDTITAMESTDLYKYLGYTQLKGLDHVRIKGTLTAEYKRRLNAICKTQLSGKNLIKALNTFAIPILTYSFGVIKWTKTDTEQLERTTRTTLTKHNKLHPKSAIERLTIKRQNGGRGLIDIQHLWRKQVSRLKTFFHSKSRTSNIHKAIAQNDFNYTPLNLNEQPDTPEITSDDPQTQKIEDWKKKVLHGRHPHDLEQSHVNKVASNKFLKIGNLFPETEGFIIAIQDQIINTKNYRKFIIKDPSVTNDKCRKCHIQSETIQHITGACITLTQTDYTHRHNQVANVIHQKLALKYTLIQDTKTPYYNYTPQTILENDTHKLYYDRAILTDRTIHYNRPDITLRDKINKVTYLIDIAVPNTHNIQKTITEKISKYAELKDEVARIWRQEKVYVVPIVLSTTGVIPNHLLHSLKLLNLKETLYITLQKAAILNTCRIVRKFMQIDENEIGPHHNTSVT

SEQ ID NO: 21415 - protein, 1008 aa, Ochropleura plecta
MDPAIRPKLPKLRYSPNLFRLVNLFNENILNQFISDETQLIDIHTLIYCTAVVISEELNFKITQNTGNPRPKQNIKPAWQQRLEKDIEQLRADIGRLTQYINNNRSSKVVRRVEAIFRTHLVHTRHENNNRKPEEFLDTIKQKLALKVHRLRRYKKAQQRKNDNAIFATNEKIFYRNLNKPNTDTHYDTNTDTPTQPTKEQLETYWASIWEQQARHNDEAAWITEEETKWKAIDEMEFVEVTEADITHITGRLHNWKSPVIDKVHNFWFKKLTSLYKPIARNLTQIILGQQNAPEFMATGITYMLPKTKNSPEPSQYRPITCLPTIYKILTSAITTKINTHIEQHNIMAEEQKGCRRGHMGCKEQLIIDSTIHEHATTKNRNLHCTYIDYKKAFDSVPHSWLIQILKIYRINAKIIDFLSNIMSQWKTTLQINCNQNSIITRQILIKKGIYQGDSLSPLWFCLALNPLSHLLQRCQAGYRLKHTTEQTTISHLIYMDDIKLYAQTEKDMKKLVEVTADFSQDINMQFGLDKCKTLHIIRGKIRPGNYVVNNTDTITAMEPTDLYKYLGYTQLKGLDHVRIKETLTAEYKRRLNVVCKTQLSGKNLIKALNTFAIPILTYSFGVIKWTKTDTEQLERTTRTTLTKHNNLHPKSAIERLTIKRQNGGRGLIDIQHLWRKQVIGLRTFFHTKSQTSNIHKAIAQNDQNYTPLNLNEQLDTSHNTNEDPQTQKIEDWKKKVLHGRHPYDLEQTHVNKVASNKWLKIGNLFPETEGFIIAIQDQIINTKNYRKFIIKDPSVTNDKCRKCHTQPETIQHITGACTTITQTDYTHRHNQVANVIHQRLAVQYTLIQDTNTPYYNYTPQATLENDTHKLYYDRAILTDRTIHYNRPDIILQDKINKITYLIDIAVPNTHNIQKTITEKISKYAELKEEVTRIWRQEKVYVVPIVLSTTGVIPNHLLHSLKLLSLKETLYITLQKAAILNTCRIVRKFMQIEENEIGPHHNTPHTST

SEQ ID NO: 21416 - protein, 1055 aa, Mythimna impura
MHTSTQTENLTVTLENEIETLTDSNQNSPTDAFIQDIHDKFKTVLTQYSGMDPAARPKLPKLRYSPKLFQLVHLFNTNILIQYISEEIQLIDVHTLIYCTALVISEELNFKITEYTRNTRHRNTNKPAWQQRLENNIEKLRADCSRITQYINNNRSNKVVRRVEIIFKNMATHTRHETDNRKPEEFLDTLKQKLALKVHRLRRYKKAQERKNDNSRFASNEKSFYRNLQKSQTNTVTPTENNIELPTAEQLEIFWSGIWEDQVQHNEKSDWVIDEQTKWSSLEEMEFVELTESDITRITMRLHNWKSPGIDKIHNYWYKKLESLHKVLAKNFTEIILRKHNIPEFMATGITYMLPKTQYSPQPSQYRPITCLPTIYKILTSAIAAKINKHIEHHNIIAEEQKGCRRGHMGCKEQLVIDSTIHKHAATKNRNLHCTYIDYKKAFDSIPHSWLIQILQIYKINSKLIDFLKNVMLQWKSTLHLNYRDNLNITTRLILRKGIYQGDSLSPLWFCLALNPLSHLLNRCQAGYSLKHTTEKTIISHLIYMDDIKLYAKSEREMKQLIDTTTKFSKDINMQFGLDKCKTVHIIRGKIKPGDYPINNTDTITAMETTDLYKYLGYKQLKGIDHTSIKHTLNTEYKRRVVAVCKTQLSGKHLIKALNTYAIPILTYSFGVIKWSKTDIQHIERTTRATLTKHNNLHPKSAVERLTIKRQCGGRGLIDIHHLWQKQITRLRTFFHSKSHTSNIHKAIVINDINYTPLNLNDQIETPHTNIDDPQKQKLENWKKKVLHGRHPHDLEQSHIDTMASNKWLKIGTLFPETEGFIIAIQDQIINTKNYIKFIIKDPTMTNDKCRKCHTQPETIQHITGACTTLTQTDYTYRHNQVANIIHQNLALKYKLIQDTNTPYYKYAPQKVLENTTHKLYYDRAILTDRTIHYNRPDITLQDKINKITYLIDIAVPNTHNLQKTIGEKISKYAELKEEVTRIWRQEKVYVVPIVVSTTGVIPHHLHHSLKLIELKDSTYITLQKAAILNTCRIVRKFMQIEENEISPHNTHFSP

SEQ ID NO: 21417 - protein, 1304 aa, Euproctis similis
MEMYLRNRRIGPLPGGDRRGTSGADAGCDSIRSVGGEELNRRAPSGSPEDITANPTDYRQTDNDNISVNSLISDPVEPYSPSSNSFIPTPVSSLGSDSSRTHSPVLNVAQEVNTFIPASTKAGKPRVRMRWSKEVNTFIMRTYYHITKLETDMTIYRKRLHELFSRQYPEITVTEQRISDQRRAIIRNKLLSQETLEQLKDEVQITLSKDENCATNRNLDPFTNTQIEDNLDNEYIMSPTATTHSQSQPYPLLQTINTSTQTETITLTLENDIEILVDNNNETLDTYAGELETKFRTALTKYSGIKPADRPKLPKLKYSIQLTKLTNFFNQHILHTYLNKDTQLTDIHTLIYCTAVVISEELNYKISHNYQNFKTRDNRKPAWQLRLEKDIEKIRADCGRLTQYINNNRSKKVVKRIEQIFKNHLTHTRHESENKNPAEYLDTLKQKLAVKVNRLKRYKKALQRKEENALFGSNEKYFYRNLKTSQIHNSPSTNIEIPSKTDLEHFWSGIWEEKIEHNDKADWILEEAKQWDTIEEMPFEKITENDIKSVTLKLHNWKSAGIDKVHNFWYKKLTVLHKSIARILTDIILGRNNIPEFLTIGITYMIPKNKYSAQPSQYRPITCLPTIYKILTSVIAQKINKHAEKNNIIAEEQKGCRRGHMGCKEQLLIDSVIHRNASTKNRNLHCTYIDYKKAFDSIPHSWLLKILQIYKINPKLIQFMRNIMPHWKTTLQLNYQETTIKTREIKINKGIYQGDALSPLWFCLALNPLSHLLHRCRVGYCLKHPTEQRNISHLIYMDDIKLYTQSKKDMNKLLKVTTEFSKDINMQFGFDKCKTLNIIRGKIQPGDCDVDDDNIIAAMEPTDFYKYLGYNQTKGLNHTVIKENILNEYKNRVNKLCKTQLSAKNLFKAINTYAIPVLTYSFGVIKWSKTNIEHLERVTRTTLTKHNHLHPKSAIERLTIKREMGGRGLIDISQLWQKQIQNLRNFFHTKSQASTIHKVITHNDLNYTPLNLSDFQNTHYNFNTDHQIYQIENWKKKTLHGRHPHDLEQNHVDQIASNKWLKIGSLFPETEGFMIAIQDQIINTKNYRKYIIKDSSVTDDKCRKCYSQPETIQHITGACVTLTQTDYTHRHNQIVNIIHQNLALKHNLIPNSLTAYYNYRPQTVLENTTHKLYYDRAILTDKTIHYNRPDVVLQDKLNKTTYMIDISVPNTHNLQKVISEKISKYAELKEEIARIWRQDKVYVVPIVLSTTGIIPKHLHSSVKLLGLKESLYIILQKAAILNTCRIVRKFMALDENSSHNAPST

SEQ ID NO: 21418 - protein, 1185 aa, Agrotis ipsilon
MKWSREGNLFIMRTYLYITKLETDMTTYRQQLHAHFTRQYPEITVSEQRISDQRRTIVRNKLLSQEVIGQLKEEVRTQLLQEEAINSYVETNNITQNTSQTDRQVQPQLLSQSQLINTQSQPYNHSLTSTQITHTSTQTESVILTLENDIETIVVPDQHLTTDTYIQEINEKFRTTITLYSGMDPAARPRLPKLKYTPNLFRLVNLFNENILTQYISDDTQLIDIHLLIYCTAVVISEELNFKITNHVRPTRTRQNMNPAWQQRLEKDIEKLRANIGRLTQYINGCRSHKLVKKVEEIFRNNSTHTRHERSNTRPEDFLDTLKQKLALKVHRLKRYKKALQRKNDNATFATNEKMFYKNLHKPLTHTTDDHSTHTHNLPTKEQLEAYWAGIWEDQKQHNDKASWIGQEEAKWRDIEEMEFEEVTELDITIITARLHNWKSPGIDKIHNFWYKKLTSLHKPLAKSLTDIITGQQNTPEFIATGITYMLPKTKKSPQPSQYRPITCLPTIYKILTSAITKKIQSHIKHHNIIAEEQKGCRQGHMGCKEQLIIDSTIHKHATSKNRNLHCTYIDYKKAFDSVPHSWLLKILEIYRINTKVIDFLRRIMLQWKTTLQINCNQNTVTTRQISIRKGIYQGDSLSPLWFCLALNPLSHLLQSCGAGYYLKHNTDVTTISHLIYMDDIKLYAKTEKDMKKLIDITTEFSNDINMHFGLDKCKTLHIVRGKVRPGDYVVNETEAITAMEPTDLYKYLGYVQLKGLDHVRIKNSLITEYKRRLNAVCKTQLSSKHLIKAINTYAIPILTYSFGVIKWSKTDAEQLERTTRTTLTKHNNLHPKSAIERLTIKREHGGRGLIDIQHLWRKQVSRLKSFFHTKSHTSNIHKAIVTNDLNYTPLNLSNQIETQNTISENPQTQKIDDWKKKVLHGRHPHDLEQSHINKLASNKWLKIGNLFPETEGFIIAIQDQIINTKNYRKYIIKDPTVNNDKCRKCHTHPETIQHITGACTTLTQTDYTHRHNQVANVIHQKLALKHALIQDANTPYYNYTPKPTLENTTHKLFYDRGILTDRTIHYNRPDIILQDKINNITYLIDIAVPNTHNLQKTITEKISKYAELKEEVTRIWRQEKVYVVPIVLSTTGVIPNHLLHSLKLLDLEETLYITLQKAAILNTCRIVRKFMQIEENEIGPHENT

SEQ ID NO: 21419 - protein, 771 aa, Mesoligia furuncula
MEFVEITEADITHLTGRLHNWKSPGIDKIHNFWYKKLTILHKPIAKNLTKIILRQQNIPDFIATGITYMLPKPKNSPQPSQYRPITCLPTIYKILTSAITMKINSHIEHHNIMAEEQKGCRRGHMGCKEQLIIDSTIHKHASTKNRNLHCTYIDYKKAFDSVPHSWLIQILEIYRINSKIIDFLRNIMPLWKTTLQINCNHKNITTRQISIRKGIYQGDSLSPLWFCLALNPLSNLLQRCRAGYCFKHTTEQTTVSHLIYMDDIKLYAQTEKDMKKLVEATSAFSLDINMQFGLDKCKTLHIIRGKIRPGNYVVNNTDTITAMEPTDLYKYLGYTQLKGLDHVRIKETLTAEYKRRLNAVCKTQLSSKNLIKALNTFAIPILTYSFGVIKWTKTDTEQLERTTRTTLTKHNNLHPKSAIERLTIKRHIGGRGLIDIQHLWRKQVCRLKTFFQSKSRTSNIHKAIVQNDFSYTPLNLNEQLDTPQNTSDDPQKQKIEDWKKKVLHGRHPHDLEQSHVNQLASNKFLKIGNLFPETEGFIIAIQDQIINTKNYRKFIIKDPSVTNDKCRKCHIQPETIQHITGACTTLTQTDYTHRHNQVANVIHQKLALKYTLIQDANTPYYNYTPQTILENDTHKLYYDRAILTDRTIHYNRPDITLQDKINKVTYLIDIAVPNTHNIQKTISDKISKYAELKDEVTRIWRQQKVYVVPIVLSTTGVIPNHLLHSLKLINLKETLYITLQKAAILNTCRIVRKFMQIDENEVGSHHNTSST

SEQ ID NO: 21420 - protein, 1283 aa, Mesoligia furuncula
MRTVSGEELNRRAPTDKDATAEVIDDGDRLTNRTDTPVEAYSPSTVSYSPSRTSSPSIPSSSIPSSPPITSFNTVSPTPALNVAREVSTFLPASTKAGKTRVRMRWSKEVNLFIMRTYLYITKLETDMTTYRQQLHECFSRQYPEISVSEQRISDQRRTIVRNKLLSQVELDQLKEEIRIQLQQESENCADTNTIIPTQNTNINILQEQPQSLTQLHPNSQSLTCNQSQAFTQAFTQTAHTSTQTESLTLTLENDIETLVVADQNLVTDTYIQEIQDKFKTTIAQYSGMDPAVRPKLPKHKYTRNLFRLVNLFNENILVQFISDDTQLIDIHLLIYCTAVVISEELNFKITDHTVTTRTKPFVKPAWQQRLEKDIEKLRADCGRLTHYINGIRSNKVVKRVETIFKNYSNHTRHESNNRKPEEFLDTLKQKLALKVHRLRRYMKAQQRKNDNATFAMNEKAFYRNIQKTHSDTRIENNTDALSKEQLEAYWSSIWEEQVQHNDKASWIAEEEAKWRAIDEMEFAEVSESDITHITARLHNWKSPGVDKIHNFWYKKLTSLHKSIAKNLTDIILGQQNTPEFIATGITYMLPKTKCSSQPSQYRPITCLPTIYKILTSAITKKISSHIEQHNIIAEEQKGCRQGHMGCKEQLIIDSTIHKHATSKNRNLHCTYIDYKKAFDSVPHSWLIQILEIYRINPKIINFMRHIMLQWKTTLQINSNHSNVTTRQISIKKGIYQGDSLSPLWFCLALNPLSHLLQACRAGYCLKHTTEETTISHLIYMDDIKLYGKTEKDMKKLVEITAAFSKDINMQFGLDKCKTLHIIRGKVQPGDYAVNDTDTITAMEPSDLYKYLGYTQLKGLDHVRIKNTLTTEYKRRLNAVCKTQLSGKHLIKALNTFAIPVLTYSFGVIKWTKTDTEKLERTTRTALTKHNNLHPKSAIERLTIKRQNGGRGLIDIQHLCRKQVSRLKTFFHTKSRTSNIHKAIVINDLNYTPLNLNDQIETQNTTNDDPQKQKIEEWKKKVLHGRHPHDLEQSHINQLASNKWLKIGNLFPETEGFIIAIQDQIINTKNYRKFIIKDPSITNDKCRRCHIQSETIQHITGACTTLTQTDYTHRHNQVANIIHQKLALKHSLIQNSCTPYYKYTPQTILENDTHKMYYDRAILTDRTIHYNRPDITLQDKIRKITYLIDIAVPNTHNLQKTISEKISKYAELKEEVTRIWSQEKVYVIPIVLSTTGVIPNHLLRNLKLIDLEESVYINLQKAAILNTCRIVRKFMQLEEENTP

SEQ ID NO: 21421 - protein, 1315 aa, Xestia c-nigrum
METRSKRKRIGPLPGGDRRGAPGADAGCHSMRTVSGEELNRRAPTDKATTAEIIDDGDRLTDRTDTPVEPYSPSTVSYTPSRRSSPSIPSSPTLSSSPTISLNTVTPTPVLNAARGVSTFLPASTKTGKARVRMKWSKEVNLFIMRTYLHITKLETDMTTYRQQLHSLFTRQYPEITVSEQRISDQRRIIVRNKLLSQEVIDQLKEEVRTQLLQEETVTDTNNITQNISEISNQEQPQSLNQSQILYSLSPYNQSQAYTQNISHTSTQTESITLTLENDIETIVTPDQHLTTDTYIQEIIDKFRTTITQYSGMDPAARPRLPKLKYTPNLFRLVNLFNETILTQYISDDTQLIDIHLLIYCTAVVISEELNFKITNHTGNPRTRPNIVPAWQQRLEKDIEKLRADIGRLTQYISGCRSNKLVKKVEVIFRNNLTHTRHEQNNRKPEEFLDTLKQKLALKVHRLKRYKKAQQRKNDNAIFTTNEKVFYRNLHIPKNDRNYENNTNTPNLPSKEQLETYWAGIWEEQKQHNDKASWIANEETKWRDIDEMEFVEVTESDLTHITARLHNWKSPGIDKIHNFWYKKLTALHKSLAKNLTDIVLGKQNIPEFITTGITYMLPKTKYTSEPSQYRPITCLPTIYKILTSAITKKINSHIIHHNIIAEEQKGCRQGHMGCKEQLIIDSTIHKHATSKNRNLHCTYIDYRKAFDSVPHSWLIQILGIYRINPKIIDFMRHVMLQWKTTLQINSSNNNVTTGQISIKKGIYQGDSLSPLWFCLALNPLSHLLQSCGAGYCLKHSTDETTISHLIYMDDIKLYAKSEKDMKKLVDITAEFSKDINMQFGLEKCKTLHIVRGKVRPGDYAVNESDSITALEPTELYKYLGYTQLKGLDHVKIKETLTTEYKKRVNAVCKTQLSGKHLIKALNTFAIPVLTYSFGVIKWTKTDTEQLQRTTRTTLTKHNNLHPKSATERLTIKREHGGRGLIDIQHLWRKQISRLKSFFHTKSHNSNIHKAIVTNDLNYTPLNLSDQIEAQNTTNGDPQTQKIEDWKKKVLHGRHPHDLEQSHINKLASNKWLKIGNLFPETEGFIIAIQDQIINTKNYRKYIIKDPTVTNDKCRKCHLHPETIQHITGACTTLTQTDYTHRHNQVANVIHQKLAIKHTLIQNTNTPYYNYKPEATLENTTHKLYYDRAILTDRTIHYNRPDLILQDKIKKVTYLIDIAVPNTHNVQKTITEKISKYAELKEEVTRIWRQEKVYIVPIVLSTTGVIPNHLIHSLKLLDLKETLYITLQKAAILNTCRIVRKFMQIEENEIGLYHNT

SEQ ID NO: 21422 - protein, 1309 aa, Omphaloscelis lunosa
METRSKSKRIGPLPGGDRRGTLGADAECLSMRTVSGEELNRRTPTDKDVTAEIIDDGDGLTNRTNTPVEPYSPSTVSYTPSRPSSPSIPSSPPITCLNSIPPTPTLNVAREVSSFLPASTKAGKARVRMRWSKEVNLFIMRTYFYITKLETDMTTYRQQLHELFTRQYPEITVSEQRISDQRRVIVRNKLLSPQIIEQLKEETRIQLQEAENITNDNAIPLLQNLTAIDEQPHTQVEPYTQSQPYNQSQAYTQTPHTSTQTESITLTLENDIETLTVADQNLTTDMYIQEIHDKFRTTLAQYSGMDPTVRPKLPKLRYSPNLFRLVNLFNENILNQFVSDDTQLIDIYTLIYCTAVVVSEELNFKITQHTGNTRPKQNIKPAWQQRLEKDIEKLRADCSRLTQYINNIRSNKVVRRVEAIFRNSFTHTRHENNNRKPEEFLDTLKQKLALKVHRLRRYKKAQQRKNDNAIFASNEKMFYRNLHKPDTDTNHENNTDAPDQPTKEQLETYWSSLWEEQKQHNNKATWITEEETKWRAIDEMEFVEITEADITHLTGRLHNWKSPGIDKIHNFWYKKLTSLYKPIAKNLTEIILGQQNIPDFIATGITYMLPKTKKSPQPSQYRPITCLPTIYKILTSAITTKINSHIEHHNIMAEEQKGCRRGHMGCKEQLIIDSTIHKHATIKNRNLHCTYIDYKKAFDSVPHSWLIQILEIYRINSKIIDFLRNIMPLWKTTLQINCNQYNVTTRQIAIKKGIYQGDSLSPLWFCLALNPLSHLLQRCRAGYCLKHTTEQTTISHLIYMDDIKLYAQTEKDMKKLVEATAEFSLDINMQFGLDKCKTLHIIRGKIRPGNYVVHSTDTITAMEPTDLYKYLGYTQLKGLDHVRIKESLTAEYKRRLSAICKTQLSSKNLIKALNTFAIPVLTYSFGVIKWTKTDTEHLERITRTTLTKHNNLHPKSAIERLTIKRQNGGRGLIDIQHLWRKQVCRLKTFFHSKSRTSNIHKAIAQNDFNYTPLNLIEHRDTTQITSDDPQKQKIEDWKKKVLHGRHPHDLEQSHVNKLASNKFLKIGNLFPETEGFIIAIQDQIINTKNYRKFIIKDPSVINDKCRKCHIQPETIQHITGACTTLTQTDYTHRHNQVANVIHQKLAVKYTLIQDTNTPYYNYAPQIILENDTHKLYFDRAILTDKTIHYNRPDITLQDKINKVTYLIDIAVPNTHNIQKTISEKICKYAELKDEVTRIWRQQKVYVVPIVLSTTGVIPNHLLHSLKLLNLKETLYITLQKAAILNTCRIVRKFMQIDENEIGPHNTSST

SEQ ID NO: 21423 - protein, 1303 aa, Hyles vespertilio
METRSKKKLRGPLPGGDRRGTPGADAGCSSLRTVSGEELSRRTPTGSPENITADNDLDRLTDSRSNSPIEPYSPSTISYMPSTCESPSIPSSPPSNNIRDPPILALDAAREVNTFLPVTTKAGKPRVRMSWSKDVNLFIMRTYYYITKLETDMTIYRKQLHEHFSRQYPDIKVTEQRLSDQKRAIERNKLLSQDILDQLKEEVRRQLNVETDSSENTIPGLANTSPCDLPRNNQSQPLTQNTQIFNRESETINQSYNLITQTSHISTQTDGIILTVENDIDCLPEPNIITEKHIQELQNKIITTLTLYSGLDPASRPKLPKLKYNPKLNSLIQTFNQKILNNFISDSTKLIDIHTLIYCSALVIAEELGYKIIELTDNQTRPKHNNKPSWQYRLEKDIEKLRADCGRLTQYINNNRSKKVIKRVEEIFKHHKTHTRHENNNSKPEEFLDTLKQKLALKAQRLKRYKKSQNRIKDNILFTTNEKLFYRSIRNPHLDISNETPENPPTTEEVEHFWASVWEDQAQHNEKADWIKAEENRWSTIEEMEFIEITEADIKITTTRLHNWKSPGIDKIHNFWFKKFTTLHKAIAKNFTDIILRKQNIPQFIATGITYLLPKDKISSQPSQYRPITCLPTIYKILTSVITSKITTHIENHNIIAEEQKGCRWGHMGCKEQLVIDSVIHKHANTKNRNLHCTYIDYKKAFDSIPHSWLIHILKIYKINNNIIAFLQDIMPYWKTTLYLNSRNSTLMTRQINIKKGIYQGDSLSPLWFCLALNPLSHILHNCRAGYHLKHASGETTVSHLIYMDDLKLYAKSEKDMKKLIEATSDFSRDIDMHFGLDKCKTIHIVRGKIRPGDYTVNNSDTITAMEPNDLYKYLGYKQLKGIDHGTIKNSLSAEYKRRINAICKTQLSGKHLIKALNTYAIPILTYSFGIIKWSKTNIETIERTTRTTLTKHNLLHPKSAIERLTIKRQEGGRGLIDIHHLWKKQLNNLKTFFHAKSSTSNIHNAIIQNDNNFTPLNLQEENRLESADNMDSQKKKTEDWKKKVLHGRHPHDIEQTHIDTTASNKWLKIGNLFPETEGFIIAIQDQVINTKNYRKYIIKDPTITNDKCRRCHSQPETIQHITGACTSLTQTDYTHRHNQIASIIHQKLALKYKLIHDSKTPYYKYKPETVIENPSYKLYFDRAILTDRTIHFNRPDITLQDKRNKTTYLIDIAVPNTHNIQKTIAEKNNKYSDLKDEITRIWRQDKVYIVPIVLSTTGVIPKHLHHSLKLLNLNESLYITLQKASILNTCRIVRKFLQLDET

SEQ ID NO: 21424 - protein, 1318 aa, Hydraecia micacea
METRSKRKRLGPLPGGDRRGALGADAECLSMRTVSGEELSRRAPTDKDATADIIDDGDRLTDRTNTPVEPYSPSTVSYTPSRPSTPCVPSSPSISSSPPITSFHSAQPTSTLNVTREVSTFLPASTKAGKARVRMRWSKEVNLFIMRTYLYITKLETDLTTYRKQLHELFTRKYPEITVTEQRISDQRRIIVRNKLLSQDVINQLKEEVRTQLQGESENTEGEITIALTQNTTAYNEQEQPCSQTEPITQSQPYFQSQAYSQTTHTSTQTESITVMLENEIETLADININQSTDTHIQEIHDKFKTALTQYSGMDPAARPRLPKLRYTPKLSQLVHLFNQNILQPYISEETRLIDIHTLIYCTALVISEELNFKITEYTGNSRQKNINKPAWQQRLEKDIEKLRADCGRLTQYINNNRSNKVVKRVEAIFKNMATHTRHENDNRKSEEFLDTLKQKLALKVHRLRRYKKAQERKNDNSLFATNEKNFYRNLQTAQTDTNTRTTENNVELPTTEQLETFWSGIWEEQVQHNKNSNWIIDEETKWSSLEEMEFVELTESDITCVTARLHNWKSPGIDKIHNYWYKKLESLHKVLAKNLTQIILGKQNIPEFLATGITYMLPKAQYSPQPSQYRPITCLPTIYKILTAAITRKINKHIEHHNIIAEEQKGCRRGHMGCKEQLVIDSIIHKHAATKHRNLHCTYIDYKKAFDSIPHSWLIQILQIYKINSKIIDFLQDIMARWRTTLQLNYQNNAITTRQISIKKGIYQGDSLSPLWFCLALNPLSDLLHRSQAGYSLKHATEETIISHLIYMDDIKLYSKSEKEMKKLIDITTEFSKDINMQFGLDKCKTVHIIRGKIKPGDYPINNTDTITAMEPTELYKYLGYKQLKGLDHSTIKYTLNSEYKRRVVAVCKTQLSGKHLIKALNTYAIPILTYSFGVIKWSKTDIQQIERTTRTTLTKHNNLHPKSAIERLTIKRQYGGRGLIDVHHLWQKQIAKLRTFFHSKSHTSNIHKAVVMNDISYTPLNLHEQIDIQHTGDEDPHKQKLEDWKKKVLHGRHPHDLEQSHIDTIASNKWLKIGNLFPETEGFIIAIQDQIINTKNYRKFIIKDPTIINDKCRKCHSQPETIQHITGACTTLTQTDYTHRHNQVANVIHQKLALKYKLIQDTNTPYYKYVPQTVLESTTHKLYYDRAILTDRTVHYNRPDITLKDKVNNITYLIDIAVPNTHNLQKTIGEKISKYAELKDEVTRIWRQEKVYVVPIVVSTTGVIPNHLHHSLKLIDLKDSIYITLQKAAILNTCRIVRKFLQIEENEISPPNNNSS

SEQ ID NO: 21425 - protein, 1317 aa, Noctua pronuba
METRSKRKRIGPLPGGDRRGTPGADAGCLSMRTVGGEELSRRAPTDKNTTAEIIDDGDRLTDRTDTPVEPYSPSTVSYTPSRRSSPSIPSSPSVLSPPIISLNTVTPTPTLNAARGVSTFLPASTKAGKARVRMKWSKEVNLFIMRTYLHITKLETDMTTYRQQLHALFTRQYPEITVSEQRVSDQRRIIVRNKLLSQEVIDQLKEEVRTQLLQEETVNYIDANNITQNLSEISHQEQPQSLSQSQLIYSQSQPYNQSQAYTQISHTSTQTESITLMLENDIETIVVPDQQLTTDTYIQEINDKFRTTLTQYSGMDPAARPRLPKLKYTPNLFRLVNLFNESILTQFISDDTQLIDIHLLIYCTAVVISEELNFKITNHTGTPRTRQNLSPAWQQRLENDIEKLRADIGRLTQYINGCRSNKIVKRVEAIFRNNLTHTRHEKDNRKPEEFLDTLKQKLALKVHRLRRYKKAQQRKKDNATFATNEKMFYRNLHKPQTDTIDENNTNTPNLPTKEQLEEYWASIWEEPVQHNDKAAWIAEEEVKWRALDEMEFVEVAETDITHITARLHNWKSPGIDKIHNFWYKKLTSLHKSLAKNLTDIILGQQNTPEFIATGITYMLPKTKNSPQPSQYRPITCLPTIYKILTSAITKKISSHIEHHNIIAEEQKGCRQGHMGCKEQLIIDSTIHKHATTKNRNLHCTYIDYKKAFDSVPHSWLIQILEIYRINPKIIDFIRHIMLQWKTTLQITYNHNAVTTRQISIKKGIYQGDSLSPLWFCLALNPLSHLLQRCGAGYCLKHTTDETTISHLIYMDDIKLYAKTENDMKKLVDVTAEFSKDINMQFGLEKCKTLHIVRGKVRPGDYVLNDTDAISAMEQTDLYKYLGYAQLKGLDHTRIKNTLTNEYKRRVNAVCKTQLSGKHLIKALNTFAIPVLTYSFGVIKWSKTDTEQLERTTRTTLTKHNNLHPKSAIERLTIKRQHGGRGLIDIQHLWRKQVSRLKSFFHSKSRSSSIHKAIVINDLNYTPLNLSHQTETLNTTNDDPQQHKMEDWKRKVLHGRHPHDLEQSHINKLASNKWLKIGNLFPETEGFIIAIQDQIINTKNYRKYIIKDPTVTNDKCRKCHSQPETIQHITGACTTLTQTDYTHRHNQVANVIHQKLALKHTLIQNTSTPYYNYKPEVTLENTTHKIYYDRAILTDKTIHYNRPDIILQDKINKVTYLIDIAVPNTHNIQKTITEKISKYAELKDEVTRIWRQEKVYVVPIVLSTTGVIPNHLLHSLKLLDLKESIYIILQKAAILNTCRIVRKFMQIEENEIGPHHNT

SEQ ID NO: 21426 - protein, 1301 aa, Euproctis similis
MEMHLRNRRIGPLPGGDRRGTSGADAGCDSIRSVGGEELNRRAPSGSPEDTTANPTDYRQTDNDNISVNSIISDPIEPYSPSSNSFIPTPVSSLGSDSSRTHSPVLTVAQEVNTFIPASTKAGKPRVRMRWSKEVNTFIMRTYYYITKLETDMTIYRKRLHELFSRQYPLITVTEQRISDQRRAIIRNKLLSQETLEQLKEEVRITLSEDENNAPNRNLDSFTDTQTEDTPDITSPTVTTHSQSQLYPLLQTINTSTQTETITLTLENDIEILVDNNNQTLDTYTGELEIKLRTALTKYSGMKPADRPKLPKLKYSIQLTKLTHLFNQHILHTYLNKDTQLTDIHTLIYCTAVVISEELNYKISHNHQNFKTRDNRKPAWQLRLEKDIEKIRADCGRLTQYIKNNRSKKVVKRVEQIFKNHLIHTRHEGDNKNPAEYLDTLKQKLAVKVNRLKRYKKALQRKEENALFGSNEKSFYRNLTTSQIHISPPTNIEIPSKTDLEHFWSGIWEEKMEHNDKADWILEELKQWDTIEEMPFEEITENDIKDVTLKLHNWKSAGIDKVHNYWYKKFTILHKSIARILTDIILGRENIPDFLTIGITYMIPKNKYSSQPSQYRPITCLPTIYKILTSVIAHKINNHAEQNNIIAEEQKGCRQGHMGCKEQLLIDSVIHRNASVKNSNLHCTYIDYKKAFDSIPHSWLLKILQIYKINTKLIRFLSNIMLHWKTTLQLNYNQTTIKTREININKGIFQGDSLSPLWFCLALNPLSHLLHRCKVGYCLKHTTEQTNISHLIYMDDIKLYAQSKKQMEKLLDVTTEFSKDINMQFGLDKCKTLNIIKGKIQPGDCSVDDDNIIAAMEPTDFYKYLGYNQTKGLNHTLIKENILHEYKNRVNSLCKTQLSAKNLFKALNTFAIPVLTYSFGVIKWSKTNLELLERVTRTTLTKHNHLHPKSAIERLTIRRETGGRGLIDIQQLWQKQIQNLRTFFHKKSRASSIHKAITHNDLNFTPLNLSDFQNTLSNFNTDHQINHIESWKKKTLHGRHPHDLEQNHVDQIASNKWLKVGSLFPETEGFMIAIQDQIINTKNYRKFIIKDSSVTDDKCRKCYSQPETIQHITGACVTLTQTDYTHRHNQLVNIVHQNLALKHNLIPNSLTPYYNYTPQTVLENTTHKLYYDRAILTDKTIHYNRPDIVLQDKHNKITYMIDISVPNTHNVQKVISEKINKYTELKEEITRIWRQDKVYIVPIVLSTTGIIPKHLHGSIKLLGLKESLYIILQKAAILNTCRIVRKFMALDENSSHNVPST

SEQ ID NO: 21427 - protein, 1326 aa, Thyatira batis
METRSKRIRIGPLPGGDRRGTPGADAGCFSMRTVSGEELNRRAPTDKDTTAENIDDGDRLTDRTNTPAEPYSPSTISYTPSRTSSPSIPSSPPNRILNTVSPTPTLNVAREVNTFLPVSTKAGKPRVRMSWSKDVNIFIMRTYFRITRLETDLTTYRQQLHELFTQQYPGITVSEQRISDQRRIIVRNKLLSPEIIKQLKEETRLHLQEEQNNIDNIATSLNANETNTQHSQIELTTNTHCQYNYSLTNTQTSHTSTQTESITVMLENDIETIDTPDQNIISNEILQEINNKFRTTLTQYSGMDPAARPKLPKLKYSPKLFRYVNLFNENILNQFTCDDTKLIDIHTLIYCTAVVISEELNFKITDHSINSRPKHKTQPPWQQRLEKDIEKLRADCGRLTQYINNNRSSNVVRRVEAIFQSSLTHTRHENNNRRPEEFLDTLKQKLALKVHRLRRYNKAQQRKNDNALFAKNEKMFYRTLHKPHTDNVNTNDTNTNNTDTNNTNTNNTDTNNTTDTPTKEQLETFWSSIWEEQVQHNDKASWIIDEETKWKAIDEMEFVEITESDISNITARLHNWKSPGLDKIHNFWYKKLTSLHKALAKNLTEIILGKQNIPDFIATGITYMLPKSKNSVQPSQYRPITCLPTIYKILTSAITAKINIHIEHHKIMAEEQKGCRRGHMGCKEQLIIDSTIHKHATTKNRNLHCTYIDYKKAFDSVPHSWLLQILKIYKINPKIIAFLRNIMSQWKTTLQINSNHNTIITRQISIKKGIYQGDSLSPMWFCLALNPLSHLLQRCQAGYNLKHTINQTKVSHLIYMDDIKLYAQTEKDMKKLVVATSEFSRDINMQFGLDKCKTLHIIRGKVKPGNYSINNTDTITAMEPADLYKYLGYSQLKGLDHVRIKNTLTIEYKRRLNAVCKSQLTGKHLIKALNTYAIPILTYSFGVIKWTKTDTEQLERTTRTTLTKHNNLHPKSAIERLTIKRQNGGRGLIDIQHLWQKQVSRLKTFFHTKSLTSNIHKAIALNDHNYTPLNLIEQVDTQYTNNEDPQKQKIEDWKKKVLHGRHPHDLQQSHINTLASNKWLKIGNLFPETEGFMIAIQDQIINTKNYRKYIIKDPTVTNDKCRKCHTQPETIQHITGACTTLTQTDYTHRHNQVANVIHQKLALKYTLIQNTNTPYYNYTPQTILENTTHKLYYDRAILTDRTIHYNRPDITLQDKINKITYLIDIAVPNTHNIQKTITEKITKYLELKDEVTRIWRQEKVYIVPIVLSTTGVIPNHLLHSLKLIDLHETLYITLQKAAILNTCRIVRKFMQLEEGEIDPHSQNTHT

SEQ ID NO: 21428 - protein, 1317 aa, Noctua fimbriata
METRSKKKRIGPLPGGDRRGAPGADAGCLSMRTVSGEELNRRAPTDKDTTAEIIDDGDRLTDRTDTPVEPYSPSTVSYTPSRRSSPSIPSSPTPLSPPIITLNTISPTPTLNAARGVSTFLPASTKAGKARVRMKWSKEVNLFIMRTYLHITKLETDMTTYRQQLHALFTRQYPDITVSEQRISDQRRTIVRNKLLSQEVIDQLKEEVRTQLLHEETVNYTDTNNITQNLSEISHQEQPQSLSQSQIIYTQSQPYNQSEAYTQISHTSTQTESITLTLENDIETIVVPDQHLTTDIYIQEINDKFRTTITQYSGMDPAARPRLPKLKYTPNLFRLVNLFNESILTHFISDDTQLIDIHLLIYCTAVVISEELNFKITDHTRATRTRQNVAPAWQQRLEKGIEKLRADIGRLTQYINGCRSNKLVKRVEVIFRNNATHTRHELNNRKPEEFLDTLKQKLALKVHRLKRYKKAQQRKNDNAIFTTNEKIFYRNLHNPKNDRNYENNTNTPNLPSKEQLETYWASIWEEQKQHNDKASWIVDEEEKWRDIDVMEFVEVTESDIIHITTRLHNWKAPGIDKIHNFWYKKLTTLHKSIAKNLTDIILGQQNRPEFITTGITYMLPKTKYTSEPSQYRPITCLPTIYKILTSAVTKKINSHIIHHNIIAEEQKGCRQGHMGCKEQLIIDSTIHKHATSKNRNLHCTYIDYKKAFDSVPHSWLIQILEIYRVNPKIIDFMRHVMLQWKTTLQINSNNNNVTTRQISIKKGIYQGDSLSPLWFCLALNPLSHLLQRCGAGYCLKHSTDETTISHLIYMDDIKLYAKSEKDMKKLVDITAEFSKDINMQFGLEKCKTLHIVRGKVRPGDYAVNESDSITALEPTDLYKYLGYTQLKGLDHVKIKNTLTAEYKKRVNAVCKTQLSGKHLIKALNTFAIPVLTYSFGVIKWTKTDTEQLQRTTRTTLTKHNNLHPKSAIERLTIKREHGGRGLIDIQHLWRKQVSRLKLFFHTKSRTSNIHKAIVTNDLNYTPLNLSDQIETQNTTNDDQQIQKIEDWKRKVLHGRHPHDLEQSHINKLASNKWLKIGNLFPETEGFIIAIQDQIINTKNYRKYIIKDPTLTNDKCRKCHVHPETIQHITGACTTLTQTDYTHRHNQVANVIHQKLALKHTLIQNTNTPYYNYKPETTLENTTHKLYYDRAILTDRTIHYNRPDIILQDKLNKVTYLIDIAVPNTHNIQKTITEKISKYAELKEEVTRIWRQEKVYVVPIVLSTTGVIPNHLIHSLKLLDLKETLYITLQKAAILNTCRIVRKFMQIEENEIGPHQNT

SEQ ID NO: 21429 - protein, 1324 aa, Mesoligia furuncula
METRSKRKRIGPLPGGDRRGALGADAECLSMRTVSGEELNRRAPTDKDATADIIDDGDRLTDRINTPVEPYSPSTVSYTPSRPSTPSIPSSPSIPSSPPITSFNSVQPNSTLNVTREVSTFLPASTKAGKARVRMRWSKEVNLFIMRTYLYITKLETDLTTYRKQLHELFTRQYPEITVTEQRISDQRRIIVRNKLLSQDIINQLKEEVRTQLQGESENTAGAISIALTQNTTAYNQQEQPCSQTEPIIQSQPITQSQPYFQSQAYSETTHTSTQTESITIMLENEIETLADISINQSTDTHIQEIHDKFKTALTQYSGMDPAARPRLPKLRYTPKLSQLVHLFNQNILQQYISEETHLIDIHTLIYCTALVISEELNFKITEYTGNSRQRNINKPAWQQRLEKDIEKLRADCGRLTQYINNNRSNKVVKRVDAIFKNMATHTRHENDNRKPEEFLDTLKQKLALKVHRLRRYKKAQERKHDNTLFATSEKNFYRNLQTAQTNTNTLTTENNIELPTAEQLETFWSGIWEEQVQHNNNSDWITDEETKWSSLEEMEFVELTESDITCVTARLHNWKSPGIDKIHNFWYKKLESLHKVLAKNLTQIILGKQNIPEFLATGITYMLPKAQYSSQPSQYRPITCLPTIYKILTSAITTKINKHIENHNIIAEEQKGCRRGHMGCKEQLVIDSIIHKHANTKHRNLHCTYIDYKKAFDSIPHSWLIQILQIYKINSKIIDFLQDIMARWRTTLQLNYRNNAITTRQISIKKGIYQGDSLSPLWFCLALNPLSNLLHRSQAGYSIKHTTEETIISHLIYMDDIKLYSKSEKEMKKLIDITTEFSKDINMQFGLDKCKTVHIIRGKIKPGDYPINNTDTITAMEPTDLYKYLGYKQLKGLDHSTIKYTLNSEYKRRVVAVCKTQLSGKHLIKALNTYAIPILTYSFGVVKWSKTDIQQIERTTRTTLTKHNNLHPKSAIERLTIKRQYGGRGLIDVHHLWQKQIAKLRTFFHSKSQTSNIHKAVVMNDISYTPLNLHDQIDIQHTSHEDPHKQKVEDWKKKVLHGRHPHDLEQSHIDTIASNKWLKIGNLFPETEGFIIAIQDQIINTKNYRKFVIKDPTITNDKCRKCHSQPETIQHITGACTTLTQTDYTHRHNQVANVIHQKLALKYKLVQDTNTPYYKYVPQTVLENTTHKLYYDRAILTDRTVHYNRPDITLQDKVNKVTYLIDIAVPNTHNLQKTIGEKISKYVELKEEVSRIWRQEKVYVVPIVVSTTGVIPNHLHHSLKQIDLKDSIYITLQKAAILNTCRIVRKFMQIDENEITPHNINSS

SEQ ID NO: 21430 - protein, 768 aa, Xestia c-nigrum
MEFVEVTESDITHITARLHNWKSPGIDKIHNFWYKKLTALHKSLAKNLTDIVLGKQNIPEFITTGITYMLPKTKYTSEPSQYRPITCLPTIYKILTSAITKKINSHIIHHNIIAEEQKGCRQGHMGCKEQLIIDSTIHKHATSKNRNLHCTYIDYRKAFDSVPHSWLIQILEIYRINPKIIDFMRHVMLQWKTTLQINSSNNNVTTRQISIKKGIYQGDSLSPLWFCLALNPLSHLLQSCGAGYCLKHSTDETTISHLIYMDDIKLYAKSEKDMKKLVDITAEFSKDINMQFGLEKCKTLHIVRGKVRPGDYAMNESDSITALEPTELYKYLGYTQLKGLDHVKIKETLTTEYKKRVNAVCKTQLSGKHLIKALNTFAIPVLTYSFGVIKWTKTDTEQLQRTTRTTLTKHNNLHPKSAIERLTIKREHGGRGLIDIQHLWRKQISRLKSFFHTKSHNSNIHKVIVTNDLNYTPLNLSDQIEAQNTTNEDPQTQKIEDWKRKVLHGRHPHDLEQSHINKLASNKWLKIGNLFPETEGFIIAIQDQIINTKNYRKYIIKDPTVTNDKCRKCHLHPETIQHITGACTTLTQTDYTHRHNQVANVIHQKLAIKHTLIQNTNTPYYNYKPEATLENTTHKLYYDRAILTDRTIHYNRPDLILQDKIKKVTYLIDIAVPNTHNIQKTITEKISKYAELKEEVTRIWRQEKVYIVPIVLSTTGVIPNHLIHSLKLLDLKETLYITLQKAAILNTCRIVRKFMQIEENEIGPYHNT

SEQ ID NO: 21431 - protein, 1165 aa, Emesis diogenia
MSWSKDVNMFIMRTYYYITNLETDMTTYRKQLYESFILQYPEVKVTEQRISDQRRTIIRNKLLTDETLNRLKNEVRIQLENELYNNTYTNINNVPENLPSLSLQTDMLITPNTQLHFQPYTQTLDTSTQTETVILTLENDIETLVVPNSNTNIYERDIVEKFRTALTKYSGMDPASRPKLPKLRYSKHLYQLTNLFNKSILHKFLSEDSQLVDIHTLIYCTAVVVSEELNHKIMGRDITSNSKTKHSDKPPWQIRLEKDIEKLRADCGRLTQYINNNKSNKVVKRVQAIFKSRMTHSRHEENNKKPEEFLDTLKQKLALKVHRLRRYKKALQRKNDNILFSNNEKTFYRNLIKKQKDTSTTQNTEIPTQEELETFWSNIWEERTQHNDKAHWIAEEVKKYDTIKEMEFYEITKTDISKVTTKLHNWKSPGIDKIHNFWYKKLTLLHNSIAKNFTDIIIGKQNIPEFIATGITYMIPKSNYSVQPSQYRPITCLPTIYKIFTSTITNKITTHIEQNNIISEEQKGCRRGHMGCKEQLIIDSTIHKHATMKNRNLHCTYIDYQKAFDSIPHPWLLQILNIYKINPKIIEFLQNIMQHWKTTLKINNHNNTVITRQIFIRRGIYQGDSLSPLWFCLALNPLSNILHSCQAGYCLKHTGKETIISHLIYMDDIKLYSKSEKEMKKLLDKTIEFSRDINMEFGIDKCKTLHVVRGKILPGDYTINDNVIITAMEPTDLYKYLGYKQLKGLDHAKIKQTLTAEYKRRLESICKTQLYGKKLIKAINTYAIPILTYSFGLIKWSKTDIENLERTIRTTLTKHNYLHPKSAIERLTIKRQNGGRGVIDINNLWQKQIYNLKIFFQAKSHSSNLHKAIVNNDYNYTPINLRENQNIQDPINTDQQVEKIEIWKRKILHGRHPHDLDQNHVDTLASNKWLTVGSLFPETEGFLIAIQDQVINTKNYRKHIIKDSLVTNDKCRKCHTQPETIQHITGGCIILTQTDYTHRHNQIVYIIHQKLALKHRLVQNTNTPYYKYKPETVLENSTHKLYYDRAILTDRTIHYNRPDITLKDKTNKITYLIDIAVPNTHNVQKTITEKVSKYTELKDEVTRIWGQQKVYIVPVVISTTGIIPKQLHNSLKLLNLQDNLYISLQKASILNTCRIVRKFMQLEEN

SEQ ID NO: 21432 - protein, 1285 aa, Urbanus proteus
MRRSNRIKNKHSAQSGTVAEISSHPSSPTSSTRSLFPSTNSSPFSFENRSNSVSRSTTVSPMSAEVEQTQHIRPLASDVARGANAFLPASTKAGKQRVRMTWSQDVNMFIMRTYYHITKLETDMTTYRKTLHELFSNQYPDVKVSEQRVSDQRRMIIKNKYLTQETLNKLKEEVSRELREEESINLNSDNTQHLLEPDLNLLESHVQSQNNSSRSHNLSQCYTQTLVPTSHSSTQTEFITLLLENETETIADVAPPNDASFQDMYEKLQTALSKYSGMDPTVRPKLPKIKYTKKLNDLVHLFNQHILHRLISEETQLNDIHTLIYCTAVVIAEELNYKIIHNTTHIKPKEYTKPSWQIRLEKDIENLRVDIGRLTQYINNNRSDRLIKKVQHIFNRLTKHTKHESNNRKPEEFLDTLKQKLALKTHRLKRYKKTQQRKKDNIQFATNEKLFYRNLCKPKIDCTAKETNQTGILSKEVLETYWSNIWEENISHNDKADWITEEQNRWEVIDEMEFQEITEHDITNITGRLHNWKAPGVDKVHNFWFKKLTSLHQSLARALTQIILGKQNIPKFITIGITYMLPKSNNSTQPSQYRPITCLPTIYKILTSAITSKINTHIERHNILAEEQKGCRRGHMGCKEQLVIDSVIHKHATSKHRNLHCTYIDYKKAFDSIPHSWLIKILHIYKISPIIIDFLHNIMSHWKTTLHLNLGNKSITTRQIHIKKGIYQGDSLSPLWFCLSLNPLSNILHNCQTGYRLNNRTEETTISHLIYMDDIKLYAKTHKDMQKLLDKTTQFSNDLNMQFGLDKCKTLHIVKGKIQLGDYRVNDTEVISALEPTDVYKYLGYNQLKGILQTHTKETLTTEFKRRVGAICKSHLSGKHLTKAINTYSIPILTYSFGIIKWTKTDIEHLERTIRTTLTKHNHLHPKSAVERLNIKRQDGGRGIIDINCLWQKQISNLRQFFLLKSNTSNIHSAITHNDQNLTPLNLSDNTDQNIHNNRNSQQQKIEHWKNKVLHGRHPHDLEHAHVDKIASNKWLKVGNLFPETEGFMLAIQDQVINTKNYRKYIIKDPNIKNDKCRRCHTQPETIQHITGACTNLTQTDYTHRHNQVTNIIHQNLALKHNLIQNTNTPYYKYTPQTIIENTSHKIYYDRAVLTDRTIHYNRPDIILQDKLNKITYLIDIAVPNTHNIQKTIVEKINKYVELKEEVTRIWKQNKVYVVPIVLSTTGVIPYHLHQSLKLIGLKHSLYIPLQKAAILNTCRIVRKFMQIDEKEVGPHNITQTIALP

SEQ ID NO: 21433 - protein, 1282 aa, Urbanus velinus
MRRSNRIKNKHSAQSGTVAEITSNLSSSSSSTHSLFQSPNSTPLSFEFQSNPVSRSTTVSPMSVDTEQIQSITLPVSDVARGANAFLPVSTKAGKPRVRMTWNQDVNIFIMRTYYHITKLETDMTTYRKTLHELFSIKYPDIKVTEQRVSDQRRMIIKNRYLSDEIINKLKEDVSRQLQEEQNINEVSNLGTQTNVEALESQTQLESNSYQSHNLSQPHTLTFVPTSHSSTQTEFVTLLLENETETIADVVPSNDVSFQDMYDKLQAAVTQYSGMDPTARPRLPRIKYTKHLTDLVQLFNQHILHRLTSEKMELNDIHTLVYCTALVIAEELNYKITHTITHTKPKDHRKPSWQIRLERDIENLRVDIGRLTQFINNNRSDRLVRKVQEIFNRFSLHTKHESNNRKPEEFLDTLKQKLALKTHRLKRYKKTQQRRKDNIQFATNEKLFYRNICKPRKDFTPTEINQTEIPTKEELENYWSNIWEENITHNDKADWITEEQEKWKIIDEMEFQELTEGDITNTTARLHNWKAPGVDKVHNYWYKKLTILHRPIAKALTEIILGKQNIPNFITIGITYMLPKTNNSTQPSQYRPITCLPTIYKILTSTITSKINKHIEHHNVLAEEQKGCRRGHMGCKEQLVIDSIIHKHATSKHRNLHCTYIDYKKAFDSIPHSWLIKILQIYRINPIIIDFLRNIMSHWKTSLHLNQRNTFITTRQINIRKGIYQGDSLSPLWFCLALNPLSNLLNNCETGYRLNNSLEETTISHLIYMDDIKLYSKTHKDMQKLLDKTSQFSKDINMQFGLDKCKTLHIIKGKIKSGDYNVNDNEVISAMEPTDVYKYLGYYQLKGLLHTHIKQTLTTEFKRRIDIICKTHLTGKHLTKAINTYSIPILTYSFGIVKWTKTDIEQLERVIRTTLTKHNNLHPKSAVERLNIKRQDGGRGVIDINHLWQKQISKLRHFFFIKSTTSNIHSAITHNDENLTPLNLSDRTDQCTLNNSNPQLQKIEHWKTKVLHGRHPHDLEHTHVDKIASNKWLKIGNLFPETEGFMIAIQDQVINTKNYRKHIIKDPNVKNDKCRRCHTQPETIQHITGACTNLTQTDYTHRHNQVTNIIHQNLALKHNLIQNTNTPYYKYTPQTVIENTSHKLYYDRAILTDRTIHYNRPDIILQDKLNKITYLIDIAVPNTHNIQKTIVEKINKYVELKEEVTRIWKQNKVYVVPIVLSTTGVIPHHLHQSIKLIGLKHSIYIPLQKAAILNTCRIVRKFMQIDEKDVGPHNLTQPITSS

SEQ ID NO: 21434 - protein, 1280 aa, Eburuncus unifasciata
MTFCAKIIMIIMIIIIEGDRRGTPGAAAGCSSIWTGSGEELNRRTPTGGIQPEDVTAENPHRPIISRNNSQIEPTSVLDVAREANAFLPASTKAGKPRVRMQWSNDVNLFIMRTYYYITKLETDMTIYRKKLHEQFSLKYPEIKVSEQRVSDQRRTIERNKLLSHEVLNQLKEEARTHLELEDTFGNKMTIDELHQPHRTHPMTANPHTDLYTNSHQIEIPLTLSHLHTHHTQTSHTFAQTEIITQLLEKDYETLVNTQQPKEAQIQKIFDKFRTNLTLYSGMDPTARPKLLKLRYNSKLFQLINVFNQDILKDHVSMDTKLTDLHTLVYCTALTITQELDYKPVQNSRSARKKSENKPAWQHRLEKNIEKLRADIGKLTQYLKNNRTRKIVERVNFLLRTITVHTRHENNNRTPEEVLDTLKQKLALKTHRLKRYKKAQDRKNQNHIFVNNEKLFYRNLFKPNVIQENNIETPTKEDLQQYWSGIWEEQIPHNEKAKWIAEEQQRWSNIANMEFSDVSEHDIQEITARLHNWKSPGIDKIHNFWYKKLTYLHNSLAKNISEIISGQQDIPQFIATGITYMLPKNNYSVQPSQYRPITCLPTIYKIITSIITRKINTHIENNNILAEEQKGCRRGYMGCREQLIIDSTILKHASSKKRNLHCTYIDYKKAFDSIPHSWLLQILKIYKINPTIIHFLKTIMTHWKTTLHLNSPKSNITTGIIAIKKGIYQGDSLSPLWFCLALNPLSHLLRSDRVGYRLKHGNTETIMSHLIYMDDIKLYARNEKEMKTLINTTTEFSKDIHMHFGLDKCRTAHIIKGKIRPGDYVINENETIIAMEPTELYKYLGFQQLKGLNHTSIKQTLTTEYTKRLNAICKTLLSGKYLIKAINTYAIPVLTYSFGVIKWTNTDIEKTERSTRTTLTKYNNLHPKSAIERLTIKRQNGGRGLIDIHHLWKKQIYNLTTFFINKAESSNIHKSIVQNDNRYTPLNLKEQINLENPGNIDPQKKKIGDWIKKVLHGRHPNDLQQSHIDAKASNKWLQAGNLFPETEGFIIAIQDQVINTKNYKKYIIKDPTVTNDKCRRCHTQPETIQHITGACTTLTQTDYTHRHNQLANIIHQKLAYKHKLIQDANTPYYKYLPKTVLENSTYKLYYDRALLTDRTIHYNRPDITLQDKNKKITYLIDIAVPNTHNIQKTIAEKINKYAELKEEIIRIWKQDKVFIVPIVISTTGIVPKTIYQYLKILDLTENTLNTLQKAAILNTCRIVRKFLQLEENGNITHHNL

SEQ ID NO: 21435 - protein, 1314 aa, Noctua pronuba
METRSKRKRIGPLPGGDRRGTPGADAGCLSMRTVGGEELSRRAPTDKNTTAEIIDDGDRLTDRTDTPVEPYSPSTVSYTPSRRSSPSIPSSPSVSSPPIISLNTVTPTPTLNAARGVSTFLPASTKAGKARVRMKWSKEVNLFIMRTYLHITKLETDMTTYRQQLHALFTRQYPEITVSEQRVSDQRRIIVRNKLLSQEVIDQLKEEVRSQLLQEETVNHIDANNITQTLSEISHQEQPQSLSQSQIIYTQSQPYNQSRAYTQISHTSTQTESITLTLENDIETIVVLDQHLTTDTYIQEINDKFRTTITQYSGMDPAARPRLPKLKYTPNLFRLVNLFNESILTHFISDDTQLIDIHLLIYCTAVVISEELKFKITDHTRTRQNVAPAWQQRLENDIEKLRADIGRLTQYINGCRSNKLVKRVEVIFRNNATHTRHEQNNRKPEEFLDTLKQKLALKVHRLKRYKKAQQRKNDNAIFTTNEKIFYRNLHIPKNDRNSGNNTNTPNLPSKEQLETYWASIWEEQKQHNDKASWIADEEAKWRDIDGMEFVEVTESDIIHITTRLHNWKAPGIDKIHNFWYKKLTTLHKSLAKNLTDIVLGQQNIPEFITTGITYMLPKTKYTSEPSQYRPITCLPTIYKILTSAVTKKINSHIVHHNIIAEEQKGCRQGHMGCKEQLIIDSTIHKHATSKNRNLHCTYIDYKKAFDSVPHSWLIQILEIYRINPKIIHFLRHVMLQWKTTLQINSNNNNVTTRQISIKKGIYQGDSLSPLWFCLALNPLSHLLQSCGAGYCLKHSTDETTISHLIYMDDIKLYAKSEKEMKKLVDITAEFSQDINMQFGLEKCKTLHIVRGKVRPGDYELNESDTIAALEPTDLYKYLGYTQLKGLDHVKIKDTLTTEYKKRVNAVCKTQLSGKHLIKALNTFAIPVLTYSFGVIKWTKTDTEQLQRTTRTTLTKHNNLHPKSAIERLTIKREHGGRGLIDIQHLWRKQVSRLKLFFHTKSRTSNIHKAIVTNDLNYTPLNLSDQIETQNTTNDDPQTQKIEDWKKKVLHGRHPHDLEQSHINKLASNKWLKIGNLFPETEGFIIAIQDQIINTKNYRKYIIKDPTVTNDKCRKCHVHPETIQHITGACTTLTQTDYTHRHNQVANVIHQKLALKHTLTQNSNTPYYNYKPETTLENTTHKLYYDRAILTDRTIHYNRPDIILQDKINKVTYLIDIAVPNTHNIQKTITEKISKYAELKEEVTRIWRQEKVYVVPIVLSTTGVIPNHLIHSLKLLDLKETLYITLQKAAILNTCRIVRKFMQIEENEIGPHHNT

SEQ ID NO: 21436 - protein, 1334 aa, Ochropleura plecta
METRSKNKRIGPLPGGDRRGAPGADAGCHSMRTVSGEELNRRAPTDKDTTAEIIDDGDRLTDRTDTPVEPYSPSTVSYTPSRPSSPSISSSPTLSTHPIITLNTVSPTPTLNAARGVSTFLPASTKAGKARVRMRWSKEVNLFIMRTYFYITKLETDMTTYRKQLHELFTQQYPDITVSEQRISDQRRAIVRNKLLSQAIIDQLKEDIRVQLQADDNTTPLLENLTDIAQQPQTQLNTQSQPNIQSQLYNQSQANTQTSHTSTQTEYITFTLENDIETLVVENHNPTTDTYIQEIHDKFRTTLSQYSGIDPAIRPKLPKLRYSPNLFRLVNLFNENILNQFISDETQLIDIHTLIYCTAVVISEELNFKITQNTGNLRPKQNIKPAWQQRLEKDIEQLRADIGRLTQYINNNRSSKVVRRVEAILRTHLVHTRHENNNRKPEEFLDTIKQKLALKVHRLRRYKKAQQRKNDNAIFATNEKIFYRNLNKPNTDTHYDTNTDTPTQPTKEQLETYWASIWEQQARHNDEAAWITEEETKWKAIDEMEFVEVTEADITHITGRLHNWKSPGIDKVHNFWFKKLTSLYKPIARNLTQIILGQQNAPEFIATGITYMLPKTKNSPQPSQYRPITCLPTIYKILTSAISTKINRHIEQHNIMAEEQKGCRRGHMGCKEQLIIDSTIHKHATTKNRNLHCTYIDYKKAFDSVPHSWLIQILKIYRVNSKIIDFLSNIMSQWKTTLQINCNQNSITTRQILIKNGIYQGDSLSPLWFCLALNPLSHLLQRCQAGYRLKHTTEQTTILHLIYMDDIKLYAQTEKDMKKLVEVTADFSQDINMQFGLDKCKTLHIIRGKIRPGNYVVNNTDTITAMEPSDLYKYLGYTQLKGLDHVRIKETLTAEYKRRLNVVCKTQLSGKNLIKALNTFAIPILTYSFGVIKWTKTDTEQLERTTRTTLTKHNNLHPKSAIERLTIKRQNGGRGLIDIQHLWRKQVCRLKTFFHTKSLTSNIHKAIVQNDHNYTPLNLNEQLDTSHNSNEDPQTQKIDDWKKKVLHGRHPYDLEQTHVNKDASNKWLKIGNLFPETEGFIIAIQDQIINTKNYRKFIIKDPSVTNDKCRKCHTQPETIQHITGACTTLTQTDYTHRHNQVANVIHQRLAVQYTLIQDTNTPYYNYTPQATLENDTHKLYYDRAILTDRTIHYNRPDIILQDKINKITYLIDIAVPNTHNIQKTITEKISKYAELKEEVTRIWRQEKVYVVPIVLSTTGVIPNHLLHSLKLLSLKETLYITLQKAAILNTCRIVRKFMQIEENEIGPHHNTPVMCDQHNTPHAAFTLVSTRKCS

SEQ ID NO: 21437 - protein, 1301 aa, Pararge aegeria
METRSKRKRIGPLPGGNRRGAPGADAGCLSMRTVSGEELNRRAPTDKNTTAEVIDDDDRLTDRTSTPIEPYIPSTISYTPSSRTSSPSLPSSPPIAILNANPSIQTLNVAREASTFLPASTKAGKARVRMKWSREVNIFIMRNYLYITKLETDLTTYRQRLHELFKEQYPSIIVSEQRISDQRRAIVRNKLLPQDIIDQLKIEIRRQLEEESKSNTDTNTAALTQTRSQNIQQIQPLQPNTQQQTYNQLQPYSQTSHTATQTETIFLTIENDVEHLDNTDRNTISEKYVQEILNKFKTAITQYSGMDPAARPKLPKLKHSPNLFRLVNIFNESILYQFMSIDTQLIDIHTVIYCTALVISEELNFKITEYTENSRSRHNNKPPWQQRLEKDIEKLRADCGRLTQYINNNRSNKVVKRVEAIFKSNFIHTRHENSNTKPEEFLDTFKQKLALKVHRLRRYKKAQQRKKDNAIFATNEKMFYRNLNKPHTDRISDEKIETPTIEHLENFWSGIWEQQVEHNNEAAWITEEDFKWRGIDEMEFKEFTESDITIITARLHNWKSPGIDKIHNFWYKKLTSLHKIIAKVFTDIVLGRQNIPEFIATGITYMLPKTKYTTQPSQYRPITCLPTIYKILTSAITTKINLHVKRHNIIAEEQKGCRRGHMGCKEQLVIDSTIHKHATAKNRNLHCTYIDYQKAFDSIPHSWLIKLLEIYKVNPKIIIFLRSIMSHWKTTLQLSNRLNTLVSRQIYIRKGIYQGDSLSPLWFCLALNPLSDLLHKCRAGYSFKHNSKETIISHLIYMDDIKLYAKSENEMKNLINITTEFSQDINMQFGIDKCKAVHIIKGKIKSGDYIINENDTISSMETTDLYKYLGYKQLKGIDYTAVKQTLNTEYRRRINAICKTQLSGKHLIKALNTFAIPILTYSFGVIKWSKTDIEQIERITRTTLTKHNNHHPKSAVERLTIKRQNGGRGLIDIYHLWQKQISRLRTFFHSKSLTSDIHKAITIMDLNYTPLNLNEKIDTQNTSITDPQKQKLENWKKKVVHGRHRHDLEQPHINTVASNKWLKIGNLFPETEGFIIAIQDQIINTKNYRKYIIKDSNITSDKCRRCHIQSETIQHITGACTTLTQTDYTHRHNQVANIIHQKLAFKHMLTQNTNTPYYKYTPQTILENTTYKLYYDRAILTDKTIHYNRPDIILQDKLRKTTYLIDIAVPNTHNIQKTVSEKICKYTELKEEITRIWKQAKVYVVPIVISTTGVIPNSLLHSLKIIGLEESLYIGLQKAAILNTCRIVRKFLQVDESIGLT

SEQ ID NO: 21438 - protein, 1291 aa, Noctua fimbriata
METRSKKKRIGPLPGGDRRGAPGADAGCLSMRTVSGEELNRRAPTDKDTTAEIIDDGDRLTDRTDTPVEPYSPSTVSYTPSRRSSPSIPSSPTPLSPPIITLNTISPTPTLNAARGVSTFLPASTKAGKARVRMKWSKEVNLFIMRTYLHITKLETDMTTYRQQLHALFTRQYPDITVSEQRISDQRRTIVRNKLLSQEVIDQLKEEVRTQLLHEETVNYTDTNNITQNLSEISHQEQPQSLSQSQIIYTQSQPYNQSQAYTQISHTSTQTESITLTLENDIETIVVPDQHLTTDIYIQEINDKFRTTITQYSGMDPAARPRLPKLKYTPNLFRLVNLFNESILTHFISDDTQLIDIHLLIYCTAVVISEELNFKITDHTRATRTRQNVAPAWQQRLEKGIEKLRADIGRLTQYINGCRSNKLVKRVEVIFRNNATHTRHEQNNRKPEEFLDTLKQKLALKVHRLKRYKKAQQRKNDNAIFTTNEKIFYRNLHNPKNDRNYENNTNTPNLPSKEQLETYWASIWEEQKQHNDKASWIVDEEEKWRDIDVMEFVEVTESDIIHITTRLHNWKAPGIDKIHNFWYKKLTTLHKSIAKNLTDIILGQQNIPEFITTGITYMLPKTKYTSEPSQYRPITCLPTIYKILTSAVTKKINSHIIHHNIIAEEQKGCRQGHMGCKEQLIIDSTIHKHATSKNRNLHCTYIDYKKAFDSVPHSWLIQILEIYRVNPKIIDFMRYVMLQWKTTLQINSNNNNVTTRQISIKKGIYQGDSLSPLWFCLALNPLSHLLQRCGAGYCLKHSTDETTISHLIYMDDIKLYAKSEKDMKKLVDITAEFSKDINMQFGLEKCKTLHIVRGKVRPGDYAVNESNSITALEPTDLYKYLGYTQLKGLDHVKIKNTLTAEYKKRVNAVCKTQLSGKHLIKALNTFAIPVLTYSFGVIKWTKIDTEQLQRTTRTTLTKHNNLHPKSAIERLTIKREHGGRGLIDIQHLWRKQVSRLKLFFHTKSRTSNIHKAIVTNDLNYTPLNLSDQIEIQNTTNDDQQIQKIEDWKRKVLHGRHPHDLEQSHINKLASNKWLKIGNLFPETEGFIIAIQDQIINTKNYRKYIIKDPTLTNDKCRKCHVHPETIQHITGACTTLTQTDYTHRHNQVANVIHQKLALKHTLIQNTNTPYYNYKPETTLENTTHKLYYDRAILTDRTIHYNRPDIILQDKLNKITYLIDIAVPNTHNIQKTITEKISKYAELKEEVTRIWRQEKVYVVPIVLSTTGVIPNHLIHSLKLLDLKETLYCKKLLF

SEQ ID NO: 21439 - protein, 1317 aa, Noctua fimbriata
METRSKKKRIGPLPGGDRRGAPGADAGCLSMRTVSGEELNRRAPTDKDTTAEIIDDGDRLTDRTDTPVEPYSPSTVSYTPSRRSSPSIPSSPTPLSPPIITLNTISSTPTLNAARGVSTFLPASTKAGKARVRKKWSKEVNLFIMRTYLHITKLETDMTTYRQQLHALFTREYPDITVSEQRISDQRRTIVRNKLLSQEVIDQLKEEVRTQLLHEETVNYTDTNNITQNLSEISHQEQPQSLSQSQIIYTQSQPYNQSQAYTQILHTSTQTESITLTLENDIETIVVPDQHLTTDIYIQEINDKFKTTITQYSGMDPAARPRLPKLKYTPNLFRLVNLFNESILTHFISDDTQLIDIHLLIYCTAVVISEELNFKITDHTRATRTRQNVAPAWQQRLEKGIEKLRADIGRLTQYINGCRSNKLAKRVEVIFRNNGTHTRHELNNRKPEEFLDTLKQKLALKVHRLKRYKKAQQRKNDNAIFTTNEKIFYRNLHNPKNDRNYENNTNTPNLPSKEQLETYWASIWEEQKQHNDKASWIVDEEEKWRDINVMEFVEVTESDIIHITTRLHNWKAPGIDKIHNFWYKKLTTLHKSIAKNLTDIILGQQNIPEFITTGITYMLPKTKHTSEPSQYRPITCLPTIYKILTSAVTKKINSHIIHHNIIAEEQKGCRQGHMGCKEQLIIDSTIHKHATSKNRNLHCTYIDYKKAFDSVPHSWLIQILEIYRVNPKIIDFMRHVMLQWKTTLQINSNNNNVTTRQISIKKGIYQGDSLSPLWFCLALNPLSHLLQRCGAGYCLKHSTDETTISHLIYMDDIKLYAKSEKDMKKLVDITAEFSKDINMQFGLEKCKTLHIVRGKVRPGDYAVNESDSITALEPTDLYKYLGYTQLKGLDHVKIKNTLTAEYKKRVNAVCKTQLSGKHLIKALNTFAIPVLTYSFGVIKWTKTDTEQLQRTTRTTLTKHNNLHPKSAIERLTIKREHGGRGLIDIQQLWRKQVSRLKLFFHTKSRTSNIHKAIVTNDLNYTPLNLSDQIETQNTTNDDQQIQKIEDWKRKVLHGRHPHDLEQSHINKLASNKWLKIGNLFPETEGFIITIQDQIINTKNYRKYIIKDPTLTNDKCRKCHVHPETIQHITGACTTLTQTDYTHRHNQVANVIHQKLALKHTLIQNTNTPYYNYKPETTLENTTHKLYYDRAILTDRTIHYNRPDIILQDKLNKITYLIDIAVPNTHNIQKTITEKISKYAELKEEVTRIWRQEKVYVVPIVLSTTGVIPNHLIHSLKLLDLKETLYITLQKAAILNTCRIVRKFMQIEENEIGPHHNT

SEQ ID NO: 21440 - protein, 1306 aa, Omphaloscelis lunosa
METRSKRKRIGPLPGGDRRGTPGADAGCLSMRTVSGEELNRRAPTDKDATAEAIDDGDRLTNRTDTPVEPYSPSTVSYVPSKTPSPSISSSSIPSSPPIPSFNTVSPSPVLNVAREVSTFLPASTKAGKARVRMRWSKEVNLFIMRTYLYITKLETDMTTYRQQLHERFSRQYPEISVSEQRISDQRRTIVRNKLLSQGELDQLKEEVHTQLQQDTNTIILTQNTNENSIQDQPQSLTQSQPNFESQPYNQSQTSHISTQTESITLTLENDIETVAAVNQNPITDMYIQEIHDKFRTTLTQYSGMDPAARPKLPKLKYSPNLFRLVNLFNEDILKQFLSDDTQLIDINTLVYCTAVVISEELNFKITEHARNTIQRDTVKPPWQLRLEKDIKKLRADCGRLTHYINGSRSHKVVKRVEAIFKNNFTHTRHEINNRKPEQFLDTLKQKLALKVHRLRRYLKAQQRKKDNAIFATNEKLFYRNIQKPHTDSTTENDTDIPSKENLETYWSNIWEEQVHHNDKATWITEEATKWTAIDEMEFKEITESEITYLTARLHNWKSPGIDKIQNFWYKKLTILHKSIAKNLTDIVLGEQNIPEFIATGITYMLPKTKNTSEPSQYRPITCLPTIYKILTSAITNKINSHIEHHNIIAEEQKGCRRGHMGCKEQLVIDSTIHKHATTKNRNLHCTYIDYQKAFDSIPHSWLIQILEIYKINPKIIEFLRIVMTRWKTTLQINNRLGTLLTRQIHIKKGIYQGDSLSPLWFCLALNPLSHLLNRCRAGYNFKNNTGETIISHLIYMDDIKLYAKTVKEMKTLIEVTTTFSQDINMQFGLDKCRTLHIIIGKVKPGNYAVNDTDTIAAMEPTDLYKYLGYKQLKGLDHTTIKQTLNTEYRRRINAICKTQLSGKHLIKALNTFAIPILTYSFGVIKWSKTDIEHLERITRTTLTKHNNLHPKSAIERLTIKRQNGGRGLIDIHHLWQKQITSLKTFFYTKSRTSNIHKAIAQNDFNYTPLNLNEHRDTTQITSDDPHEQKIENWKKKVLHGRHPHDLEQSHVNKLASNKFLKIGNLFPETEGFIIAIQDQIINTKNYRKFIIKDPSVTNDKCRKCHIQPETIQHITGACTTLTQTDYTHRHNQVANVIHQKLAVKYTLIQDTNTPYYNYIPQTILENDTHKLYFDRAILTDKTIHYNRPDITLQDKINKVTYLIDIAVPNTHNIQKTISEKISKYAELKDEVTRIWRQQKVYVVPIVLSTTGVIPNHLLHSLKLLNLKETLYITLQKAAILNTCRIVRKFMQIDEYEIGPHNTSST

SEQ ID NO: 21441 - protein, 1242 aa, Bombyx mori
MELRSKRKRMGPLPGGDRRGTPGADAGCLSMRIVSGEELNRRAPTDKDATAETRDDGDSLTVRTNTPIESYSPSTVSYTPSRSPSPSVPSSPQPLSFNPDPPIPVLNVAREASSFLPVSTKAGKSRVRMKWSKDVNTFIMRTYFHITKLETDMTTYRQQLHQLFSQQYPEVTVSEQRISDQRRVIVRNKLLSQEILDQLREEVRLQLQEADVGSNTMTLLQDADENIIPEQPQRHFQSQPILQSHPFHQSQAYTQTSNTSSQTENLTFVLENDIETLVIADQNLTTSTYTQEIHDKFIRTLTQYSGMDPAARPKLPKLRYSSNLFRLVNLFNEHILPQFLTKDAKLIDIHTLIYCTAVVVSEDLNYKITEYTGNRRQRNNTKPPWQQRLEKLRADCGRLTQYINNNRSNKVVRRVEAIFKSNITHTRHENTNQKPEEFLDTLKQKLALKVHRLKRYTKAQQRRNDNTIFATNEKIFYRNLNKPIHNTIDENNTVTPTKENLETYWSSIWEEQVEHNDKATWVTEEKIKWEGIDEMEFTEITELDITHITNKLHNWKSPGIDKIHNFWYKKLTSLHKSIAKNFTNIILGEQNIPDFIATGITYMLPKIQNSPEPSQYRPITCLPTIYKLLTSAITTKINTHVEHHNIIAEEQKGCRRGHMGCKEQLIIDSTIHKHATTKNRNLHCTYIDYKKAFDSVPHSWLIKILEIYRINPKIIDFLRNIMPQWQTTLQINCNSNPIVTRQISIKKGIYQGDSLSPLWFCLALNPLSHLLQRCRAGYCLKNTTENTSISHLIYMDDIKLYAQSEKEMKKLVEATAEFSKDINMQFSLDKCKTLHIIRGKIQPGDYVINDTDTITAMEATDLYKYLGYTQLKGLDHVRIKNTLTAEYKKRLNAICKSQLSSKHLVKALNTYAIPILTYSFGIIKWTKTDTEQLERTTRTTLTKHNKLHPKSAIERLTIKRQNGGRGLVDIQHLWQKQIIKLKSFFHTKSQSSKIHNAIVLNDNNYTPLNLNDQTDTLNTNSNNPQEQKIKEWKKKVLHGRHPHDLEQSHINTLASNKWLKVGSLFPETEGFMIAIQDQIINTKNYRKYIMKDPTITNDRCRKCHTQSETIQHITGACTTLTQTDYTHRHNQVANIIHQKLALKYALIQDTNTPYYKYNPQTILENTTHKLYYDRAILTDKTIHYNRPDITVQDKVNKITYLIDIAVPNTHNIQKTITEKISKYAELKDEVSRIWRQEKVYIV

SEQ ID NO: 21442 - protein, 1003 aa, Parnassius apollo
MDPAARPRLPKLKYTPNLFRLVNLFNETILTQYISDDTQLIDIHLLIYCTAIVISEELNFKITDNARTTRTRQNTEPAWQQRLEKDIEKLRANIGRLTQYINGCRSNKLVKKVEVIFRNNATHTRHEKSNTRPEEFLDTLKQKLALKVHRLKRYKKAQQRKKDNVRFATNEKLFYRNLHKPQRDIIDERNTHTPNLPTKEQLEAYWASIWEEQKQHNDKASWIIEEEAKWRDIDEMEFEEVTELDITLITARLHNWKSPGIDKIHNFWYKKLTSLHKPLARNLTDIITGQHNTPEFIATGITYMLPKTKNSPQPSQYRPITSLPTIYKILPSAITKKIQSHIEHHNIIAEEQKGCRQGHMGCKEQLIIDSTIHKHATSKNRYLHCTYIDYKKAFDSVPHSWLLKILAIYRINPKIIDFLRRIMLQWKTTLQINCNQNTVTTRQISITKGIYQGDSLSPLWFCLALNPLSHLLQSCGAGYCLKLNTDETTISHLIYMDDIKLYAKTDKDMKKLIDITTEFSSDINMHFGLDKCKTLHIVRGKVRPGDYVVNETEAITAMESTDLYKYLGYVQLKSLDHVRIKNSLTTEYKRRLNAVCKTQLSSKHLIKAINTYAIAILTYSFGVIKWSKTDAEQLERTTRTTLTKHNNLHPKSAIERLTIKREHGGRGLMDIQHLWRKQVSRLKSFFNTKSHTSNIHKAIVTNDINYTPLNLSNQIESQNTTSDNPQTHKIDEWKKKVLHGRHPHDLEQSHINKLVSNKWLKIGNLFPEIEGFIIAIQDQIINTKNDRKYIIKDPTVNNDKCRKCHTHPETIQHITGACTTLTQTDYTHRHNQVANVIHQKLALKHALIPDANTPYYNYTPKHTLENTTHKLFYDRGILTDRTIHYNRPDIILQDTINNITYLIDIAVPNTHNLQKTITEKICKYAELKDEVTRIWQQEKVYVVPIVLSTTGVIPNHLLRSLKLLQLKETLYITLQKAAILNTCRIVRKFMQIEENEIGPHQIT

SEQ ID NO: 21443 - protein, 1301 aa, Spodoptera frugiperda
METRSKRKRIGPLPGGDRRGTPGADAGCFSMRSVSGVELSRRAPTNKDTTADISDDGDTQSNRSNTPLEPYSPSTISYTPSRSSSPSIPSSPVSHTVSLTPALDVARGANAFLPASTKAGKPRVRMKWSKEVNIFIMRTYFYITKLETDMTIYRKVLHELFCRQYPDVNVSEQRISDQRRTIVRNNLLSPQIIDQIKEEIRQQLEAESENSQVTTSSPQNIQTNDQQTHPFTQTQPLNTQSQPYNYTQTTHSSTQTDSITLTLENDIDTLTPVEQATVTEEYTQQIYDKFKTTLTQYSGMDPTSRPRLPKLPYNRNLFRLVNLFNESIIARFISEEAQLTDLHTIIYCTALVISEELNFKITGETGNRKPRTSIKPPWQQRLEKGIEKLRADCGRLTQYINNNRSHKVVRKVEAIFKNTRIHTRHENDNHTPEEFLDTLKQKLALKVHRLRRYKKAQQRRNDNTIFTTNEKIFYRKLNTSHTNITDDQNTTPSKEQLEAFWAGIWEESVNHNDRAAWVTEEETKWIGIDEMEFIEITESDIANVTARLHNWKSPGIDKVHNFWYKKLTILHKHIAKNLTEIVLGKQRIPEFIATGITYMLPKAKHSPQPSQYRPITCLPTIYKILTSAITIKINSHIERHKIMAEEQKGCRRGHMGCKEQLIIDSTIHKHATSKNRNLHCTYIDYKKAFDSVPHSWLIQILEIYKINNKIIDFLRNIMPHWKTTLLINTTNNNIITRQINIKKGIYQGDSLSPLWFCLALNPLSHLLQRCHAGYCLKHNSEETIVSHLVYMDDIKLYAKSEKEMKNLIDITATFSKDINMEFGLDKCKTLHIIRGKIRPGDYVVNDRDTITAMEQTDLYKYLGYTQLKGLDHVKIKNTLTAEYRRRLNAICKTQLSGKHLIKAINTFAVPVLTYSFGVIKWTKTDAEQLERTTRTILTKHNNLHPKSAIERLTIKRQNGGRGLIDIYQLWQKQIRKLKSFFHLKSQTSDIHKAVVNNDFNYTPLNLNEPIDVENSNEIDPQKEKIEAWKRKVLHGRHPHDLEQAHVNTIASNKWLKIGNLFPETEGFIIAIQDQIINTKNYRKFIIKDPTVTNDKCRKCHLQPETIQHITGACTTLTQTDYTHRHNQIVNVIHQKLALKYTLIQNTNTPYYKYTPETVLENSTHKLYYDRAILTDRTIHYNRPDITLQDKINKITYLIDIAVPNTHNIQKTITEKITKYAELKDEVTRIWKQNKVYVVPIVLSTTGVIPNHLLHSLKLLDLKETLYITLQKAAILNTCRIVRKFMQIEENEINNQTTPTNT

SEQ ID NO: 21444 - protein, 1286 aa, Curetis bulis
METRLKRKLRGPLPGGDRRGTPGADAGCLSIRSVSGEELNRRAPTGDSQPENVTAATDTLDRQTDSRINSPCEPYSPSTASYNPSVNSSPSSSGYRDSPTPALDVAQEANAFLPASTKAGKTRVRMKWSHEVNLFIMRTYYYITKLETDFTIYRKKLHELFSLKYPNISVSQQRISDQKRAIERNKLLSQDTLDKLKYEIKKQLEAEELNDIDERQNTQEPHYSDTHSQDSQLITPDVTIVRSIPNTQTSNTSTQTEIITVLLENDVEILQVNPKITETDIQNIKDKFQATITLYSGMDPKARPTLPKLRYSPKLNEMIQIFNNEVLINYISPDTQLHDVHTLTYCTAVVISEELGYKIMENRRITRSTEKFKPPWQKRLEKDIAKLRSDIGRLTQYINNNRSKKVVNRIEKIFRNLATHTRHENNNRKPEEFLDTLKQKLALKSHRLRRYNKAEKRRNENNTFATNEKLFYRNLTKPQINDENVDLPTEEQLEAYWSGIWEEQLQHNDRADWIIEEENYWNNIEQMEYNGITEDEITNTTAKLHNWKSPGIDKVHNFWYKKLTCLHKILASNFSTIISGTQRLPEFIATGITYMLPKNNNSSEPSQYRPITCLPTIYKILTSVITRKITSHIEHHSIIAEEQKGCRRGHLGCKEQLIIDSTIMKHATQKNRNLHCTYIDYKKAFDSIPHSWLIQVLGIYKIDPQIINCLRNIMSHWKTTLQLHSQQTSITTREIAIRKGIYQGDSLSPLWFCLALNPLSRQLHKCRAGYRFKNNNNETIISHLIYMDDIKLYARNEKEMKTLIDTTAKFSKDINMVFGLDKCRTAHIIKGKIQPGDYALDNTDTIKAMEPTDLYKYLGFQQLKGLDHTAIKQLLTKEYKRRTNAICNSQLSAKHLIKAINTYAIPILTYSFGIIKWSKTDIDQLERMTRTTLTKHNDLHPKSAIERLTIKRQDGGRGLIDIHHLWQKQIYSIKTFFQTKAQTSKIHKAITLNDKNCTPLNLKELTNINDPRSRDPQKQKIEDWKKKTMHGRHPHDIHQSHVDTKASNMWLKIGNLFPETEGFLLAIQDQVINTKNYRKHIIKDPTAIDDKCRKCHTQSETIQHITGACPNLTQTDYTHRHNQLAKIIHQKLAFKNNLLQNTNTPYYKYSPQTVLENASYKLYYDRAILTDRTIHYNRPDITLQDKANKTTYLIDIAVPNTHNLQKTFTEKMTKYLELKEEIVRIWKQEKVYIVPIIVSTTGVIPNHIHNSLKLINLNKNIYITLQKAAILNTCRIVRKFLQLEEE

SEQ ID NO: 21445 - protein, 1293 aa, Racta chiria
METRSRSKRLWPLPGGDRQGTPGADAGCFSMQTVSGELLSGRALSGYPENATAYQTENNSNINSPITIDEPYSPSTASYIPSPVPSTDENTCGAPTPTLSVAQEVNAFLPASTKAGKPRVRMSWSKEVNIFIMRTYYYITKLETDMTMYRQQLFEIFSQHFPEIKVTEQRISDQRRTIIRNKLLHINVLNQIKEEVRIKLQENTDVMEDVPTIRLGNDVENASQLRVNFNLQSTQPHNTDINSSHQKTHRAVQTENETVIVENDIQMFVERIPPTETQIQEINDRLKTILIQYSGMDPTVRPKLPKLKFSYKLSKLTHLFNNNILPQYISDDTKLTDIHTLIYCTAVAIAEDLNYKISEYTNNIGTKKMYKPPWQQRLERDIEKLRADCGRLTQYINNNRSKKVVKKVEEIFKRKITHSKHEKNNSKPEEFLDTLKQKLALKVNRLKRYKKAQQRKDDNVLFNNNEKLFYRNLVKQTNRPITETLETPNATQLEDFWAKIWEEKVQHNVKADWITEEESRWNTIQEMDFLEFNETDIRNVTSRLHNWKAPGIDKIHNYWFKKLTSLHKCIAKNFTDIILGKQNIPEFIATGITYMLPKTTHSLDPSHYRPITCLPTIYKILTSVIARKINTHIEHNHIMAEEQKGCRRGHMGCKEQLVIDSTIHKHATTKNRNLHCTYIDYKKAFDSVPHSWLIHVLHIYKINTKIINFLNNIMTYWKTYLQIHSRNNTITTRQIIIRKGIFQGDSFSPLWFCLALNPLSDLLHGCHAGYSLNSTSEKTTISHLIYMDDIKLYSQTQKQMEKLINKTSEFSKDINMEFGLDKCKTLHIIRGKIRPGDHEIEDNCTIRAMEPTDLYKYLGYNQLKGLNHTQIKQTLTTEYKKRINTICNTQLSGKNVIKALNTYAIPILTYSFGVIKWSNTDIEYVERTTRTTLTKHNYLHPKSAVERLTIKRHNGGRGLIDIHHLWKKQIDNLKTFFHTKSLTSNIHKAISENDHNCTPLNLSENLLMQRIDNRDPQSYKIDNWKKKTLHGRHPYDLEQAHIDPIASNKWLMGGSLFPETEGFMIAIQDQVINTKNYRKFIIKDPSITNDKCRKCHTQPETIQHITGACTTLTQTDYTYRHNQVVNIIHQKLSLKHNLIQNTDTPYYKYTPSSVLENSTHKLYYDRAILTDKTIHYNRPDITLQDKTNKITYLIDIAVPNTHNLQKTISEKINKYIELKEEIARIWKQHKVYVVPIVLSSTGVVPKHLHHSLKLIDLKETVYTILQKAVILNTCRIVRKFLQIDIDHTHINTL

SEQ ID NO: 21446 - protein, 1306 aa, Luehdorfia japonica
METRSKRKRIGPLPGGDRRGTPGADAGCLSMRTVSGEELNRRAPTDKDVTAEIIDDGDRLIDRINTPVETYSPSTVSYTPSRPSSPSLPSSPPNTSLNTVPPTPTLNVAREVSTFLPTSTKAGKARVRMRWSKDVNLFIMRTYLYITKLETDMTTYRQHLHAHFTRKYPEINVTEQRISDQRRTIVRNKLLSKEDIDQLKEEVRTQLLQEDSENDVEMNIITLTQNTNEHFPQEQPQSHTQLQPNTQSQTFNQTQAYSQTSHSSTQTESITLTLQNDIEALVVVDQNPISDIYLQEIQDKFRATLIQYSGMDPAARPKLPKLKYSPNLFRLVNLFNENILKQFLCDDTQLIDIHTLIYCTAVVISEELNFKITEHARYTRPRDNAKPPWQQRLEKDIEKLRADCGRLTQYINNNRSHKVVTRVEAIFKNIITHTSHESNNRKPEDFLDTLKQKLALKAGRLKRYMKAQQRKNDNSIFATNEKIFYRNIQKPHIDSTENDTNTPTKENLETFWSSIWEEQVLHNDKATWITEEETKWRAIDEMEFIEIIESDITNITARLHNWKSPGIDKIQNFWYKKLTTLHKSIAKNLTDIVLGKQNIPEFFSTGITYMLPKNKYTSQPSQYRPITCLPTIYKILTSVITTKINLHIEHHNIIAEEQKGCRRGHMGCKEQLIIDSTIHKHATTKNRNLHCTYIDYKKAFDSIPHSWLIQILEIYKINPKIIDFLRIIMTRWKTTLQLNNRLSTVITRQIHIKKGIYQGDSLSPLWFCLALNPLSHLLHRCRAGYNLKHNTEETIISHLIYMDDIKLYAKTEKQMKTLIETTTKFSQDINMQFGLDKCKTLHIIKGKIKPGNYTIKDTDTIAAMELTDLYKYLGYKQLKGLDHTTIKQTLNTEYRRRINVVCKTQLSGKHLIKALNTFAIPILTYSFGVIKWSKTDIEQLERTTRTILTKHNNLHPKSAIERLTIKRQNGGRGLIDIHNLWQKQITRLKTFFHTKSCTSEIHKAITLNDLNYTPLNLSEQLNTQDTNNTDPQKQKLENWKKKVLHGRHPHDLEQSHISAEASNKWLKIGNLFPETEGFIIAIQDQIINTKNYRKYIIKDPTITNDKCRRCHIQSETIQHITGACSTLTQTDYTHRHNQVANIIHQKLALKHNLIPNTNTPYYNYSPQTILENDTHKLYYDRAILTDRTIHYNRPDITLQDKRNKITYLIDIAVPNTHNLQKTISEKISKYTELKEEVKRIWKQEKVYVIPIVLSTTGVIPNHLLRSLKLIDLEESLYVNLQKAAILNTCRIVRKFMQVEEENTLSS

SEQ ID NO: 21447 - protein, 1309 aa, Apodemia zela
METRSKYRKRIGPLPGGDRRGTPGADAGCHSMRTVSGVELSRRAPTGSSELVTADPNDNNDRLTDSDNISINSISTIVEPYSPSTNSYIPTPVSSVEENSREVPTPTLTVAQEVNTFLPASTKAGKPRVRMSWNKDVNIFIMRTYYYITKLETDMTTYRKQLHESFTLQYPEVKVTEQRISDQRRAIIRNKLLTNEVLNRLKDEVRIQLENESHNNTHTNITADTNNIPENFRSLPSPTDTQLTPHVLSQSQIYTQTLDTSTQTETVTLTVENDIEMLVDRTFVTNIHEQEITDKFRSALTKYSGMDPASRPKLPKLKYSKKLFQLTNFFNQNILNQFLNDDTQLVDIHTLIFCTAVVISEELNYKIMESDKSNPKPKYSDKPPWQVRLEKDIEKLRADCGRLTQYINNNRSNKVVKRVEAIFKSRMIHTRHEDNNRKPEEFLDTLKQNLALKVHRLRRYKKAQQRKNDNILFTNNEKLFYRNLAKAHNNTSTTHSTQIPSQAQLETFWSGIWEERIQHNDKAQWIAEEENRWNAIEEMEFHKITLTDITKVTAKLHNWKSPGIDKIHNFWYKKLTSLHNHIAKNLTDIIVGKQNIPEFIATGITYMIPKSNYSAQPSQYRPITCLPTIYKILTSAITSKITTHIEQNHIISEEQKGCRRGHMGCKEQLIIDSTIHKHATTKNRNLHCTYVDYKKAFDSIPHSWLLKILKIYKINSKIIEFIQNIMQHWKTTLQINSHNNTVTTRQIFIRKGIYQGDSLSPLWFCLALNPLSNMLHGCRAGYCLKHTGQETIVSHLIYMDDIKLYAKTEKDMKKLLDKTIEFSKDINMEFGIDKCKTLHIMRGKIRPGDYVIDDNSIITAMECTDLYKYLGYKQLKGLDHTTIKHTLMTEYKRRLGSICKTQLSGKRLIKALNTYAIPILTYSFGIIKWSKTDLENLERIIRTTLTKHNSLHPKSAIERLTIKRQNGGRGLIDIYNLWQKQIYNLKIFFQAKAEISNLHKAIVHNDFNYTPLNLSEPPNIQNPTNTNPQIQKIDSWKKKILHGRHPHDLDQTHIDRIASNMWLKVGSLFPETEGFIIAIQDQVINTKNYRKHIIKDPSATNDKCRKCHTQPETIQHITGACTTLTQTDYTHRHNQIVNIIHQNLALKHQLIHNTNTPYYKYKPETVLENITHKLYYDRAILTDRTIHYNRPDITLQDKTKKITYLIDIAVPNTHNIQKTITEKISKYTELKDEVTRIWRQEKVYIVPIVISTTGIIPTQLHNSLKLIDLKDSLYITLQKASILNTCRIVRKFMQLEENEILHQPTTTRT

SEQ ID NO: 21448 - protein, 1273 aa, Arctia plantaginis
MQNKTNKYNLRPLPGGRRDSIRNNNINNQTDRQTDNDNISLNSLTSLSVTEPYSPSTSSYRPTPVSFVDEDSHETPNPTLAVTQEVNAFLPASTKSGKPRVRMRWSKEVNLFIMRTYYQITKLETDMTTYRKQLHELFTRHYPDINVTEQRIADQRRTIVRNKLLTEETLHILKEEIRMQLQQNEHIYEYIENNSNPQLHNTQSVTTALPTQSQPHTITQSSQISTQPETITLTLENDIEIMQNVNPSSDNIEKIQEKFRTTLALYSRMDPITRPKLPKLKYSRKLSELTHVFNHNILHQFLSEDTQLTDIHTLIYCTALVISEELNYKIIDHPRNILRKNSKPPWQIRLEKDIEQLRADCGRLTQYINNNRSNKIVKRVEQIFRRQSTHTRHENNNRKPEEYLDTLKQKLALKVHRLKRYKKAQQRKNDNMLFALNEKSFYRNLSKPQTATTRPENIDIPTQTQLETFWSGIWEEPVQHNDKADWITEEENKWNSIEEMEFDCITEDDIAHVTGKLHNWKSPGIDKIHNYWYKKITSFHKPIAKNLTYIILGKQNIPEFIGMGITYMLPKTAHSPQPSQYRPITCLPTIYKILTSAIAHKINMHIEHNHIIAEEQKGCRRGHMGCKEQLIIDSTIHKHATTKNRNLHCTYIDYKKAFDSIPHSWLIKILHIYKINPKITDFLRDIMSHWKTTLHLNMNNRTVTTRQISIKKGIYQGDSLSPLWFCLALNPLSHLLQRCQAGYRLRNSTEETIISHLIYMDDIKLYSKSDKEMTKLLQNTTKFSKDINMEFGLDKCKTLHIIRGKIRPGDYAVDESSTIAAMESTDLYKYLGYKQLKGLDHTSIKQILATEYKSRTNTLCKTQLSAKNLIKALNTYAIPILTYSFGIIKWTKTDIEQIERTTRTTLTKHNNLHPKSAIERLTIKRENGGRGLIDIYHLWQKQVYNLKTFFRTKSHTSNIHKAITLNDYNFTPLNLNDHTGIHNPNNIDLQADKIENWKKKVLHGRHPHDLEQPHIDTIASNSWLKIGNLFPETEGFIIAIQDQIVNTKNYRKYIIKDATVTDDKCRKCHIQSETIQHITGACITLTQTDYTHRHNQITNIIHQKLALKHHLIQNTNTPYYNYTPQSVLESCSHKLYYDRAILTDRTIHYNRPDITLQDKINKTTYLIDIAVPNTHNLQKTITEKISKYTELKEEIIRIWRQEKVYIVPIVLSTTGVIPKHLHHSLKLINLNESVYFNLQKAAILNTCRTVRKFMDIEENGTAQHTQQPPSTST

SEQ ID NO: 21449 - protein, 1341 aa, Acronicta aceris
MGLLCIVITYYILYCYILLLHENLHGKRGYGNPLNMETRSKRKRLGPLPGGDRRGTPGADAGCLSMRTVSGEELSRRAPTEQNVTAEISDNIDRLTDRTNSPVEPYSPSTISYTPSIRSSFSIPTSSPTNSISLNPPMPTSDAARGVNTFLPASTKAGKPRVRMRWSKEVNMFIMRTYFYITRLETDLTIYRQQLHERFSLQYPEITVTEQRISDQRRIIVRNKLLSLEEIERIKNEVRTQLQSEVDNNQGASSTIYIHDQSNNHPQMQSQRCTPSQINTQSQPYTQTQPNTHNTQTSHSSTQTESMTLILENDIETLVEENPVTNIRIQEMYDKFRSALAQYSGMDPAARPKLPRLKYSPHLSKLTHMFNQNILHRFISEDTQLIDIHTLIYCTALVISEELNYKITDYPENTLTRKNNKPSWQIRLEKDIEKLRADCGRLTQYINNNRSNKVVKRVEAIFKSSITHTRHEKNNTTPEEFLDTLKQKLALKVHRLRRYKKAQQRKNDNITFANNEKLFYRNLQKPQTNTATDTNIQTPTQEQLETFWSGIWEEQVHHNDKADWIEKEESRCHALEEMEFIEITETDITIITSRLHNWKSPGIDKIHNYWYKKLVSLHKIIASNLTEIILGKQSIPEFIATGITYMLPKTTYSTEPSQYRPITCLPTIYKILTSAIATKINLHVEQQDIIAEEQKGCRRGHMGCKEQLVIDSTIHKHAISKNRNLHCTYIDYKKAFDSIPHSWLLQVLEIYKINSKIIDFLRTIMARWKTTLQLNTRQNTITTRQISIKKGIYQGDSLSPLWFCLALNPLSHLLHSCRIGYPLKHSTSETIISHLIYMDDIKLYSKTEKEMKTLIDTTTEFSKDINMQFGLDKCKTLHIIRGKIKSGDYAINDTDTITAMEPNDLYKYLGYKQLKGLDHTTIKQTLTIEYKRRVNAICKTQLSGKHLIKALNTFAIPILTYSFGVVKWSKTDIEQIERSTRTTLTKHNNLHPKSAIERLTIKRQNGGRGLIDIHHLWQKQINKLKTFFHMKSDTSDIHRAITQNDHNYTPLNLNEYTNTQILSINDPQKQKLEDWKKKTLHGRHPHDLEQSHIDTIASNKWLKIGNLFPETEGFIIAIQDQIINTKNYRKYIIKDPTVTNDKCRKCHTQPETIQHITGACTTLTQTDYTHRHNQVANIIHQKLALKHKLIQNKNTPYYKYTPQTVLENTSHKLYNDRAILTDRTIHYNRPDITLIDKINKTTYLIDIAVPNTHNLQKTIAEKINKYAELKEEITQIWKQEKVYVVPIVISTTGVIPKHLKHSLKLIDLKESTYTTLQKAAILNTCRIVRKFMQIEENEILP

SEQ ID NO: 21450 - protein, 1318 aa, Hydraecia micacea
METRSKRKRLGPLPGGDRRGALGADAECLSMRTVSGEELSRRAPTDKDATADIIDDGDRLTDRTNTPVEPYSPSTVSYTPSRPSTPCVPSSPSISSSPPITSFHSAQPTSTLNVTREVSTFLPASTKAGKARVRMRWSKEVNLFIMRTYLYITKLETDLTTYRKQLHELFTRKYPEITVTEQRISDQRRIIVRNKLLSQDVINQLKEEVRTQLQGESENTEGEITIALTQNTTAYNEQEQPCSQTEPITQSQPYFQSQAYSQTTHTSTQTESITVMLENEIETLADININQSTDTHIQEIHDKFKTALTQYSGMDPAARPRLPKLRYTPKLSQLVHLFNQNILQPYISEETRLIDIHTLIYCTALVISEELNFKITEYTGNSRQKNINKPAWQQRLEKDIEKLRADCGRLTQYINNNRSNKVVKRVEAIFKNMATHTRHENDNRKSEEFLDTLKQKLALKVHRLRRYKKAQERKNDNSLFATNEKNFYRNLQTAQTDTNTRTTENNVELPTTEQLETFWSGIWEEQVQHNKNSNWIIDEETKWSSLEEMEFVELTESDITCVTARLHNWKSPGIDKIHNYWYKKLESLHKVLAKNLTQIILGKQNIPEFIATGITYMLPKAQYSPQPSQYRPITCLPTIYKILTAAITRKINKHIEHHNIIAEEQKGCRRGHMGCKEQLVIDSIIHKHAATKHRNLHCTYIDYKKAFDSIPHSWLIQILQIYKINSKIIDFLQDIMARWRTTLQLNYQNNAITTRQISIKKGIYQGDSLSPLWFCLALNPLSDLLHRSQAGYSLKHATEETIISHLIYMDDIKLYSKSEKEMKKLIDITTEFSKDINMQFGLDKCKTVHIIRGKIKPGDYPINNTDTITAMEPTDLYKYLGYKQLKGLDHSTIKYTLNSEYKRRVVAVCKTQLSGKHLIKALNTYAIPILTYSFGVIKWSKTDIQQIERTTRTTLTKHNNLHPKSAIERLTIKRQYGGRGLIDVHHLWQKQIAKLRTFFHSKSHTSNIHKAVVMNDISYTPLNLHEQIDIQHTGDEDPHKQKLEDWKKKVLHGRHPHDLEQSHIDTIASNKWLKIGNLFPETEGFIIAIQDQIINTKNYRKFIIKDPTIINDKCRKCHSQPETIQHITGACTTLTQTDYTHRHNQVANVIHQKLALKYKLIQDTNTPYYKYVPQTVLESTTHKLYYDRAILTDRTVHYNRPDITLKDKVNNITYLIDIAVPNTHNLQKTIGEKISKYAELKDEVTRIWRQEKVYVVPIVVSTTGVIPNHLHHSLKLIDLKDSIYITLQKAAILNTCRIVRKFLQIEENEISPPNNNSS

SEQ ID NO: 21451 - protein, 1316 aa, Ochropleura plecta
METRSKNKRIGPLPGGDRRGAPGADAGCHSMRTVSGEELNRRAPTDKDTTAEIIDDGDRLTDRTDTPVEPYSPSTVSYTPSRPSSPSISSSPTLSTHPIITLNTVSPTPTLNAARGVSTFLPASTKAGKARVRMRWSKEVNLFIMRTYFYITKLETDMTTYRKQLHELFTQQYPEITVSEQRISDQRRAIVRNKLLSQAIIDQLKEDIRVQLQADDNTTPLLENLTDIAQQPQTQLNTQSQPNIQSQLYNQSQANTQTSHTSTQTEYITFTLESDIETLVVENHNPTTDTYIQEIHDKFRTTLSQYSGMDPAIRPKLPKLRYSPNLFRLVNLFNENILNQFISDETQLIDIHTLIYCTAVVISEELNFKITQNTGNLRPKQNIKPAWQQRLEKDIEQLRADIGRLTQYINNNRSSKVVRRVEAIFRTHLVHTRHENNNRKPEEFLDTIKQKLALKVHRLRRYKKAQQRKNDNAIFATNEKIFYRNLNKPNTDTHYDTNTDTPTQPTKEQLETYWASIWEQQARHNDEAAWITEEETKWKAIDEMEFVEVTEADITHITGRLHNWKSPGIDKVHNFWFKKLTSLYKPIARNLTQIILGQQNAPEFIATGITYMLPKTKNSPQPSQYRPITCLPTIYKILTSAISTKINRHIEQHNIMAEEQKGCRRGHMGCKEQLIIDSTIHKHATTKNRNLHCTYIDYKKAFDSVPHSWLIQILKIYRVNSKIIDFLSNIMSQWKTTLQINCNQNSITTRQILIKNGIYQGDSLSPLWFCLALNPLSHLLQRCQAGYRLKHTTEQTTISHLIYMDDIKLYAQTEKDMKKLVEVTADFSQDINMQFGLDKCKTLHIIRGKIRPGNYVVNNTDTITAMEPSDLYKYLGYTQLKGLDHVGIKETLTAEYKRRLNVVCKTQLSGKNLIKALNTFAIPILTYSFGVIKWTKTDTEQLERTTRTTLTKHNNLHPKSAIERLTIKRQNGGRGLIDIQHLWRKQVCRLKTFFHTKSLTSNIHKAIVQNDHNYTPLNLNEQLDTSHNINEDPQTQKIDDWKKKVLHGRHPYDLEQTHVNKDASNKWLKIGNLFPETEGFIIAIQDQIINTKNYRKFIIKDPSVTNDKCRKCHTQPETIQHITGACTTLTQTDYTHRHNQVANVIHQRLAVQYTLIQDTNTPYYNYTPQATLENDTHKLYYDRAILTDRTIHYNRPDIILQDKINKITYLIDIAVPNTHNIQKTITEKISKYAELKEEVTRIWRQEKVYVVPIVLSTTGVIPNHLLHSLKLLSLKETLYITLQKAAILNTCRIVRKFMQIEENEIGPHHNTPHTST

SEQ ID NO: 21452 - protein, 1304 aa, Euproctis similis
MEMYLRNRRIGPLSGGDRRGTSGADAGCDSIRSVGGEELNRRAPSGSPEDTTANPTDYRHTDNDNISVNSLISDPVEPYSPSSNSFIPTPVSSLGSDSSRTHSPVLNVAQEVNTFIPASTKAGKPRVRMRWSKEVNTFIMRTYYHITKLETDMTIYRKRLHELFSRQYPENTVTEQRISDQRRAIIRNKLLSQETLEQLKDEVKITLSKDENYATNRNLDPFTDTQIEDNLDNEYITSPTATTHSQSQPYPLLQTINTSTQTETITLTLENDIEILVDNNNETLDTYTGELETKFRTALTKYSGIKPADRPKLPKLKYSIQLAKLTNLFNQHILHTYLNKDTQLTDIHTLIYCTAVVISEELNYKISHNYQNFKTRDNRKPAWQLRLEKDIEKIRADCGRLTQYINNNRSKKVVKRIEQIFKNHLTHTRHESENKNPAEYLDTLKQKLAVKVNRLKRYKKALQRKEENALFGSNEKYFYRNLKTSQIHNSPSTNIEIPSKTDLEHFWSGIWEEKIEHNDKADWILEETKQWVTIEEMPFEKITENDIKSVTLKLHNWKSAGIDKVHNFWYKKLTVLHKSIARVLTDIILGRNNIPEFLTIGITYMIPKNNYSSQPSQYRPITCLPTIYKILTSVIAHKINKHAEQNNIIAEEQKGCRRGHMGCKEQLLIDSVIHRNASTKNRNLHCTYIDYKKAFDSIPHSWLLKILQIYKINPKLIQFMRNIMPHWKTTLQLNYQETTIKTREIKINKGIYQGDALSPLWFCLALNPLSHLLHRCRVGYCLKHPTEQRNISHLIYMDDIKLYTQSKKDMKKLLKVTTEFSKDINMQFGFDKCKTLNIIRGKIQPGDCEVDDDNIIAAMEPTDFYKYLGYNQTKGLNHTVIKENILNEYKNRVNKLCKTQLSAKNLFKAINTYAIPVLTYSFGVIKWSKTNIEHLERVTRTTLTKHNHLHPKSAIERLTIKREMGGRGLIDIPQLWQKQIQNLRNFFHIKSQASTIHKVITHNDLNYTPLNLSDFQNTHYIFNTDHQIYQIENWKKKTLHGRHPHDLEQNHVDQIASNKWLKIGSLFPETEGFMIAIQDQIINTKNYRKYIIKDSSVTDDKCRKCYSQPETIQHITGACVTLTQTDYTHRHNQIVNIIHQNLALKHNLIPNSLTAYYNYRPQTVLENTTHKLYYDRAILTDKTIHYNRPDVVLQDKLNKTTYMIDISVPNTHNLHKVISEKISKYAELKEEIARIWRQDKVYVVPIVLSTTGIIPKHLHNSVKLLGLKESLYIILQKAAILNTCRIVRKFMALDENSSHNAPST

SEQ ID NO: 21453 - protein, 1321 aa, Xestia xanthographa
METRSKKKRIGPLPGGDRRGAPGADARCHSMRSVSGEELNRRAPTDKDATAESIDDGDRLTDRTDTPVEPYSPSTVSYTPSRRSSPSIPSSPTVSSPPIISLNTVTPTPFLNVARGVSTFLPASTKVGKARVRMKWSKEVNLFIMRTYLHITKLETDMTTYRQQLHALFTRQYREITVSEQRISDQRRTIVRNKLLSQEVIDQLKEEVRTQLQQEEIVNYTDTNNITQNINGISHQEQPQLLSQSQLIYAQSQPYSQSQAYTQTSHTSTQTESITLTLENDIETIVVPDQHLTTDTYIQEINDKFRTTITQYSGMDPAARPRLPKLKYTPHLFRLVNLFNESILTQFISDDTKLIDIHLLIYCTAVVISEELNFKITDHTGTPRTRQNIVPAWQQRLEKDIEKFRADIGRLTQYISGCRSNKLVKRVEIILRNYSTHTRHDNSNRKPEEFLDTLKQKLALKVHRLKRYKKAQQRKNDNATFATNEKMFYRNLHTPQTDTNHENNTNTPNLPSKEQLETYWAGIWEEQKQHNDKASWIADEEAKWRDIDVMEFVEVTESDIIHITARLHNWKSPGIDKIHNFWYKKLTALHKSMAKNLTDIVLGQQNIPEFITTGITYMLPKTKYTSEPSQYRPITCLPTIYKILTSAVTKKINSHIIQHNIIAEEQKGCRQGHMGCKEQLIIDSTIHKHATSKNRNLHCTYIDYKKAFDSVPHSWLIQILEIYRINPKIVDFMRHVMLQWKTTLKINSSNNNVTTRQISIKTGIYQGDSLSPLWFCLALNPLSHLLQRCGAGYCLKHAADQTTISHLIYMDDIKLYAKSEKDMKKLVDITAEFSQDINMQFGLEKCKTLHIVRGKVRPGDYAVNESDSITALEPTDLYKYLGYTQLKGLDHVKIKDTLTTEYKKRVNAVCKTQLSGKHLIKALNTFAIPVLTYSFGVIKWTKTDTEQLQRTTRTTLTKHNNLHPKSAIERLTIKREHGGRGLIDIQHLWRKQVSRLKSFFHTKSRNSNIHKAIVTNDLNYTPLNLSDQIETQNTTNDDPQTQKIKDWKRKVLHGRHPHDLEQSHINKLASNKWLKIGNFFPETEGFIIAIQDQVINTKNYRKYIIKDPTVTNDKCRKCHVHPETIQHITGACTTLTQTDYTHRHNQVANIIHQKLALKHALIQNTNTPYYNYKPETTLENTTHKLYYDRAILTDRTIHYNRPDVILQDKINKVTYLIDIAVPNTHNIQKTITEKISKYAELKEEVTRIWRQEKVYVVPIVLSTTGVIPNHLIHSLKLLDLKETLYITLQKAAILNTCRIVRKFMQIEENEIGPHHNTTSSN

SEQ ID NO: 21454 - protein, 1309 aa, Mesoligia furuncula
METRSKRKRIGPLPGGDRRGALGADAECLSMRTVSGEELNRRAPTDKDATAEVIDDGDRLTNRTDTPVEAYSPSTVSYSPSRTSSPSIPSSSIPSSPPITSFNTVSPTPALNVAREVSTFLPASTKAGKTRVRMRWSKEVNLFIMRTYLYITKLETDMTTYRQQLHECFSRQYPEISVSEQRISDQRRTIVRNKLLSQVELDQLKEEIRIQLQQESENCADTNTIILTQNTNINILQEQPQSLTQLHPNSQSLTCNQSQAFTQTAHTSTQTESLTLTLENDIETLVVADQNLVTDTYIQEIQDKFKTTIAQYSGMDPAVRPKLPKHKYTRNLFRLVNLFNENILVQFISDDTQLIDIHLLIYCTAVVISEELNFKITDHTVTTRTKPFVKPAWQQRLEKDIEKLRADCGRLTHYINGIRSNKVVKRVETIFKNYSNHTRHESNNRKPEEFLDTLKQKLALKVHRLRRYMKAQQRKNDNATFAMNEKAFYRNIQKTHSDTRIENNTDALSKEQLEAYWSSIWEEQVQHNDKASWIAEEEAKWRAIDEMEFAEVSESDITHITARLHNWKSPGVDKIHNFWYKKLTSLHKSIAKNLTDIILGQQNTPEFIATGITYMLPKTKSSSQPSQYRPITCLPTIYKILTSAITKKISSHIEQHNIIAEEQKGCRQGHMGCKEQLIIDSTIHKHATSKNRNLHCTYIDYKKAFDSVPHSWLIQILEIYRINPKIINFMRHIMLQWKTTLQINSNHSNITTRQISIKKGIYQGDSLSPLWFCLALNPLSHLLQACRAGYCLKHTTEETTISHLIYMDDIKLYGKTEKDMKKLVEITAAFSKDINMQFGLDKCKTLHIIRGKVRPGDYAVNDTDTITAMEPSDLYKYLGYTQLKGLDHVRIKNTLTTEYKRRLNAVCKTQLSSKHLIKALNTFAIPVLTYSFGVIKWTKTDTEKLERTTRTALTKHNNLHPKSAIERLTIKRQNGGRGLIDIQHLCRKQVSRLKTFFHTKSRTSNIHKAIVINDLNYTPLNLNDQIETQNTTNDDPQKQKIEEWKKKVLHGRHPHDLEQSHINQLASNKWLKIGNLFPETEGFIIAIQDQIINTKNYRKFIIKDPTITNDKCRRCHIQSETIQHITGACTTLTQTDYTHRHNQVANIIHQKLALKHSLIQNSCTPYYKYTPQTILENDTHKMYYDRAILTDRTIHYNRPDITLQDKIRKITYLIDIAVPNTHNLQKTISEKISKYAELKEEVTRIWSQEKVYVIPIVLSTTGVIPNHLLRNLKLIDLEESVYINLQKAAILNTCRIVRKFMQLEEENTP

SEQ ID NO: 21455 - protein, 1163 aa, Heliconius numata
MQWSKDVNLFIMRTYYHITKLETDMTIYRKKLHEQFLLNYPQIKVSEQRISDQRRTIERNKLLSQEILNRLKEEVRIQLQEEETNNVNITEIPNHTYIRTRTSSPTTYQHYANSQQTQTSHIFTQTETITQLLENDIEGFVNVQPPNEEYIRIIIDKFRTNLTLYAGMDPKMRPKLPKLRYCRKLYQLSNLFNENILIEYISPDTKLIDLHTLIYCTALTITEELNYKITGHSRINSKSNKYKPAWQHRLEKDIQKLRADIGKLTQFINNNRSKKIIERVEFLLKTTKVHTKHEKNNKRPEEVLDTLKQKLALKSHRLKRYNKAQERKAQNNTFVRNEKQFYRNLLKPQNLIQDKVETPTKEELEKYWSGIWEEQTYHNNQADWITKEEQRWHDLEVMEYNELVKDDIKEITDKLHNWKSPGIDKIHNFWFKKLTFLHSSLAKNISEIISGQQNIPEFLATGITYMLPKNNFSTQPSQYRPITCLPTLYKIITSLITQKINKHIENNNIIAEEQKGCRRGHMGCREQLIIDSTIMKHALSKNKNLHCTYIDYQKAFDSIPHSWLLHILNIYKINPKIINFLANIMTQWKTTLHLHSSNYNINTREIAIKKGIYQGDSLSPLWFCLALNPLSYLLKCNRAGYALKHDNSETIISHLIYMDDIKLYSKNNKEMKTLIDTTTEFSEDIHMNFGLDKCRTVHIVKGKIRPGDYAINEIDKITAMEPNEFYKYLGLQQLKGLNHTAIKETITNEYKKRINAICKSQLSSKHLIKALNTYAIPILTYTFGIVKWSNSNIEQIERLTRTTLTKHNNLHPKSAIERLTIKRKHGGRGLIDIKQLWQKQLHNLSNFFYTKAQSSNIHKSIVQNDFKYTPLNLNDCQSTGNLINIDPQKKKIEEWKKKVMHGRHPNDLQQPHIDLEASNKWLQTGSLFPETEGFIIAIQDQIINTKNFRKYIIKDPTVTSDKCRRCHTQPETIQHITGACASLTQTDYTHRHNQLVNIIHQRLAHKHQLIQDTNIPYYKYTPQSVLENSSHKMYYDRAILTDKTIHFNRPDITLQDKINKTVYLIDVAVPNTHNIQKTIVEKINKYADLKEEVTRIWKQNKVYVVPIVISTTGVVPKAIHHYLKIINLEDNILHTLQKAAILNTCRIVRKFLQIEENNINTLN

SEQ ID NO: 21456 - protein, 1287 aa, Narcosius parisi
MRRSNRIKNIKNKNSAQSGAVAERTPNPSSPTSSTHSLFQSSNSTPLSFENISNSVSRSTTVSPMSADIEQIQNTTLPAADVTRGANAFLPASTKAGKPRVRMKWNQDVNIFIMRTYYHITKLETDMTTYRKTLHELFSKQYPDVNVSEQRVSDQRRMIIKNRYLPQETLNKLKEEVSRQLKEEENTNEINNDVTQCHIGADQSITESQTQLQNITFQSHNLSQSHTQAFTSTSHSSTQTEFITLLLENETETIADLAPPNDASFQDMYDKLQTALTQYSGMDPTARPKLPRIKYTKHLNDLVHLFNQHILHRFIPAEIQLNDIHTLIYCTALVIAEELNYKIIHNTTHIKRQQYTKPSWQIRLERDIDNLRVDIGRLTQYINNNRSDRLVKKVQHIFYRMAKHTKHESNNRKPEEFLDTLKQKLALKTHRLKRYKKTQQRKKDNTQFATNEKIFYRNLCKPKIDSTAKRDNHTEIPTKEELETYWSNIWEENIRHNDKADWITEEKDKWEVIDEMEFKEITECDITNITARLHNWKSPGIDKIHNYWYKKLTTLHQPLARALTEIILGKQNIPNFITIGITYMIPKINNSTQPSQYRPITCLPTIYKILTSAITSKVNTHIEHHNILAEEQKGCRRGHMGCKEQLVIDSIIHKHATSKHRNLHCTYIDYKKAFDSIPHSWLIQILQIYRISPILINFLRNIMPHWKTTLHLNQGYKSISTRQIHIKKGIYQGDSLSPLWFCLALNPLSNLLHNCQTGYRLNNSSEETTISHLIYMDDIKLYARTYKDMQKLIDKTTQFSKDINMKFGLDKCKTLHIIKGKIQSGDYRVNDNDVISAMEPTDVYKYLGYNQIKGLLHTHIKQTLMTEFKRRIDAICKTHLSAKHLSKAINTYAIPILTYSFGIIKWTKTDIEQLERITRTTLTKHNHLHPKSAVERLNIKRQDGGRGVIDINYLWQKQISNLRHFFFMKSSTSNIHAVITHNDENLTPLNLSDHTIQHTLDHRNPQLQKIEHWKNKVLHGRHPHDLEQTHVDKIASNKWLKIGNLFPETEGFIIAIQDQVINTKNYKKHIIKDPNVKNDKCRRCHTQPETIQHITGACSNLTQTDYTHRHNQVTNIIHQNLALKHNLIQNTNTPYYKYTPQTVIENSSHKLYYDRAILTDRTIHYNRPDIILQDKLNKITYLIDIAVPNTHNIQKTIAEKINKYVELKEEVTRIWKQNKVYVVPIVLSTTGVIPHHLHQSLKLIGLPHSIYTILQKAAILNTCRIVRKFMQIDEKEVGPHNPNIAPP

SEQ ID NO: 21457 - protein, 1317 aa, Noctua janthe
METRSKKKRIGPLPGGDRRGAPGADAGCLSMRTVSGEELNRRAPTDKHTTAEIIDDGDRLTDRTDTPVEPYSPSTVSYTPSRRSSPSIPSSPTPLSPPIISFNTVSPTPTLNATRGVSTFLPASTKAGKARVRMKWSKEVNTFIMRTYLYITKLETDMTTYRQQMHALFTRQYPDIAVSEQRIADQRRTIVRNKLLSQEVIDQLKEEIRTQLLQEETLNCIDTNNITQNVNEIYHQEQPQLLSQSQLIYSQSQPYNQSQAHTQISHTATQTESITLMLENDIETIAVPYQHLTTDTYIQEINDKFRTTITQYSGMDPAARPRLPKLKYTPNLFRLVNLFNESILTQFISDDTQLIDIHLLIYCTAVVISEELNFKITDHTGTPRTRQNLAPAWQQRLEKDIEKLRADIGRLTQYINGCRSNKLVKRVEVIFRNNLTHTRHEKNNRKSEEFLDTLKQKLALKVHRLRRYKKAQQRKKDNTTFATNEKMFYRNLHKPQTDTIDINNTNIPNLPTKEQLEEYWASIWEEPVQHNDKASWIAEEEVKWRGVDEMEFLEVAETDITHITARLHNWKSPGIDKIHNFWYKKLTSLHKSLAKNLTDIILGQQNTPEFIATGITYMLPKTTNSPQPSQYRPITCLPTIYKILTSAITKKISSHIERHNIIAEEQKGCRQGHMGCKEQLIIDSTIHKHATSKNRNLHCTYIDYKKAFDSVPHSWLIQILEIYRINPKIIDFIRNIILQWKTTLQINYNHNTVTTRQISIKKGIYQGDSLSPLWFCLALNPLSHLLQGCGAGYCLKHTTDETIISHLIYMDDIKLYAKTENDMKKLVDVTAEFSKDINMQFGLEKCKTLHIVSGKVRPGDYVVNDTDTISAMEQTDLYKYLGYAQLKGLDHTRIKNTLSNEYKRRVNAICKTQLSGKHLIKALNTFAIPVLTYSFGVIKWSKTDTEQLERTTRTTLTKHNNLHPKSAIERLTIKRQHGGRGLIDIQHLWRKQISRLKSFFHSKSRTSSIHKAIVINDLNYTPLNLSHQIETLNTTNDDPQQHKIEDWKRKVLHGRHPHDLEQSHINKLASNKWLKIGSLFPETEGFIIAIQDQIINTKNYRKYIIKDPTATNDKCRKCHSQPETIQHITGACTTLTQTDYTHRHNQVANVIHQKLALKHTLIHNTSTPYYNYKPEATLENTTHKLYYDRAILTDKTIHYNRPDIILQDKINKVTYLIDIAVPNTHNIQKTITEKISKYAELKDEVTRIWRQEKVYVVPIVLSTTGVIPNHLLHSLKLLDLKESIYIILQKAAILNTCRIVRKFLQIEENEIGPHHNT

SEQ ID NO: 21458 - protein, 1317 aa, Noctua janthe
METRSKKKRIGPLPGGDRRGAPGADAGCLSMRTVSGEELNRRAPTDKDTTAEIIDDGDRLTDRTDTPVEPYSPSTVSYTPSRRSSPSIPSSPTPLSPPIISLNTVSPTPTLNATRGVSTFLPASTKAGKSRVRMKWSKEVNTFIMRTYLYITKLETDMTTYRQQMHALFTRQYPDIAVSEQRIADQRRTIVRNKLLSQEVIDQLKEEIRTQLLQEETLNYIDTNNITQNVNEIYHQEQPQLLSQSQLIYSQSQPYNQSQAHTEISHTATQTESFTLTLENDIETIAVPYQHLTTDTYIQEINDKFRTTITQYSGMDPAARPRLPKLKYTPNLFRLVNLFNESILTQFISDDTQLIDIHLLIYCTAVVISEELNFKITDHTGTPRTRQNLAPAWQQRLEKDIEKLRADIGRLTQYINGCRSNKLVKRVEVIFRNNLTHTRHEKNNRKPEEFLDTLKQKLALKVHRLKRYKKAQQRKKDNTTFATNEKMFYRNLHKPQTDTFDENNTNIPNLPTKEQLEEYWASIWEEPVQHNDKASWIAEEEVKWRAVDEMEFLEVAETDITHITARLHNWKSPGIDKIHNFWYKKLTSLHKSLAKNLTDIILGQQNTPEFIATGITYMLPKAKNSPQPSQYRPITCLPTIYKILTSAITKKISSHIERHNIIAEEQKGCRQGHMGCKEQLIIDSTIHKHATSKNRNLHCTYIDYKKAFDSVPHSWLIQILEIYRINPKIIDFIRNIMLQWKTTLQINYNHNTVTTRQISIKKGIYQGDSLSPLWFCLALNPLSHLLQGCGAGYCLKHTTDETIISHLIYMDDIKLYAKTENDMKKLVDVTAEFSKDINMQFGLEKCKTLHIVRGKVRPGDYVVNDTDTISAMEQTDLYKYLGYAQLKGLDHTRIKNTLSNEYKRRVNAICKTQLSGKHLIKALNTFAIPVLTYSFGVIKWSKTDTEQLERTTRTTLTKHNNLHPKSAIERLTIKRQHGGRGLIDIQHLWRKQISRLKSFFHSKSRTSSIHKAIVINDLNYTPLNLSHQIETLNTNNDDPQQHKIEDWKKKVLHGRHPHDLEQFHINKLASNKWLKIGNLFPETEGFIIAIQDQIINTKNYRKYIIKDPTATNDKCRKCHSQPETIQHITGACTTLTQTDYTHRHNQVANVIHQKLALKHTLIHNTSTPYYNYKPEATLENTTHKLYYDRAILTDKTIHYNRPDIILQDKINKVTYLIDIAVPNTHNIQKTITEKISKYAELKDEVTRIWRQEKVYVVPIVLSTTGVIPNHLLNSLKLLDLKESIYIILQKAAILNTCRIVRKFLQIEENEIGPHHNT

SEQ ID NO: 21459 - protein, 1318 aa, Agrochola circellaris
METRSKRKRIGPLPGGDRRGAPGADAGCLSMRTVSGEELNRRAPTDKDATAEADDGDRLTNRTDTPVEPYSPSTVSYAPSRTSSPSIPSSHIPSSPPIPSFNTVTSTPALNVAREVSTFLPASTKAGKSRVRMRWSKEVNLFIMRTYLYITKLETDMTTYRQQLHELFTRQYPEITVTEQRISDQRRAIVRNKLLSKEIIDQLKDEIRTQLLEESENIEGAITIALTQNAIEHNPQEQPQPYTQPQPILQSQPYFQSHAYSQTTHTSTQTESITIMLENEIETLVDNNQNQSTDTRSQEIHDKFKTALTQYSGMDPATRPKLPKLRYTPKLFHLVNLFNQNILNQYISEETQLIDVHTLIYCTALVISEELNFKITEYTGNTRQRNVNKPAWQQRLEKDIEKLRADCSRLTHYINNNRSNKVVKRVETIFKNMSTHTRHENDNRKPEEFLDTLKQKLALKVHRLRRYKKAQERKNDNSLFASNEKNFYRKLQTPQTDTETPTAENNIELPTAEQLETFWSSLWEEQVQHNAQSDWISDEETKWSSLEEMEFVELTESDIGSITARLHNWKSPGIDKIHNYWYKKLDSLHKVLAKNLTEIILGKQNIPEFIATGITYMLPKKQYSPQPSQYRPITCLPTIYKILTSAITTKINKHIENHNIVAEEQKGCRRGHMGCKEQLVIDSIIHKHAATKNRNLHCTYIDYKKAFDSIPHSWLIQILQIYKINSKIIDFLQNIMSRWKTTLQLNYRHNTITTQQISIKKGIYQGDSLSPLWFCLALNPLSHLLHRCQAGYSLKHSTEETVISHLIYMDDIKLYAKSEKEMKKLIDITTEFSKDINMQFGLDKCKTIHIIRGKIKPGDYPVNNTDTITAMEQTDLYKYLGYNQLKGIDHTAIKHTLNTEYKRRVIAVCKTQLSGKHLIKALNTYAIPILTYSFGVIKWSKTDIQQIERSTRTTLTKHNNLHPKSAIERLTIKRQYGGRGLIDVHNLWQKQIAKLRTFFHSKSHTSNIHKAVIMNDIRYTPLNLHEQIDTQDTSNNDPHKQKIEDWKKKVLHGRHPHDLEQSHIDAIASNKWLKIGNLFPETEGFIIAIQDQIINTKNYRKFIIKDPTITNDKCRKCHSQPETIQHITGACTTLTQTDYTHRHNQVANVIHQKLALKYKLIQDTNTPYYKYIPQIILENTTHKLYYDRAILTDRTVHYNRPDITLQDKVNKVTYLIDIAVPNTHNLQKTIGEKISKYAELKEEVTRIWRQEKVFVVPIVVSTTGVIPNHLHHSLKLIDLKDSIYITLQKAAILNTCRIVRKFMQIEENEITPHNINFT

SEQ ID NO: 21460 - protein, 1310 aa, Agrochola circellaris
METRSKRKRLGPLPGGDRRGASGADAGCLSMRTVSGEELNRRAPTDKDATAESDDGDRLTNRTDTPVEPYSPSTVSYVPSRTSSPSIPSSPIPSSPPITSFNTVSPTPALNVAREVSTFLPASTKAGKARVRMKWSKEVNLFIMRTYLHITKLETDMTTYRQQLHERFSRQYPEISVSEQRISDQRRTIVRNKLLSQVELDQLKEEVRTQLRQESENYADTSTITLTQNTNENILQEQPQSLTQLHSNSQALTYNQSQAYIQTAHTYTQTESLTLTLENDIETLVVADQNLTTDTYIRETHDKFRTTITQYSGMDPAVRPKLPKLKYTRNLFRLVNLFNENILIQFISDDTQLIDIHLLIYCTAVVISEELNFKITNHTGTTRTSHTVKPAWQQRLEKDIEKLRADCGRLTQYINGIRSNKVVKRVETIFKNYYNHTRHENNNRQPQEFLDTLKQKLALKVHRLRRYMKAQQRKNDNAKFAMNEKAFYRNIQKTHTDTTIENNTDVPSKEQLETYWSSIWEEQVQHNDKASWIEEEEAKWRAIDEMEFAEVAESDIKHITARLHNWKSPGIDKIHNFWYKKLTSLHKSIAKNLTDIILGQQNTPEFIATGITYMLPKTKNTPQPSQYRPITCLPTIYKILTSVIAKKICSHIEHHNIIAEEQKGCRQGHMGCKEQLIIDSTIHKHATSKNRNLHCTYIDYKKAFDSVPHSWLIQILEIYRINPKIIDFMRHIMLQWKTTLQINSNHGTVITRQISIKKGIYQGDSLSPLWFCLALNPLSHLLQSCRAGYCLKHTTEETTISHLIYMDDIKLYAKTEKDMKKLVEVTAEFSKDINMQFGLDKCKTLHIIRGKVRPGDYVVNDTDSITAMEPTDLYKYLGYGQLKGLDHVRIKNTLTTEYKRRLNAICKTQLSGKHLIKALNTFAIPVLTYSFGVIKWTKTDTENLERTTRTTLTKHNNLHPKSAIERLTIKRQHGGRGLIDIQHLCRKQVGRLKTFFHTKSRTSNIHKAIVINDLNYTPLNLNDQIETQNTNNDDPQKQKIEEWKKKVLHGRHPHDLEQSHINKLASNKWLKIGNLFPETEGFIIAIQDQIINTKNYRKFIIKDPTITNDKCRRCHIQSETIQHITGACTTLTQTDYTHRHNQVANIIHQKLALKHNLIQNSNTPYYKYTPQTILENDTHKMYYDRAILTDRTIHYNRPDITLQDKIRKITYLIDIAVPNTHNLQKTITEKISKYAELKEEVTRIWRQEKVYVIPIVLSTTGVIPNHLLRSLKVIDLEDSIYINLQKAAILNTCRIVRKFMQLEEENTPSS

SEQ ID NO: 21461 - protein, 1319 aa, Hydraecia micacea
METRSKSKRIGPLPGGDRRGAPGADAGCLSMRTVSGEELNRRAPTDKDTTAEIIDDGDRLTDRTNTPVEPYSPSTVSYTPSRPSSPSIPSSPTLSSPPITSLNSIPPTPALNVAREVSSFLPASTKAGKARVRMRWSKEVNLFIMRTYFYITKLETDMTTYRQQLHELFTRQYPEITVSEQRISDQRRAIVRNKLLSQEIIEQLKEETRIQLQEAENNTSADAIPLSQNTTETAEQSHSQPHIQVTPYTQSQLYNQSQVFTQTSHTSTQTESIILTLENDIETLTVADQNLTADICIQEIVDKFRTSLAQYSGMDPAVRPKLPKLRYSPNLFRLVNLFNENILHQFISDDTQLLDIHTLIYCTAVVVSEELNFKITQHTGNTRPKQNIKPAWQQRLEKDIEKLRADCGRLTQYINNVRSSKVVKRVEAIFRSSVTHTRHENNNRKPEEFLDTLKQKLALKVHRLRRYKKAQQRKNDNAIFAANEKMFYRNLHKPNTDTNDVNDTVAPDQPTKEQLETYWSSIWEEQEQHNDKATWITEEETKWRAIQEMEFIEITEIDITHLTGRLHNWKSPGIDKIHNFWYKKLTSLHKPIAKNLTEIILGRQNIPDFIATGITYMLPKTINSPQPSQYRPITCLPTIYKILTSAITTKINSHIEHHNIMAEEQKGCRRGHMGCKEQLIIDSTIHKHATTKNRNLHCTYIDYKKAFDSVPHSWLIKILEIYRINSKIIDFLRNIMPLWKTTLQINSNDNNVTTRQISIKKGIYQGDSLSPLWFCLALNPLSHLLQRCQAGYCLKHTADQTSVSHLIYMDDIKLYAQTEKDMKKLVEATAEFSLDINMQFGLDKCKTLHIIRGKIRPGDYVVNNTDTITAMEPTDLYKYLGYTQLKGLDHVRIKETLTAEYKRRLNTICKTQLSSKNLIKALNTFAIPILTYSFGVIKWTKTDTEQLERTTRTTLTKHNNLHPKSATERLTIKRQHGGRGLIDIQHLWRKQVCRLKTFFHSKSRTSNIHKAIVLNDFNYTPLNLNEQLDTSPIISDDPQIQKIEDWKKKVLHGRHPHDLEQSHVNKVASNKFLKIGNLFPETEGFIIAIQDQIINTKNYRKFIIKDPSVTNDKCRKCHSQPETIQHITGACATLTQTDYTHRHNQVANVIHQKLALKYTLIQNTNTPYYNFTPQTILENETHKLYYDRAILTDRTIHYNRPDITLQDKINKVTYLIDIAVPNTHNIQKTISEKISKYAELKDEVTRIWRQQKVYVVPIVLSTTGVIPNHLLHSLKLLNLKETLYITLQKAAILNTCRIVRKFMQIDENEIGPHHNTSVT

SEQ ID NO: 21462 - protein, 955 aa, Xestia xanthographa
MLENDIEVLGNIDQNPPTDTRIQEINEKFKTALTQYSGMDPAARPKLPKLRYTPKLVRLVNCFNQNILNQYISEKTQLIDVHTLIYCTALVISEELNFKITEYTGNTRQPNANKPAWQLRLEKDIEKLRTDCGRLTQYFNNNRSNKVVKRVEIIFKNMAVHTRHENHNRKPEEFLDTLKQKLALKVHRLRRYKKAQERKNDNALFATNEKKFYRKLQKPQTDTDTPTTENNIELPTTEQLGTFWAGIWEEQVHHKETSQWIQDEETKWSSLEEMGFSEISESDVASVTARLHNWKSPGIDKIHNYWYKKLESLHTILAKNLTEIILGKQNIPEFIATGITYMLPKTQYSPQPSQYRPITCLPTIYKILTSAITSKINKHIEHHNIIAEEQKGCRRGHMGCKEQLVIDSIIHKHAATKNRNLHCTYIDYKKAFDSIPHSWLIQILQIYKINPKIIHFLQNIMSHWKTTLQLNYRHTAITTRRITIKKGIYQGDSLSPLWFCLALNPLSDLLRRCQAGYSFKHDTEETVISHLIYMDDIKLYARSEKEMEKLIETTTEFSKDINMQFGLDKCKTVHIIRGKIKPGDYPINNIDTITALEPTDLYKYLGYKQLKGIDHTAIKHTLNTEFKRRVIAVCKTQLSGKHLIKALNTYAIPILTYSFGVIKWSKTDIQQIERTTRTTLTKHNNLHPKSAIERLTIKRQYGGRGLIDIHHLWQKQITGLRTFFHSKSHTSSIHKAIVKNDINYTPLNLHEPTDTQHTNNEDPQQQKLRDWKKKVLHGRHPHDLEQSHVDTKASNKWLKIGSLFPETEGFIIAIQDQIINTKNYRKVIIKDPTITNDKCRKCHSQPETIQHITGACTTLTQTDYTHRHNQVANIIHQNLALKYKLIQETNTPYYKYVPERFLENTTHKLFYDRAILTDRTIHYNRPDIILQDKANKVTYLIDIAVPNTHNLQKTI

SEQ ID NO: 21463 - protein, 1185 aa, Mamestra brassicae
MRWSKDVNVFIMRTYLYITKLETDMTTYRQQLHAHFTRQYPEITVTEQRISDQRRIIVRNKLLSQEVIDQLKEEVRTQLSQEESVNVADNITITQNINENTLQGQPQALNQSQPINNQSQPYHQSQLSTQTSHISTQTEYLTLTLENDIETLVVENQNLTTDIYVQDIHDKFRSTIALYSGMDPAARPKLPKLKYTPNLFRLVNLFNEHILNQFLSDDAHLLDIHLLIYCTAVVISEELNFKITDHTQNTRVRQNTEPGWQQRLVNDIEKLRADCGRLTQYINGSRSNKVVKRVEAIFRNSFTHTRHENSNRKPEEFLDTLKQKLALKVHRLRRYKKAQQRKNDNAIFSTNEKIFYRNLNKPHTDTNDENSSDTSNLPTKEQLETYWSSIWEEPTQHNNEASWIADEDAKWRGIDEMEFIEVTESDITHITARLHNWKSPGIDRIHNFWYKKLTSLHKYLAKNLTDIILGKQHTPDFITTGITYMLPKTKNSPEPSQYRPITCLPTIYKILTSAITRKISSHIIHNNIIAEEQKGCRQGHMGCKEQLIIDSTIHKHASTKNRNLHCTYIDYKKAFDSVPHSWLIKILEIYRIDLKIIDFLRRIMLQWKTTLQINFNRHIVTTRQISIKKGIYQGDSLSPMWFCLALNPLSHLLQRCKAGYCLKHTAEETTISHLIYMDDIKLYAKTEKDMKKLVDVTAEFSKDINMRFGIDKCKTLHILRGKVRPGDYVVNNTDTIAAMEPTDLYKYLGYAQLKGLDHIRIKNTLTTEYKRRLHAICKTQLSSKYLIKAINTFAIPVLTYSFGVIKWTKTDTEQLERTTRTTLTKHNNLHPKSAIERLTVKRQHGGRGLIDIQHLWRKQVSRLKTFFYTKSRTSTIHKAIVINDLNYTPLNLSSQNESESTTNDDPQMQKIEEWKKKVFHGRHPHDLELSHINKLASNKWLKIGNLFPETEGFIIAIQDQIINTKNYRKFIIKDPTVTNDKCRKCHTQPETIQHITGACTTLTQTDYTHRHNQVANVIHQKIALKHALIQNTNTPYYNYTPQTILENTTHRLYYDRAILTDRTIHYNRPDITLQDKINKITYLIDIAVPNTHNIQKTITEKISKSAELKDEVMRIWRQEKVYVVPIVLSTTGVIPNHLLHSLKLLDLKENLYITLQKAAILNTCRIVRKFMQIEENEVGPHHTTN

SEQ ID NO: 21464 - protein, 1314 aa, Xestia c-nigrum
METRSKSKRIGPLPGGDRRGAPGADAGCHSMRSVSGEELNRRAPTDKDTTAEIIDDGDRLTDRTDTPVEPYSPSTVSYTPSRRSSPSIPSSPTLSSPPINSLNTVPPTPTLTAARGVSTFLPASTKAGKARVRMRWSKEVNLFIMRTYFHITKLETDMTTYRQQLHELFTRQYPEITVSEQRISDQRRAIVRNKLLSQEIIDQIKEETRIQLEADDNATPLLQNVTDIVQQSHTLPYTQLQPSIQSQFYNQSQANTQTSHTSTQTEYITLTLENDIETLAVENNNLTTDTYIQEIHDKFRTTLAQYSGMDPAIRPRLPKLRYSPKLFRLVNLFNENILNQFISDETQLNDIHTLIYCTAVVISEELNFKITKNTVQTRPKQNIKPAWQQRLEKDIEKLRADIGRLTQYINNNRSSKVVRRVEAIFRSHLIHTRHEQNNKKPEEFLDTIKQKLALKVHRLRRYKKAQQRKNDNAIFATNEKIFYRNLNKPNTDTNHDSNTDTPDKPTKEQLESYWSSIWEEQAQHNDKATWITEEETKWRAIREMEFIEITEADITHITGRLHNWKTPGIDKVHNFWFKKLTSLYKPIASNLTQIILGQQNTPEFIATGITYMLPKTKNAPHPSQYRPITCLPTIYKILTSAITMKINKHIEQHNIMAEEQKGCRRGHMGCKEQLIIDSTIHKHATTKNRNLHCTYIDYKKAFDSVPHSWLIEILKIYRVNSKIIEFLSNIMTQWKTTLQINCNQNNVTTRQIFIRKGIYQGDSLSPLWFCLALNPLSHLLQRCGAGYCLKHTTEQTSISHLIYMDDIKLYAQTEKDMKKLVEATADFSQDINMQFGLDKCKTLHIIRGKIRPGNYAVNSTDTITAMEPSDLYKYLGYTQLKGLDHVRIKETLTVEFKRRLNAICKTQLSGKNLIKALNTFAIPILTYSFGVIKWTKTDTEQLERTTRTTLTKHNNLHPKSAIERLTIKRQNGGRGLIDIQHLWRKQICRLKTFFHSKSQTSNIHKAIVQNDQNYTPLNLNEQSDTSQIIIEDPQTQKIDDWKKKVLHGRHPHDLEQSHVNKVASNKWLKIGNLFPETEGFIIAIQDQIINTKNYRKFIIKDPSVTNDKCRKCHTQPETIQHITGACTTLTQTDYTHRHNQVANVIHQRLAVKYSLLQDTNTPYYNYTPQATLENDTHKLYYDRAILTDRTIHYNRPDIILQDKINKVTYLIDIAVPNTHNIQKTITEKISKYAELKQEVIRIWRQEKVYVVPIVLSTTGVIPNHLLHSLKLLDLKETLYITLQKAAILNTCRIVRKFMQIEEHEIGPHHNTPST

SEQ ID NO: 21465 - protein, 1282 aa, Mimoniades ocyalus
MRRSLRIKNKNSAQSGAVAEITSNPSSPTTSTHSLFESPNSPPLSFENSMNSVNRSTTVSPISSNVEQIQNNTLPASVVARGANAFLPASTKAGKTRVRMKWNQDVNIFIMRTYYHITKLETDMTVYRKTLHELFSIQYPDVKVSEQRVSDQRRMIIKNRYLRQEILNKLKEEVSRQLQEEENINEINNDNTIVHQADRNILESQTHTVQNNSTQSYNLTQSHTQTSVPTSHSSTQTEFSTLLLETEFETIADLDPPSDASFQDMYDKLQRALIQFSGMDPTARPKLPRLKYTKHLNDLVHLFNQHILHRYISKETKLNDIHTLIYCTALVIAKELNFKIIHNTTHIKPKDYAKPSWQIRLERDIENLRADIGRLTQYINNNRSDRLLKKVQHIFNRITKHTKHESNNRKPEEFLDTLKQKLALKTHRLKRYKKTQQRKKDNTQFATNEKLFYRNLCKPKIDFTSKENNHTEIPTKEELENYWSNIWEENITHNDKADWITEEKDKWEVIDEMEFQEITERDIVNITARLHNWKSPGIDRVHNYWYKKLTTLHQPLARALTGIILGKQTIPNFITIGITYMLPKTNNSTQPSQYRPITCLPTIYKILTSVIASKITTHIEQHNVLAEEQKGCRRGHMGCKEQLVIDSVIHKHATLKHRNLHCTYIDYKKAFDSIPHSWLIKILQIYRISPIIIEFLRNIMPHWKTTLHLNQGNKSISTRKINIKKGIYQGDSLSPLWFCLALNPLSNLLHSCQTGYRFNNSSEETTISHLIYMDDIKLYAKTQKDMQKLLDTTTQFSNDINMQFGLDKCKTLHIIKGKIQPGDHIVNNTDVISAMESTDVYKYLGYIQSKGLLHTHIRQTLSTEFERRINAICKSHLSGKHLTKAINTYAIPILTYSFGVIKWTKTDIEQLERTTRTTLTKHNHLHPKSAVERLTIKRQDGGRGVIDINYLWQKQIGKLRRFFFMKSTTSNIHSTITHNDKNLTPLNLSDHTDQHPLNNRNPQLQKIEYWKNKVLHGRHPHDLEHAHIDKIASNKWLRVGNLFPETEGFMIAIQDQIINTKNYRKHIIKDPNIKNDKCRRCHTQPETIQHITGACTNLTQTDYTHRHNQVTNIIHQNLALKYELIQNTNTPYYKYTPQTVLENASHKLYYDRAILTDRTIHYNRPDIILQDKINKITYLIDIAIPNTHNIQKTIAEKINKYAELKEEVTRIWKQNRVYVVPIVLSTTGLIPYHLHQSLKLIDLTHSTYITLQKAAILNTCRIVRKFMQIEENEVGPHITPHS

SEQ ID NO: 21466 - protein, 1311 aa, Apodemia walkeri
METRSKYRKRIGPLPGGDRRGAPGADAGCHSMRTVSGVELSRRTPTGSSEFVTADLNDNTDRLTDIDYISINSISTIAEPYSPSTNSYIPSPVSSVEENPREIPTPTLAVAQEVNTLLPASTKAGKPRVRMAWNKDVNIFIMRTYYYITNLETDMTTYRKKLHEAFTLKYPEVKVTEQRISDQRRTIIRNKLLTDEVLNQLKDEIRIQLENETQNNTHTNITTHTNILQENIQSLQLQTKTQLITGIQSQLQQSRQTSDTYTQTETVTLTLENDIETFLDVIPITNSHEQELTDKFRSALIKYSGMDPALRPNLPKLQYSEKLSQLINTFNQKILIHFISDNTQLVDIHTLIYCTAVVTSEELKYKIIESGKNTNSKTKHNEKPSWQIRLEKDIEKLRADCGRLTQYIKNNRSNKVVKRVEAIFKSRTIHTRHENNNRKPEEFLDTLKQKLALKVHRLRRYKKAQQRKNDNILFNNNEKLFYRNLAKAHNDTLVNHRIEIPSQADLETFWSGIWEEQVQHNDKAHWIAEEENRWDAIREMEFHKITKLDITKVTARLHNWKSPGIDKIHNFWYKKLTSLHDSLAKNLTDIIVGKQNIPAFIATGITYLIPKNNYSVQPSQYRPITCLPTIYKILTSTITTKITTHIEQHLMMSEEQKGCRRGHMGCKEQLIIDSTIHKHATTKNRNLHCTYIDYKKAFDSIPHSWLLKILKIYKINSKIIKFLQNIMQHWKTTLHITGNNNSVATRQIFIRKGIYQGDSLSPLWFCLALNPLSNMLHGSRAGYCLKYTGQERVISHLIYMDDIKLYSKSEKDMKKLLDKTTEFSKDINMEFGIDKCRTLHIVRGKVRPGDYEIDDDTIISAMEPTDLYKYLGYKQLKGLDHTTIKHNLMAEYKRRLGSLCKTQLTGKRLIKALNTYAIPILTYSFGIIKWSKTDIENLERTIRTTLTKHNHLHPKSAIERLTIKRQNGGRGLIDIHHLWQKQIYNLKIFFQEKSQISNLHQAIICNDYNYTPINLSEPSNIRDPTNTDPQTQKIDSWKKKTLHGRHPHDLNQTHVDTIASNMWLKVRNLFPETEGFIMAIQDQVISTKNYRKHIIKDSSVTNDKCRKCHTQPETIQHITGACTTLTQTDYTHRHNQIANIIHQNLALKHQLIQNTSTPYYKYKPETVLENTTHKLYYDRAILTDRTIHYNRPDITLQDKTKKITYLIDIAVPNTHNIQKTITDKISKYTELKEEITRIWRQEKVYIAPIVISTTGVIPKQLHNSLKLIDLKDNLYITLQKASILNTCRIVRKFMQLEEDEISPHQSTESRT

SEQ ID NO: 21467 - protein, 1149 aa, Protographium marcellus
METRSKRNLRGPLPGGDRRGALGADAECYSLRSVSGEKLSRRALTGASQPEDATADNSGGNEHIERHRDSPTPALDVAQEVNALLPASTKAGKARVRMKWSNDINQFIMRTYYYVTKLETDLTIYRKKLHELFTIKYPNINISQQRIADQKRAIERNRLLSYDVLEKLKKEVKKQLEEEEEIYCANQGEHTERISQTISTYQCTPKSTQTATQTELTTLLIENDIQILDSNPHPETESHTQELRAKFRTNLTLYAGMDPTTRPPLPKLKHSQKLTELIHFFNCNIIPEYTTPDMQLIDIHTIIYSTAVVISEELKYKITNRSDNRRSKTEHIPPWQRRLEEQIKKLRSDIGKLTQYINNNRSRKVVERVGAIFKHMTLHTRYESENRKPEEFLDTLKQKLALKAHRLKRYKKAQQRKHDNNTFATNEKLFYRNLAKPTTCSNHSDTETPTTSQLEEYWGRIWEDQTQHNDKADWISKEIQTCSTIDEMEFTDLTETEITDITAKLKNWNSPGVDKVHNFWYKKLTSLHKVIAINLTNIISGKQRIPEFIATGVTYMLPKNNYTADPSQYRPITCLPTIYKIITSIITRRINSHIEKNNIIAEEQKGCRRGHMGCKEQLIIDSIIMKHATSKNRNLHCTYIDYKKAFDSIPHSWLLQILEIYKINQTIINFLRNIMVKWTTTLHLNTSHNSIATRKIAIKKGIYQGDSLSPLWFCLALNPLSRQLHSERVGYRLKHDCTETLVSHLIYMDDIKLYARNYKEMEALIKTTSKFSIDINMQFGLDKCRTVHIIKGKVQPGDYQINNFNAITAMEPTELYKYLGFQQLKGLDHSSIKHSLKTEYKKRTNTICKRQLSGKHLIKAINTYAIPVLTYSFGIIKWTKTDIELIERITRTTLTKHNNLHPKSAIERLTIKRQDGGRGLIDIHHLWQQQVFKLKTFFEEKSESSIIHKAIALNDKNYTPLNLAERIELNNLNNRNPQERKVEDWKKKVLHGRHPHDLDQPHIDKIASNMWLKIGNLFPETEGFIIAIQDQIINTKNYRKFIIKDPTITDDRCRRCHTQPETIQHIAGACPNLTQTDYMHQHNQLVNIIHQKLAYKHHLIQNIKTPYYKYTPQNVLENDSYELYYDRSILTDRNIHYSRPDITLQDKIK

SEQ ID NO: 21468 - protein, 1273 aa, Arctia plantaginis
MQNKTNKYNLRPLPGGRRDSIRNNNINNQTDRQTDIDNISLNSLTSLSVTEPYSPSTSSYRPTPVSFVDEDSHETPNPTLAVTQEVNAFLPASTKSGKPRVRMRWSKEVNLFIMRTYYQITKLETDMTTYRKQLHELFTRHYPDINVTEQRIADQRRTIVRNKLLTEETLHILKEEIRMQLQQNEHIYEYIENNSNPQLHNTQSVTTALPTQSQPHTITQSSHISTQPETITLTLENDIEIMQNFNPSSDNIQKIQEKFRTALALYSRMDPITRPKLPKLKYSRKLSELTHVFNHNILHQFLSEDTQLTDIHTLIYCKALVISEELNYKIIDHPRNIQRKNSKPPWQIRLEKDIEQLRADCGKLTQYINNNRSNKIVKRVEQIFRRQCTHTRHENNNRKPEEYLDTLKQKLALKVHRLKRYKKAQLRKNDNMLFTLNEKSFYRNLSKPQTATTRPENIDIPTQTQLETFWSGIWEEPVQHNDKADWITEEENKWNSIEEMEFDCITEDDIAHVTGKLHNWKSPGIDKIHNYWYKKITLFHKPIAKNLTYIILGKQIIPEFIGMGITYMLPKTAHSPQPSQYRPITCLPTIYKILTSAIAHKINMHIEHNHIIAEEQKGCRRGHMGCKEQLIIDSTIHKHATTKNRNLHCTYIDYKKAFDSIPHSWLLKILHIYKINPKITDFMRDIMSHWKTTLHLNMNDRTVTTRQISIKKGIYQGDSLSPLWFCLALNPLSHLLQRCQAGYRLRNSTEETIISHLIYMDDIKLYAKSDKEMTKLLQNTTKFSKDINMEFGLDKCKTLHIIRGKIRPGDYAVDESSTIAAMESTDLYKYLGYKQLKGLDHTSIKQILATEYKSRTNTLCKTQLSAKNLIKALNTYAIPILTYSFGIIKWTKTDIEQIERTTRTTLTKHNNLHPKSAIERLTIKRENGGRGLIDIYHLWQKQVYNLKTFFRTKSHTSNIHKAITLNDYNFTPLNLNDHTGIHNPNNIDPQADKIENWKKKVLHGRHPHDLEQPHIDTIASNSWLKIGNLFPETEGFIIAIQDQIVNTKNYRKYIIKDATVTDDKCRKCHIQSETIQHITGACITLTQTDYTHRHNQITNIIHQKLALKHHLIQNTNTPYYNYTPQSVLESSSHKLYYDRAILTDRTIHYNRPDITLQDKINKTTYLIDIAVPNTHNLQKTITEKISKYTELKEEIIRIWRQEKVYIVPIVLSTTGVIPKHLHHSLKLINLNESVYFNLQKAAILNTCRTVRKFMDIEENGTAQHTQQPPSTST

SEQ ID NO: 21469 - protein, 1323 aa, Noctua janthe
METRSKKKRIGPLPGGDRRGAPGADAGCLSMRTVSGEELNRRAPTDKDTTAEIIDDGDGLTDRTDTPVEPFSPSTVSYTPSRRSSPSIPSSPTLSSSPIISLNTVSPTPTLNAARGVSTFLPASTKAGKARVRMKWSKEVNTFIMRTYLYITKLETDMTTYRQQLHELFIRRYPEITVSEQRISDQRRTIVRNKLLSQEEIDKLKVEVRTQLHLESVIDEDTNNIAVTQNTIENIQQEQPQSYDQSEPYTQSQPYYYLSSQAYSQITHTSTQTENVTIMLENDIEVLANINQNPPTDTRIREIHDKFKTALTQYSGMDPAARPKLPKLRYTPKLAQLVHVFNQNILTQYISEDTQLTDVHTLIYCTALVISEELNFKITEYTGNARQSNVNKPAWQQRLEKDIEKLRADCGRLTQYINNNRSNKVVKRVEVIFKNMAVHTRHENHNRRPEEFLDTLKQKLALKVHRLRRYKKAQERKNDNALFATNEKNFYRKLQKPQTDTDTPTTENNIELPTTTQLETFWAGIWEEQIHHKETSEWIQDEETKWSSLEEMEFIELSESDITSVTARLHNWKSPGIDKIHNYWYKKLESLHKILAKNLTEIILGKQNIPEFIATGITYMLPKTHYSSQPSQYRPITCLPTIYKILTSAITTKINKHVEHHNIIAEEQKGCRRGHMGCKEQLVIDSIIHKHAATKNRNLHCTYIDYKKAFDSIPHSWLIQILHIYKINPQIIEFLRNIMSRWKTTLQLNYRNNAVTTRQIAIKKGIYQGDSLSPLWFCLALNPLSHLLQRCQAGYCLKQTTEETTISHLIYMDDIKLYSKTEKEMKKLIDITTEFSKDINMQFGLDKCKTVHIIRGKIKPGDYAINTTDTITAMEPTDLYKYLGYRQLKGLDHTTIKQTLNTEYKRRVVAVCKTQLSGKHLIKALNTYAIPILTYSFGVIKWSKTDIQQIERTTRTTLTKHNNLHPKSAIERLTIKRQNGGRGLIDIHHLWQKQISRLKTFFNSKSHTSNIHKAIVMNDNSYTPLNLNEQTDTQNTNNEDPQKQKLEDWKKKVLHGRHPHDLEQPHIDTLASNKWLKIGSLFPETEGFIIAIQDQIINTKNYRKFIIKDPTMTNDKCRKCHTQPETIQHITGACTTLTQTDYTHRHNQVANIIHQNLARKHKLIQDSNTPYYKYVAQPVVENTTHKLFYDRGILTDRTIHYNRPDIILQDKVNKVTYLIDIAVPNTHNLQKTIGDKISKYAELKEEVTRIWRQEKVYVVPIVVSTTGVIPNHLHHSLKLLDLKDSIYITLQKAAILNTCRIVRKFMQIDENEISHNSHTHTLR

SEQ ID NO: 21470 - protein, 1309 aa, Hydraecia micacea
METRSKRKRIGPLPGGDRRGTLGADAECFSMRTVSGEELNRRAPTDKDATAEVIDDGDRLTNRTDTPVEPYSPSTVSYAPSRTSSPSIPSSPIPSSSPITSFNTVSSTPALNVAREVSTFLPASTKAGKTRVRMRWSKEVNLFIMRTYLYITKLETDMTTYRQQLHERFSRQYPEISVSEQRISDQRRTIVRNKLLSQVELDQLKEEVSTQLQQELENYADTNTIILTQNTNINILQEQPQSLTQLHPNSQSLTYNQSQAYTQTIHTSTQTESLTLTLENDIETLVDADQNLATDSYIQEIQDKFRTTITQYSGMDPAVRPKLPKLKYTRNLFRLVNLFNKNILVQFISDDTQLIDIHLLIYCTAVVISEELNFKITDHTVTTRTNRIVKPAWQQRLEKDVEKLRADCGRLTQYINGIRSNKVVKRVETIFKNYSNHTRHESNNRKPEEFLDTLKQKLALKVHRLRRYMKAQQRKNDNATFAMNEKAFYRNIQKTHSDTTIENNTDAPSKEQLESYWSSIWEEQVQHNDKASWIAEEEAKWRAIDEMDFAEVAESDITHITARLHNWKSPGVDKIHNFWYKKLTSLHKSIAKNLTDIILGQQNTPEFIATGITYMLPKTKSSSQPSQYRPITCLPTIYKILTSAITKKISSHIENHNIIAEEQKGCRQGHMGCKEQLIIDSTIHKHATSKNRNLHCTYIDYKKAFDSVPHSWLIQILEIYRINPKIINFMRHIMLQWKTTLQINSNHSTVTTRQISIKKGIYQGDSLSPLWFCLALNPLSHLLQACRAGYCLKHNTEETKISHLIYMDDIKLYGKTEKDMKKLVEITAEFSKDINMQFGLDKCKTLHIIRGKVRPGDYAVNDTDTITAMEPSDLYKYLGYTQLKGLDHIRIKNTLTTEYKRRLNAVCKTQLSGKHLIKALNTFAIPVLTYSFGVIKWTKTDTEKLERTTRTTLTKHNNLHPKSAIERLTIKRQNGGRGLIDIQHLCRKQVSCLKTFFHTKSRTSNIHKAIVINDLNYTPLNLSDQIETQNTTNDDPQKQKIEEWKKKVLHGRHPHDLEQSHINQLASNKWLKIGNLFPETEGFIIAIQDQIINTKNYRKFIIKDPTITNDKCRKCHIQSETIQHITGACTTLTQTDYTHRHNQVANIIHQKLALKHSLIQNSCTPYYKYTPQTILENDTHKMYYDRAILTDRTIHYNRPDITLQDKIRKITYLIDIAVPNTHNLQKTISEKISKYAELKEEVTRIWRQEKVYVIPIVLSTTGVIPNHLLRSLKLIDLEESVYINLQKAAILNTCRIVRKFMQLEEENTP

SEQ ID NO: 21471 - protein, 841 aa, Hydraecia micacea
MKAQQRKNDNATFAMNEKAFYRNIQKTHSDTTIENNTDAPSKEQLESYWSSIWEEQVQHNDKASWIAEEEAKWRAIDEMDFAEVAESDITHITARLHNWKSPGVDKIHNFWYKKLTSLHKSIAKNLTDIILGQQNTPEFIATGITYMLPKTKSSSQPSQYRPITCLPTIYKILTSAITKKISSHIENHNIIAEEQKGCRQGHMGCKEQLIIDSTIHKHATSKNRNLHCTYIDYKKAFDSVPHSWLIQILEIYRINPKIINFMRHIMLQWKTTLQINSDHNTVTTRQISIKKGIYQGDSLSPLWFCLALNPLSHLLQACRAGYCLKHNTEETTISHLIYMDDIKLYGKTEKDMKKLVEITAEFSKDINMQFGLDKCKTLHIIRGKVRPGDYAVNDTDTITAMEPSDLYKYLGYSQLKGLDHIRIKNTLTTEYKRRLNAVCKTQLSGKHLIKALNTFAIPVLTYSFGVIKWTKTDTEKLERTTRTTLTKHNNLHPKSAIERLTIKRQNGGRGLIDIQHLCRKQVSCLKTFFHTKSRTSNIHKAIVINDLNYTPLNLSDQIETQNTTNDDPQKQKIEEWKKKVLHGRHPHDLEQSHINQLASNKWLKIGNLFPETEGFIIAIQDQIINTKNYRKFIIKDPTITNDKCRKCHIQSETIQHITGACKTLTQTDYTHRHNQVANIIHQKLALKHSLIQNSCTPYYKYTPQTILENDTHKMYYDRAILTDRTIHYNRPDITLQDKIRKITYLIDIAVPNTHNLQKTISEKISKYAELKEEVTRIWRQEKVYVIPIVLSTTGVIPNHLLRSLKLIDLEESVYINLQKAAILNTCRIVRKFMQLEEENTP

SEQ ID NO: 21472 - protein, 1316 aa, Noctua pronuba
METRSKRKRIGPLPGGDRRGTPGADAGCLSMRTVGGEELSRRAPTDKNTTAEIIDDGDRLTDRTDTPVEPYSPSTVSYTPSRRSSPSIPSPSVLSPPIISLNTVTPTPTLNAARGVSTFLPASTKAGKARVRMKWSKEVNLFIMRTYLHITKLETDMTTYRQQLHALFTRQYPEITVSEQRVSDQRRIIVRNKLLSHEVIDQLKEEVRTQLLQEETVNYIDANNITKNLSEISHQEQPQSLSQSQLIYSQSQPYNQSQAYTQISHTSTQTESITLMLENDIETIVVPDQQLTTDTYIQEINDKFRTTLTQYFGMDPAARPRLPKLKYTPNLFRLVNLFNESILTQFISDDTQLIDIHLLIYCTAVVISEELNFKITNHTGTPRTRQNLSPAWQQRLENDIEKLRADIGRLTQYINGCRSNKIVKRVEAIFRNNLTHTRHEKDNRKPEEFLDTLKQKLALKVHRLRRYKKAQQRKKDNATFATNEKMFYRNLHKPQTDTIDEINTNTPNLPTKEQLEEYWASIWEEPVQHNDKAAWIAEEEVKWRALDEMEFVEVAETDITHITARLHNWKSPGIDKIHNFWYKKLTSLHKSLAKNLTDIILGQQNTPEFIATGITYMLPKTKNSPQPSQYRPITCLPTIYKILTSAITKKISSHIEHHNIIAEEQKGCRQGHMGCKEQLIIDSTIHKHATTKNRNLHCTYIDYKKAFDSVPHSWLIQILEIYRINPKIIDFIRHIMLQWKTTLQITYNHNAVTTRQISIKKGIYQGDSLSPLWFCLALNPLSHLLQRCGAGYCLKHTTDETTISHLIYMDDIKLYAKTENDMKKLVDVTAEFSKDINMQFGLEKCKTLHIVRGKVRPGDYVLNDTDTISAMEQTDLYKYLGYAQLKGLDHTRIKNTLTNEYKRRVNAVCKTQLSGKHLIKALNTFAIPVLTYSFGVIKWSKTDTEQLERTTRTTLTKHNNLHPKSAIERLTIKRQHGGRGLIDIQHLWRKQVSRLKSFFHSKSRSSSIHKAIVINDLNYTPLNLSHQTETLNTTNDDPQQHKMEDWKRKVLHGRHPHDLEQSHINKLASNKWLKIGNLFPETEGFIIAIQDQIINTKNYRKYIIKDPTVTNDKCRKCHSQPETIQHITGACTTLTQTDYTHRHNQVANVIHQKLALKHTLIQNTSTPYYNYKPEVTLENITHKIYYDRAILTDKTIHYNRPDIILQDKINKVTYLIDIAVPNTHNIQKTITEKISKYAELKDEVTRIWRQEKVYVVPIVLSTTGVIPNHLLHSLKLLDLKESIYIILQKAAILNTCRIVRKFMQIEENEIGPHHNT

SEQ ID NO: 21473 - protein, 1310 aa, Noctua pronuba
METRSKKKRIGPLPGGDRRGTPGADAGCLSMRTVSGEELSRRAPTDKDTTAEIIDDGDRLTDRTDTPVEPYSPSTVSYTPSRRSSPSIPSSPTISSPPIISLSNVSPIPTLNAARGVSTFLPASTKAGKARVRMKWSKEVNTFIMRTYLHITKLETDMTIYRQQLHELFTRRYPEITVSEQRISDQRRTIVRNKLLSLEEIERLKVEVRLQLESENNEDINNSSITQNIFENTQQEQPQTVDQSEPYTQSLPYYQSQTYSQSTHTSTQTENVTIMLENDIEVLANIDQNSPTDTRVQEIHDKFKTALTQYSGMDPAARPKLPKLRYTPKLVQLVNCFNQNILTQYISEETQLIDVHTLVYCTALVISEELNFKITEYTGNTRQSNVNKPAWQQRLEKDIEKLRADCGRLTQYINNNRSNKVVKRVEVIFKNMAVHTRHENHNRRPEEFLDTLKQKLALKVHRLRRYKKAQERKNDNTLFATNEKNFYRKLQKPQTDTDTPTTENHTNNIELPTTEQLETFWAGIWEEQVHHKETSEWIQDEETKWSSLEEMEFMELSESDITSVTARLHNWKSPGIDKIHNYWYKKLESLHKILAKNLTEIILGKQNIPEFIATGITYMLPKTHYSPQPSQYRPITCLPTIYKILTSAITTKINKHVEHHNIIAEEQKGCRRGHMGCKEQLVVDSIIHKHAATKNRNLHCTYIDYKKAFDSIPHSWLIQILNIYKINSKIIEFLQNIMSRWKTTLQLNYRDNAVTTRQIAIKKGIYQGDSLSPLWFCLALNPLSHLLQRCQAGYCLKQTTEETTISHLIYMDDIKLYAKTEKEMKKLIDITTEFSKDINMQFGLDKCKTVHIIRGKIKPGDYAINTNDTIAAMEPTDLYKYLGYRQLKGLDHTTIKQTLNTEYKRRVVAVCKTQLSGKHLIKALNTYAIPILTYSFGVIKWSKTDIQQIERTTRTTLTKHNNLHPKSAIERLTIKRQNGGRGLIDIHHLWQKQITRLKTFFNSKSHTSNIHKAIVMNDNSYTPLNLNEQTDTQNTNNEDPQKQKIEDWKKKVLHGRHPHDLEQPHIDTLASNKWLKIGSLFPETEGFIIAIQDQIINTKNYRKFIIKDPTMTNDKCRKCHSQPETIQHITGACTTLTQTDYTHRHNQLANVIHQNLGLKHKLIQDTNTPYYKYVPQPVVENTTHKLFYDRGVLTDRTIHYNRPDIILQDKVNKVTYLIDIAVPNTHNLQKTIGDKISKYAELKEEVTRIWRQEKVYVVPIVVSTTGVIPNHLHHSLKLLDLKDSIYITLQKAAILNTCRIVRKFMQIDES

SEQ ID NO: 21474 - protein, 1324 aa, Mesoligia furuncula
METRSKRKRIGPLPGGDRRGALGADAECLSMRTVSGEELNRRAPTDKDATADIIDDGDRLTDRINTPVELYSPSTVSYTPSRPSTPSIPSSPSIPSSPPITSFNSVQPNSTLNVTREVSTFLPASTKAGKARVRMRWSKEVNLFVMRTYLYITKLETDLTTYRKQLHELFTRQYPEITVTEQRISDQRRIIVRNKLLSQDIINQLKEEVRTQLQGESENTAGAISIALTQNTTAYNQQQQPCSQTEPIIQSQPITQSQPYFQSQAYSETTHTSTQTESITIMLENEIETLADISINQSTDTHIQEIHDKFKTALTKYSGMNPAARPRLPKLRYTPKLSQLVHLFNQNILQQYISEETHLIDIHTLIYCTALVISEELNFKITEFTGNSRQRNINKPAWQQRLEKDIEKLRADCGRLTQYINNNRSNKVVKRVDAIFKNMATHTRHENDNRKPEEFLDTLKQKLALKVHRLRRYKKAQERKHDNSLFATNEKNFYRNLQTAQTNTNTLTTENNIELPTAEQLEIFWSGIWEEQVQHNNNSDWITDEETKWSSLEEMGFVELTESDITCVTARLHNWKSPGIDKIHNFWYKKLESLHKVLAKNLTQIILGKQNIPEFLATGITYMLPKAQYSSQPSQYRPITCLPTIYKILTSAITTKINKHIENHNIIAEEQKGCRRGHMGCKEQLVIDSIIHKHANTKHRNLHCTYIDYKKAFDSIPHSWLIQILQIYKINSKIIDFLQDIMARWRTTLQLNYRNNAITTRQISIKKGIYQGDSLSPLWFCLALNPLSDLLHRSQAGYSIKHTTEETIISHLVYMDDIKLYSKSEKEMKKLIDITTEFSKDINMQFGLDKCKTVHIIRGKIKPGDYPINNTDTITAMEPTDLYKYLGYKQLKGLDHSTIKYTLNSEYKRRVVAVCKTQLSGKHLIKALNTYAIPILTYSFGVIKWSKTDIQQIERTTRTTLTKHNNLHPKSAIERLTIKRQYGGRGLIDVHHLWQKQIAKLRTFFHSKSQTSNIHKAVVMNDISYTPLNLHDQIDIQHTSHEDPHKQKVEDWKKKVLHGRHPHDLEQSHIDTIASNKWLKIGNLFPETEGFIIAIQDQIINTKNYRKFIIKDPTITNDKCRKCHSQPETIQHITGACTTLTQTDYTHRHNQVANVIHQKLALKYKLIQDTNTPYYKYVPQTVLESTTHKLYYDRAILTDKTVHYNRPDITLQDKDNKNTYLIDIAVPNTHNVQKTISEKISKYADLKEEVSRIWRQEKVYVVPIVVSTTGVIPNHLHHSLKQIDLHDSIYITLQKAAILNTCRIVRKFMQIDENEITPHNINSS

SEQ ID NO: 21475 - protein, 1323 aa, Xestia c-nigrum
METRSKRKRIGPLPGGDRRGAPGADAGCHSMRSVSGEELSRRAPTDKDTTAEIIDDDDRLTNRTDTPVEPYSPSTVSYTPSRRSSPSIPSSPKLSSSPTISLNSVTPTLTLNAARGVSTFLPASTKAGKARVRMKWSKEVNTFIMRTFLHITKLETDMTTYRQQLHELFTRRYPKIAVSEQRISDQRRAIVRNKLLSLEDIDKLKAEVRSQLESENNIDTNNITITQNTFENNQQEQPQPYNQSEPYTLSLPCYQPQTYSQTTHTSTQTSETITIMLENDVQVLADTHQTQLTDMRTREIHDKFKTALTQYSGMDPVARPKLPKLRYSPKLIQLVNIFNQNILTQYISEETQLIDLHTLIYCTALVISEELNFKITEYTGKTRQSNVNKPAWQQRLETDIEKLRADCGRLTQYINNNRSNKVVKRVEIIFKNMAVHTRHENHNKKPEEFLDTLKQKLALKVHRLRRYKKAQERRNDNCLFATNEKNFYRKLQKPQTNTDTPTIENNIELPTTEQLETFWAGIWEEQVHHKETSEWIKGEETKWSSLVEMEFIELSESDIASVTARLHNWKSPGIDKVHNYWYKKLESLHQILAKNLTEIILGKQNIPEFIATGITYMLPKAQYSPQPSQYRPITCLPTIYKILTSAITSKINKHIEHHNIIAEEQKGCRRGHMGCKEQLVIDSVIHKHAATKNRNLHCTYIDYKKAFDSIPHSWLIQILQIYKINPKIIHFLQNIMSHWKTTLQLNYRQTAITTRQITIKKGIYQGDSLSPLWFCLALNPLSDLLRRCQAGYSFKHATAETVISHLIYMDDIKLYARSEKEMEKLIETTTEFSKDINMQFGLDKCKTVHIKRGKIKPGDYPINNTDTIAALEPTDLYKYLGYKQLKGIDHTAIKHTLNTEFKRRVIAVCKTQLSGKHLIKALNTYAIPILTYSFGVIKWSKTDIQQIERTTRTTLTKHNNLHPKSAIERLTIKRQNGGRGLIDIHHLWQKQITRLRTFFHSKSHTSTIHKAIVKNDINYTPLNLHEPTDTQHTSNDDPHKQKLEDWKKKVLHGRHPHDLEQPHVDTKASNKWLKIGSLFPETEGFIIAIQDQVINTKNYRKFIIKDPTITNDKCRKCHSQPETIQHITGACTTLTQTDYTHRHNQVANIIHQNLALKYKLIQDTNIPYYKYVPERFLENTTHKLFYDRAILTDRTIHYNRPDIILQDKTNKVTYLIDIAVPNTHNLQKTIGEKICKYAELKEEVTRIWRQEKVYVVPIVLSTTGVIPNHLHHSLKLLDQKDSIYISLQKAAILNTCRIVRKFMQIEDNASHNTQISSHTHTLH

SEQ ID NO: 21476 - protein, 1312 aa, Dendrolimus punctatus
MELRSKRKRIGPLPGGDRRGTPGADAGCLSMRTVSGEELNRRAPTDKDATAETRDDGDSLTVRTNTPIEPYSPSTVSYTPSKSSSPSVPSSPQTLSFNPDPPIPALNVAREASSFLPVSTKAGKSRVRMKWSKDVNTFIMRTYYHITKLETDMTTYRQQLHQRFSQQYPEVTVSEQRISDQRRVIERNKLLSQEILDQLREEVRLQLQEESEDNIGSNTMTLLQDADENIVQEQPQSYTQSQPILQSHPFYQSQAYTQTSHASSQTENLTFILENDIETLVIADQNLTTSTYIQEIQDKFTTTLTQYSGMDPAARPKLPKLRYSPNLYRLVNLLNEHILPQFLTNDAKLIDIHTLIYCTAVVVSEELNYKITEYTGNRRQRNNTKPPWQQRLEKDIEKLRADCGRLTQYINNNRSNKVVRRVEAIFKSNITHTRHENSNQKPEEFLDTLKQKLALKVHRLRRYTKAQQRRNDNTIFATNEKIFYRNLNKPTHNTIDENNTVTPTKENLETFWSNIWEEQVEHNDKVTWVTEEKTKWEGIDEMEFTEITELDITHITNKLHNWKSPGIDKIHNFWYKKLTSLHKSIAKNLTNIILGEQNIPDFIATGITYMLPKIQNSLEPSQYRPITCLPTIYKILTSAITTKINSHVEHHNIMAEEQKGCSRGHMGCKEQLIIDSTIHKHATTKNRNLHCTYIDYKKAFDSVPHSWLIKILEIYRISPKIIDFLRNIMPRWKTTLQINCNPNPITTRQISIKKGIYQGDALSPLWFCLALNPLSHLLQHCRAGYCLKNTTGNTSISHLIYMDDIKLYAQSEKEMKKLVDATAEFSKDINMHFGLDKCKTLHIIRGKIQPGDYVLNDTDTITAMESTDLYKYLGYTQLKGLDHVRIKNSLTTEYKKRLNAICKSQLSGKHLIKALNTYAIPILTYSFGIIKWTKTDTEQLERTTRTTLTKHNNLHPKSAIERLTIKRQNGGRGLIDIQHLWRKQIIRLKSFFHTKSHSSKIHNAIVLNDNNYTPLNLNDQTDTLNTNSNNPQAQKIEEWKKKVLHGRHPHDLEQSHINTLASNKWLKVGSLFPETEGFMMAIQDQIINTKNYRKYIIKDPAIRNDKCRKCHTQPETIQHITGACTTLTQTDYTHRHNQVANIIHQKLAGKYILIQDTNTPYYKYTPQTILENTTHKLYYDRAILTDKTIHYNRPDITLQDKINKITYLIDIAVPNTHNIQKTITEKISKYEELKDEVSRIWRQEKVYIIPIVLSTTGVIPNHLLHSLKLLGLKETLYITLQKAAILNTCRLVRKFLQIDENEIAPHNNTPST

SEQ ID NO: 21477 - protein, 1301 aa, Hyles vespertilio
METRSKKKLRGPLPGGDRRGTPGADAGCSSLRTVSGEELSRRTPTGSPENITADNDLDRLTDSRSNSPIEPYSPSTISYTPSTCESPSIPSSPPSNNIRDPPILALDAAREVNTFLPVTTKAGKPRVRMSWSKDVNLFIMCTYYYITKLETDMTIYRKQLHEHFSRQYPDIKVTEQRLSDQKRAIERNKLLSQDILDQLKEEVRRQLNVETDSSENTIPGLANTSPCDLPRNNQSQPLTQNTQIFNRESETINQSYNLITQTSHISTQTDGIILTVENDIDCLPEPNIITEKYIQELQNKIITTLTLYSGLDPASRPKLPKLKYNPKLNSLIQTFNQKILNNFISDSTKLIDIHTLIYCSALVIAEELGYKIIELTDNQTRPKHNNKPSWQYRLEKDIEKLRADCGRLTQYINNNRSKKVIKRVEEIFKHHKTHTRHENNNSKPEEFLDTLKQKLALKAQRLKRYKKSQNRIKDNILFTTNEKLFYRSIRNPHLDISNETPENPPTTEEVEHFWASVWEDQAQHNEKADWIKAEENRWSTIEEMEFIEITEADIKITTTRLHNWKSPGIDKIHNFWFKKFTTLHKAKNFTDIILRKQNIPQFFATGITYLLPKDKISSQPSQYRPITCLPTIYKILTSVITSKITTHIENHNIIAEEQKGCRRGHMGCKEQLVIDSVIHKHANTKNRNLHCTYIDYKKAFDSIPHSWLIHILKIYKINNNIIGFLQDIMPYWKTTLYLNSRNSTLMTRQINIKKGIYQGDSLSPLWFCLALNPQSHILHNCRAGYHLKHASGETTVSHLIYMDDLKLYAKSEKDMKKLIEATSDFSRDIDMHFGLDKCKTIHIVRGKIRPGDYTVNNSDTITAMEPNDLYKYLGYKQLKGIDHGTIKNSLSAEYKRRINAICKTQLSGKHLIKALNTYAIPILTYSFGIIKWSKTNIETIERTTRTTLTKHNLLHPKSAIERLTIKRQEGGRGLIDIHYLWKKQLNNLKTFFHAKSSTSNIHNAIIQNDNNFTPLNLQEENRLESADNMDSQKKKTEDWKKKVLHGRHPHDIEQTHIDTTASNKWLKIGNLFPETEGFIIAIQDQVINTKNYRKYIIKDPTITNDKCRRCHSQPETIQHITGACTSLTQTDYTHRHNQIASIIHQKLALKYKLIHDSKTPYYKYKPETVIENPSYKLYFDRAILTDRTIHFNRPDITLQDKRNKTTYLIDIAVPNTHNIQKTIAEKNNKYLDLKDEITRIWRQDKVYIVPIVLSTTGVIPKHLHHSLKLLNLNESLYITLQKASILNTCRIVRKFLQLDET

SEQ ID NO: 21478 - protein, 1311 aa, Biston betularia
METRSKRKRIGPLPGGDRRGTSGADAGCFSMRTVSGEELNRRTPTDKDITAETSDDGGRLTDRTNTPVEPYSPSTISYTPSRQSSPSIPSSPPRTSLNSVSPIPALNVARGANPFLPTSTKAGKARVRMRWSKDVNIFIMRTYFYITKLETDMTTYRQQLHELFTQQYPEVKVSQQRISDQKRAIVRNKLLSQEIIQQLKEETRIHLQEEEINSNASPLTQNITENTQQIQSQPLVQLVPNTQTQAYNYSQAHTQKSHMSTQTESIMLMLENDIETLVAVNQNLTTDNYVQEIHEKFITTLAQYSGMDPAARPKLPKLRYSTNLFRLVNLFNENILQQFISDDSQLIDIHTLIYCTAVVICEELNFKITEHTRNTRPRHNNKPPWQQRLETDIEKLRADCGRLTQYINNNRSNKVVRRVEAIFQSSDTHTTHENRNKKPEEFLDTLKQKLALKVHRLRRYKKAQQRKNDNAIFATNEKMFYRNLYNTHTNTNNTDTNAADTPTKEHLETFWSGIWEEQVQHNDKATWITEEETKWRAINEMEFVEITESDITHITSRLHNWKSPGIDKIQNFWYKKLTSLHKSIAKNLTDIVLCKQNIPEFMATGITYMLPKTKNSPQPSQYRPITCLPTIYKILTSAITTKISYHIEHNNIMAEEQKGCRRGHMGCKEQLIIDSAIHKHATAKNRNLHCTYIDYKKAFDSVPHSWLLQILEIYRINPKIIDFLRNIMSQWKTTLQINSTNSTVTTRQIFIKKGIYQGDSLSPLWFCLALNPLSHLLQRCLAGYCFKHTTEQTTISHLIYMDDIKLYAQTQKDMKKLVEATAEFSKDINMQFGLDKCKTLHIIRGKIQPGNYIVNNTDTITAMEPADLYKYLGYAQLKGLDHVRIKGTLTTEYKRRLNAICKSQLSGKHLIKALNTYAIPILTYSFGVIKWTKTDTEQLERTTRTTLTKHNNLHPKSAIERLTIKRQNGGRGLIDIQHLWRKQVSRLKTFFHTKSITSNIHKAIVLNDLNYTPLNLNEQTNIQHTNNDDPQIQKIEEWKKKVLHGRHPHDLEQSHVNTLASNRWLKIGNLFPETEGFIIAIQDQIINTKNYRKYIIKDPSVTNDKCRKCHVQPETIQHITGACTTLTQTDYTHRHNQVANVIHQKLALKYTLINDTNTPYYKYTPQTILENTTHKLYYDRAILTDRTIHYNRPDITLQDKINKVTYLIDIAVPNTHNIQKTITEKISKYAELKDEVTRIWRQEKVYVVPIVLSTTGVIPNHLLHSLKLLNLKETLYITLQKAAILNTCRIVRKFMQIEENDTGFHHNAPLT

SEQ ID NO: 21479 - protein, 1332 aa, Phlogophora meticulosa
MRNYWRGQRGSGNPVNMETRSKRKRLGPLPGGDRRGTPGADARCLSMRSVSGEELNRRASTDKDATAETSDDGDRLTDRTNTPVEPYSPSTVSYTPSRPSSPSIPSSPILSSPPIVSLNSIPPTPALNVAREVSTFLPTSTKAGKARVRMRWSKEVNLFIMRTYLHITKLETDMTTYRQQLHAHFTRQYPEITVTEQRISDQKRIIIRNKLISQEVLDKLKEEIRTQLLQEESVNNIDTETIIQDTNENSFQEPPQLQYINSQSRTYNPSQAYTQTSHTSTQTEYITLTLENDIETLVIPDQNITTDTYIQEIVDKFRTTIALYSGMDPAARPKLPKLRYTPNLFRLVNLFNDNILIQFLYEDAHLLDIHLLIYCTAVVISEELNFKITDHTGTTRTRHNIKPAWQQRLENDIEKLRADCGRLTQYINGSRSNKIVKGVETIFRNTFTHTKHENSNRKPEEFLDTLKQKLALKVHRLRRYKKAQQRKNDNAMFATNEKMFYRNLHKSHTNTNNENDTDTPGQPTKEQLESYWSRIWEEQVQHNDNAPWIVTEKAKWRIIDEMEFLEVAEVDITHITARLHNWKSPGIDKIHNFWYKKLTSLHKYIAKNLTDIILGQQNTPEFLATGITYMLPKAKNTHQPSQYRPITCLPTLYKILTSVITKKINIHIEHNNIISEEQKGCRRGHMGCKEQLIIDSTIHKHATTKNRNLHCTYIDYKKAFDSVPHSWLIEILKIYRINPKIIDFLRRIMLQWKTTLQINCGKNTVATRPISIKKGIYQGDSLSPLWFCLALNPLSHMLQSCKAAYYFKHTTEKTAISHLIYMDDIKLYANTEKQMKKLVDVTAEFSKDINMQFGLEKCKTLHIVRGNVRPGDYAVNSTDTITALEPTDLYKYLGYAQLKGLDHVRIKETLTTEYKRRLNSVCKTQLSGKKLINAVNTFAIPILTYSFGVIKWTKTDTEQLERTTRTTLTKHNNLHPKSAIERLTIKRQHGGRGLIDIQHLWQKQVSRLKAFFHTKSRTSNIHKTIVTNDLKYTPLNLNDHIDTENITNVDPQVQKIDDWKKKVLHGRHPHDLEQPHINKLASNKWLKIGNLFPETEGFIIAIQDQIINTKNYRKYIIKDPTLTNDKCRKCHTQSETIQHITGACTTLTQTDYTHRHNQVANVIHQQLALKYTLIRNTNTPYYNYTPQTILENTTHKLYYDRAILTDKTIHYNRPDITLQDKINKITYLIDIAVPNTHNIQKTITEKISKYAELKDEVTRIWRQEKVYVVPIVLSTTGVIPNHLPHSLKLLNLKETLYITLQKAAILNTCRIVRKFLQIDENEIGPHHNTSPT

SEQ ID NO: 21480 - protein, 1324 aa, Mesoligia furuncula
METRSKRKRIGPLPGGDRRGALGADAECLSMRTVSGEELNRRAPTDKDTTADIIDDGDRLTDRINTPVEPYSPSTVSYIPSRPSTPSIPSSPSIPSSPPITSSNSVQPNSTLNVTREVSTFLPASTKAGKTRVRMRWSKEVNLFIMRTYLYITKLETDLTTYRKQLHELFTRQYPEITVTEQRISDQRRIIVRNKLLSQDIINQLKEEVRTRLQGESENTAGAITTALTQNITAYNQQEQPCSQIEPIIQSQPITQSQPYFQSQAYSETTHTSTQTESITIMLENEIETLADININQSTDTHIQEIHDKFKTALTQYSGMDPAARPRLPKLRYTPKLSQLVHLFNQNILQQYISEETHLIDIHTLIYCTALVISEELNFKITEYTGNPRQRNINKPAWQQRFEKDIEKLRADCGRLTQYINNNRSNKVVKRVDAIFKNMATHTRHENDNRKPEEFLDTLKQKLALKVHRLRRYKKAQERKHDNSLFATNEKNFYRNLQTAQTDTNTLTTENNIELPTAEQLETFWSGIWEEQVQHNNNSDWITDEETKWSSLEEMEFVELTESDITCVTARLHNWKSPGIDKIHNYWYKKLESLHKVLAKNLTQIILGKQNIPEFIATGITYMLPKAQYSPQPSQYRPITCLPTIYKILTSAITTKINKHIENHNIIAEEQKGCRRGHMGCKEQLVIDSIIHKHANTKHRNLHCTYIDYKKAFDSIPHSWLIQILQIYKINSKIIDFLQDIMARWRTTLQLNYRNNAITTRQISIKKGIYQGDSLSPLWFCLALNPLSDLLHRSQAGYAIKHTTEETIISHLIYMDDIKLYSKSEKEMKKLIDITTEFSKDINMQFGLDKCKTVHIIRGKIKPGDYPINNTDTITAMEPTDLYKYLGYRQLKGIDHSTIKYTLNSEYKRRVIAVCKTQLSGKHLIKALNTYAIPILTYSFGVIKWSKTDIQQIERTTRTILTKHNNLHPKSAIERLTIKRQCGGRGLIDVHRLWQKQIAKLRTFFHSKSHTSNIHKAVVMNDISYTPLNLHDQIDIQHTSNEDPHKQKIEDWKKKVLHGRHPHDLEQSHIDTIASNKWLKIGNLFPETEGFIIAIQDQIINTKNYRKFIIKDPAITNDKCRKCHSQPETIQHITGACTTLTQTDYTHRHNQVANVIHQKLALKYKLIQDTNTPYYKYVPQTVLESTTHKPYYDRAILTDKTVHYNRPDITLQDKDNKVTYLIDIAVPNTHNVQKTISEKISKYADLKEEVSRIWRQEKVYVVPIVVSTTGVIPNHLHHSLKQIDLHDSIYITLQKAAILNTCRIVRKFMQIDENEITPHNINSS

SEQ ID NO: 21481 - protein, 1147 aa, Xestia c-nigrum
MNKGNNKITVSEQRISDQRRIIVRNKLLSQEVIDQLKEEVRTQLLQEETVTDTNNITQNISEISNQEQPQSLNQSQILYSLSPYNQSQAYTQNISHTSTQTESTTLTLENDIETIVTPDQHLTTDTYIQEIIDKFRTTITQYSGMDPAARPRLPKLKYTPNLFRLVNLFNETILTQYISDDTQLIDIHLLIYCTAVVISEELNFKITNHTGNPRTRPNIVPAWQQRLEKDIEKLRADIGRLTQYISGCRSNKLVKKVEIIFRNNLTHTRHEQNNRKPEEFLDTLKQKLALKVHRLKRYKKAQQRKNDNAIFTTNEKVFYRNLHITKNDRNYENNTNTPNLPSKEQLGTYWAGIWEEQKQHNDKASWIADEETKWRDIDEMEFVEVTESDITHITARLHNWKSPGIDKIHNFWYKKLTALHKSLAKNLTDIVLGKQNIPKFITIGITYMLPKTKYTSEPSQYRPITCLPTIYKILTSAITKKINSHIIHHNIIAEEQKGCRQGHMGCKEQLIIDSTIHKHATSKNRNLHCTYIDYRKAFDSVPHSWLIQILEIYRINPKIIDFIRHVMLQWKTTLQINSSNNNVTTRQISIKKGIYQGDSLSPLWFCLALNPLSHLLQGCGAGYCLKHSTDETTISHLIYMDDIKLYAKSEKDMKKLVDITAEFSRDINMQFGLEKCKTLHIVRGKVRPGDYAVNESDSITALEPTELYKYLGYTQLKGLDHVKIKETLTTEYKKRVNAVCKTQLSGKNLIKALNTFAIPVLTYSFGVIKWTKTDTEQLQRTTRTTLTKHNNLHPKSAIERLTIKREHGGRGLIDIQHLWRKQISRLKSFFHTKSHNSNIHKAIVTNDLNYTPLNLSDQIEAQNTTNEDPQTQKIEDWKRKVLHGRHPHDLEQSHINKLASNKWLKIGNLFPETEGFIIAIQDQIINTKNYRKYIIKDPTVTNDKCRKCYLHPETIQHITGACTTLTQTDYTHRHNQVANVIHQKLAIKHTLIQNTNTPYYNYKPEATLENTTHKLYYDRAILTDRTIHYNRPDLILQDKIKKVTYLIDIAVPNTHNIQKTITEKISKYAELKEEVTRIWRQEKVYIVPIVLSTTGVIPNHLIHSLKLLDLKETLYITLQKAAILNTCRIVRKFMQIEENEIGPYHNT

SEQ ID NO: 21482 - protein, 1281 aa, Heliconius pardalinus
METRLQKKLRGPLPEGDRRGTPGADAGCFSMRTVGGLELNRRAPTDKYTTAEHTSQPNSPIEPYSPSSESYTPSISSSPSSNHTVEHVPTLSVAQEANAFLPASTKAGKPRVRMRWSSEVNMFIMRTYYRITKLETDFSTYRQRLHELFCQKYPYITVSEQRVSDQRRTIVRNRLVPQDLLNQIKEEVKCEIELEEIEMDNITRNQNQSNLVSQAAVSQVGEQSQNYFNTQTTQTSTQTESLNYLIENEIETLIVPTNYTDEFITNLREKLTTTLNLFSGLDPTIRPNLPKLKYTHKLTELIQIFNFKILGNYNSNDIQLIDIHTLIYCTALVIGEELGYKIIQRTDTGQRKKYKNKPSWQIRLEKSIEKLRVDIGRLTQYINSNRSQKVVKTVMKIFRNTTLHTKHENDNQKSEEFLDTLKQKLALKSHRLKRYKKAQKRKDDNILFQTREKSFYRQLLKPDHICQDSNNESIPTETQLVTYWSNIWEQESKHNENAEWILEEINKYKTIDEMNFTEITEAEIFKITTKLHNWKSPGADKVHNFWYKKLTIFHKAIAKNLTEIIFKKQNIPNFMATGVTYMIPKGKFSPDPAQYRPITCLSTIYKILTSVLTSKITSHIEKYNIVAEEQKGCRRGHMGCKEQLIIDSTIHKHATTKNRNLHCTYIDYKKAFDSIPHTWLIQILKIYKISPFIIEFLNIIMSQWKTTLQLNYNSTTVRTRHILIKKGIYQGDSLSPLWFCLALNPLSNLLQNSRLGYSFSSRSRNSLISHLIYMDDIKLYAKTHTDMKQLIDITTEFSNDIKMQFGLDKCKALHIIKGKIQEGNYLINDHDIITALESDDIYRYLGYNQLKGLDHTNTKQFLTTQFKNRLYAICKAQLSGKNLIKAINTYAIPILTYSFGIVKWTKTDIDNLERSIRTILTKHNYLHPKSAIERLSIKRSHGGRGIINISTLWQNQIKSLQKFFIYKSNSSIIHKIIKDNDHNYTPLNLEEITACQNNQHTDPQKQLIENWKSKVLHGRHPHDMEQAHIDSVGSNMWLKVGNLFPETEGFIIAIQDQIINTKNYRKYIIKDSKVTNDKCRRCHSQPETIQHITGACSNLTHSDYTHRHNQISNIIHQQLAHKYKFITNFDTPYYKYIPETILENSTHKIYYDRAVLTDRTIHFNRPDIILQNKIDKITYLIDIAVPNTHNLQKTIAEKINKYEELKEEVTRIWKQKTVYIVPIVLSTTGVIPKHLHHSLNILNLKRTTYITLQRAAILNTCRIVRKFLQIDEQSTNTPQVQ

SEQ ID NO: 21483 - protein, 1299 aa, Spodoptera frugiperda
METRSKRKRIGTLPGGDRRGTPGADAGCFSIRTVSGAELSRRAPTNKDTTADISDDGDTQTNRSNTPLEPYSPSTISYTPSRSSSPSIPSSPVSHTVSLTPALDVARGANAFLPASTKAGKPRVRMKWSKEVNIFIMRTYFYITKLETDMTIYRKVLHELFCRQYPDVNVSEQRISDQRRTIVRNKLLSQHIIDQLKEEARQQLEAESNSSNSTDLMTQNMQTNQQTHPLTQTHPLTQTQPSNTQSQPYDYTQTTHSSTQTESVTLTLDNDIDTLTPVEQASITNEHTQQIYDKFKTTLTQYAGMDPASRPRLPKLPYNRNLFRLVNLFNESIIADFISNDSQLTDIHTIIYCTAVVISEELNFKITEHTENRTPRTNMTPPWQQRLEKSIEKLRADCGRLTQYINNNRSNKVVKRVEAIFKNTRIHTRHENNNRQPKEFLDTLKQKLALKVHRLRRYKKAQQRRNDNTIFTTNEKIFYRKLNTPRTNITDDQNMTPSKEQLEEFWAGIWEESVSHNDRAAWVTEEETKWIGIDEMEFIEITESDIANVTARLHNWKSPGIDKLHNFWYKKLTILHKYIAKNLTEIVLGKQSIPEFIATGITYMLPKAKHSPSPSQYRPITCLPTIYKILTSAVTIKINSHIEQHKIMAEVQKGCRRGHMGCKEQLIIDSTIHKHATSKNRNLHCTYIDYKKAFDSIPHSWLLKILEIYRINHQIIDFLRNIMFQWKTTLQIRTNNNIVTTRPITIKKGIYQGDSLSPLWFCLALNPLSHLLQRSQAGYCLKHSSEETTISHLVYMDDIKLYAKTEKEMKILVDITAKFSRDINMQFGLDKCKTLHVVRGKIQPGDYVVNNTDTISALEPTDLYKYLGYTQLKGLDHIKIKNSLTVEYKRRINAICKTQLSGKHLVKAINTFAIPILTYSFGIIKWTKTDTEQLERTIRTTLTKHNNLHPKSAIERLTIKRQNGGRGLIDIHYLWQKQISKLKTFFHTKSQSSKIHKAIVMNDLNYTPLNLSEQIDAETPNQNDPQKEKLETWKRKVLHGRHPHDLEQAHINTIASNKWLKIGSLFPETEGFIIAIQDQIINTKNYRKYIIKDPTVTNDKCRKCHTQPETIQHITGACTTLTQTDYTHRHNQIVNVIHQKLALKYTLIQNTNTPYYKYTPETALENTTHKLYYDRAILTDRTIHYNRPDITLQDKINKVTYLIDIAVPNTHNIQKTITEKITKYAELKDEISRIWKQNKVYVVPIVLSTTGVIPNHLLHSLKLLDLKETLYITLQKAAILNTCRIVRKFMQIEETETNH

SEQ ID NO: 21484 - protein, 1204 aa, Meandrusa sciron
METRLKCKLRGPLPEGNRRGTPGADAGCFSMRTVSGEELSRRAPTDKDTTAETTDDSDRPLPMPSSSRDSTILDTVPPIPALDVARGVNTFLPASTKAGKPRVRMRWSKETNIFIMRTYFRITKLETDMTTYRQQLHGLFTQQYPEITVTEQRISDQRRIIVRNKLLPQEIIEQLKEEVRIHLQEEENNTNTLPTLENINEYTQIQSQPHTQMAINTQSQPYNHTLISHSSTQTESITVMLENDIETLIDTDQNIDTDVNILEISNKFRATLIQYSGMDPAVRPKLPKLKYSPKLFRYVNLFNEHILKQFISDDTQLTDLHTLIYSTAVVISEELNFKITEYTRNTKHKHNIKPPWQQRLEKDIEKIRADCGRLTQYINNNRSNKVVKRVEAIFQNSVIHTRHEKVNRTPEEFLDTLKQKLALKVNRLRRYKKAQQRKNDNAIFATNEKLFYRNLHKLHIKTHNKNNVDTNNTDTNNTGTNNTGTNNTGTNPETPTKEQLESYWSSIWEEQVQHNDKATWITEEEQKWRAIDEMEYVEITESDISNITARLHNWKSPGIDKIHNFWYKKLTSVHKSLAKNLSDIIIGKQNIPKFIATGITYMIPKSKNTSHPSQYRPITCLPTIYKILTSTITAKINSHVEHHKIMAEEQKGCRRGHMGCKEQLIIDSTVHKYASTKNRNLHCTYIDYKKAFDSVPHSWLLQILQIYRINSKIITFLGNIMAQWNTTLQINIDQNTIMTRQISIRKGIYQGDSLSPMWFCLALNPLSRLLQQCEAGFYLKHRTGKINISHLIYMDDIKLYAKTEKDMKKLVEVTSDFSKDINMQFGLDKCKTLHIVRGKIRPGNYAVNNTDTITAMEPTDLYKYLGYTQLKGLDHVRIKNTLTTEYKRRLNSICKSQLSGKHLIKALNTYAIPILTYSFGVIKWTKTDTEQLERMTRTTLTKHNNLHPKSAIERLTIKRQNGGRGLIDIQHLWRKQVKHLKTFFYTKSQTSKIHEAIVLNDLNYTPLNLNEQTDIQQLSTDEPQKQKIEDWKKKVLHGRHPHDLEQSHVHTLASNKWLKIGNLFPETEGFIIAIQDQIINTKNYRKYIIKDPSVTNDKCRKCHIQSETIQHITGACTTLTQTDYTHRHNQVANIIHQKLALKHTLIQNTNTPYYNYTPQTILENTTHKLFYDRAILTDRTIHYNRPDITLQDKINKITYLIDIA

SEQ ID NO: 21485 - protein, 1318 aa, Agrochola circellaris
METRSKRKRIGPLPGGDRRGAPGADAGCLSMRTVSGEELNRRAPTDKVATAEADDGDRLTNRTDTPVEPYSPSTVSYAPSRTSSPSIPSSPIQSSPPIPSFNTVTSTPALNVAREVSTFLPASTKAGKSRVRMRWSKEVNLFIMRTYLYITKLETDMTTYRQQLHELFTRQYPEITVTEQRISDQRRAIVRNKLLSKEIIDQLIDEVRTQLLEESENIEGAITIALTQNAIEHNPQEQPQPYTQPQPITQSQPYFQSHAYSQTTHTSTQTESITIMLENEIETLVDNNQNQSTDTHIQEIHDKFKTALTQYSGMDPATRPKLPKLRYTPKLFHLVNLFNQNILNQYISEETQLIDVHTLIYCTALVISEELNFKITEYTGNTRQGNVNKPAWQQRLEKDIEKLRADCSRLTHYINNNRSNKVVKRVETIFKNMSTHTRHENDNRKPEEFLDTLKQKLALKVHRLRRYKKAQERKNDNSLFASNEKNFYRKLQKPQTDTETPTAENNIELPTADQLETFWSSLWEEQVQHNAQSDWISDEETKWSSLEEMEFIELTESDIGSITARLHNWKSPGIDKIHNYWYKKLDSLHKVLAKNLTEIILGKQNIPEFIATGITYMLPKKQYSPQPSQYRPITCLPTIYKILTSAITTKINKHIEHHNIVAEEQKGCRRGHMGCKEQLVIDSIIHKHAATKNRNLHCTYIDYKKAFDSIPHSWLIQILQIYKINSKIIDFLQNIMSRWKTTLQLNYRHNTITTQQISIKKGIYQGDSLSPLWFCLALNPLSHLLHRCQAGYSLKHTTEETVISHLIYMDDIKLYAKSEKEMKKLIDITTEFSKDINMQFGLDKCKTIHIIRGKIKPGDYPVNNTDTITAMEQTDLYKYLGYNQLKGIDHTAIKHTLNTEYKRRVIAVCKTQLSGKHLIKALNTYAIPILTYSFGVIKWSKTDIQQIERSTRTTLTKHNNLHPKSAIERLTIKRQYGGRGLIDVHNLWQKQIAKLRTFFHSKSHTSNIHKAVIMNDIRYTPLNLHEQIDTQDTSNNDPHKQKIEDWKKKVLHGRHPHDLEQSHIDTIASNKWLKIGNLFPETEGFIIAIQDQIINTKNYRKFIIKDPTITNDKCRKCHSQPETIQHITGACTTLTQTDYTHRHNQVANVIHQKLALKYKLIQDTNTPYYKYIPQVILENTTHKLYYDRAILTDRTVQYNRPDITLQDKVNKVTYLIDIAVPNTHNLQKTIGEKISKYADLKEEVTRIWRQEKVYVVPIVVSTTGVIPNHLHHSLKLIDLKDSIYITLQKAAILNTCRIVRKFMQIEENEITPHNINST

SEQ ID NO: 21486 - protein, 1296 aa, Pararge aegeria
METRSKRKRIGPLPGGNRRGAPGADAGCLSMRTVSGEELNRRAPTDKNTTAEVIDDDDRLTDRTNTPIEPYSPSTISYTPSSRTSSPSLPSSPPIAILNANPSIQTLNVAREASTFLPASTKAGKARVRMKWSREVNIFIMRNYLYITKLETDLTTYRQRLHELFKEQYPSIIVSEQRISDQRRAIVRNKLLPQDIIDQLKIEIRRQLEEESKSNTDTNTAALTQTRSQNIQQIQPLQPNTQQQTYNQLQPYSQTSHTATQTETIILTIENDVEHLDNTDRNTISEKYVQEILNKFKTAITQYSGMDPAARPKLPKLKHSPNLFRLVNIFNESILYQFMSIDTQLIDIHTVIYCTALVISEELNFKITEYTENSRSRHNNKPPWQQRLEKDIEKLRADCGRLTQYINNNRSNKVVKRVEAIFKSNFIHTRHENSNTKPEEFLDTFKQKLALKVHRLRRYKKAQQRKKDNAIFATNEKMFYRNLNKPHTDRISDEKIEHLENFWSGIWEQQVEHNNEAAWITEEDFKWRGIDEMEFKEFTESDITIITARLHNWKSPGIDKIHNFWYKKLTSLHKIIAKVFTDIVLGRQNIPEFIATGITYMLPKTKYTTQPSQYRPITCLPTIYKILTSAITTKINLHVERHNIIAEEQKGCRRGHMGCKEQLVIDSTIHKHATAKNRNLHCTYIDYQKAFDSIPHSWLIKVLEIYKVNPKIIIFLRSIMSHWKTTLQLSNRLNTLVSRQIYIRKGIYQGDSLSPLWFCLALNPLSDLLHKCRAGYSFKHNSKETIISHLIYMDDIKLYAKSENEMKNLINITTEFSQDINMQFGIDKCKAVHIIKGKIKSGDYIINENDTISSMETTDLYKYLGYKQLKGIDYTAVKQTLNTEYRRRINAICKTQLSGKHLIKALNTFAIPILTYSFGVIKWSKTDIEQIERITRTTLTKHNNHHPKSAVERLTIKRQNGGRGLIDIYHLWQKQISRLRTFFHSKSLTSDIHKAITIMDLNYTPLNLNEKIDTQNTSITDPQKQKLENWKKKVVHGRHRHDLEQPHINTVASNKWLKIGNLFPETEGFIIAIQDQIINTKNYRKYIIKDSTITSDKCRRCHIQSETIQHITGACTTLTQTDYTHRHNQVANIIHQKLAFKHMLTQNTNTPYYKYTPQTILENTTYKLYYDRAILTDKTIHYNRPDIILQDKLRKTTYLIDIAVPNTHNIQKTVSEKICKYTELKEEITRIWKQAKVYVVPIVISTTGVIPNSLLHSLKIIGLEESLYIGLQKAVILNTCRIVRKFLQVDESIGLT

SEQ ID NO: 21487 - protein, 1297 aa, Lymantria dispar
MALETHSMEMLLRSKRIGSLPGGDRWGTPRADAGCDSIRTVSGKELNRRAPAGSPEDTTANYTDTVSLNSNQSIAEPFSPSTSSYAPSPTTSMELNSHGTLSPALTAAQGVNTFLPASTKAGKPRVRMRWSQETNIFIMRTYFYVTKLETDMTTYRKQLHEAFSHQYPDIKVTEQRVADQRRTIIRNKLLSTNTLEQIKEEVRIQIQESENIKHSNNLNIFTQNSTLEEDRFHTQSKNTQTSHTATQTESQLFLLENEVDISIDHTPTLDISSQEIYDKLKTTLIQFSGMNPTARPKLPKLRNSYKLSQLIRLFNQNILNRFLSNDTKLVDVHTLIYCTAMVISKELKYKITEMTFNSRRKDSQKPPWQIRLERDIEMLRADCGRLTQYINNNKSRKVVKRVEAIFKSKVMHTKHENDNRKPEEFLDTLKQKLALKVHRLKRYKKAQQRKNNNILFKSNEKIFYKNLAESKLDKAQNTETPTQSQFESFWAGIWEDNTQHNTEAGWIFEEENKWNTIEEMEFNEITELDIANITAKLHNWKSPGPDNVHNYWYKKLTALHHILAKNLTEIILGQQNIPQFIAKGITYMIPKTNTYSPEPSQYRPITCLPTIYKILTSAIARKITTHIEHHQIIAEEQKGCRQSHMGCKEQLVIDSTIHKHATTKNRNLHCTYIDYKKAFDSIPHTWLLKILDIYKISPKITKFIQNIIPMWKTTLQLNINEKTVTTREISIKKGIYQGDSLSPLWFCLALNPLSHLLHRTKAGYSLKDTTDTTIISHLIYMDDIKLYAKTEKEMKNLIQTVTRFSKDINMEFGLDKCKTLHIVKGKIRPGDYVIDHNIITAMETTDLYKYLGYEQLKGLEHTAIKCTLTTEYKRRINTICKTQLTSKNMIKAINTYAIPILTYSFGVIKWSKTDIEQLERTTRTTLTKHNHLHPKSAIERLTIKRHDGGRGLIDIYNLWQKQIYSLKVFFNNKANTSKIHRAIKFNDHNYTPLNLYETQNTYSTPNNPQIQKLENWKKKTLHGRHCHDLEQPYIDAEASNKWLQIGYLFPETEGFIIAIQDQIINTKNYRKYIIKDPTILNDKCRKCHTQPETIQHITGACITLTQTDYTHRHNQIANIIHQTLAMKHSLIEKTHTPYYKYTPQIILENNTHKLYFDRALLTDKTIHYNRPDITLQDKISKITYLIDIAVPNTHNIQKTIAEKLNKYAELKEEIKRIWRQNKVYIVPIVLSTTGVIPKYLHHSLKLIGVKNTIYTTLQKAAILNTCRIVRKFMEIEETDITSHNQTLSLQHSRDQHS

SEQ ID NO: 21488 - protein, 1296 aa, Lymantria monacha
MALETHSMEMLLRNKRIGSLPGGDRRGTLGADAGCDSIRTVSGKELNRRAPAGSPEDTTANYTDTVSLNSAQLIAEPFSPSTLSYVPSPTSSMDQNSHGTLSPVLNVAQEVNTFLPASTKAGKPRIRMRWSQETNIFIMRTYFYITKLETDMTTYRKQLHEAFSQQYPDIKVTEQRISDQRRTIIRNKLLPTNTLHQIKEEVRIQLQEYENVNTNNTPNLSTQNSMFEEEPISQSNITSFRLRSQSQSQTFHIATQTDSQIFLLENEVDILTDHIPTLDISAQEMYDKLKTTLIHYSGMDPTARPKLPKLRDNYKLSQLVKVFNHNILNRFLSNDTKLVDIHTLIYCTALVISKELKYKITEITLNSRRKNIHKQPWQIRLEKDIELLRADCGRLTQYINNNRSKKVVRRVEAIFKSRVMHTKHENNNKKPEEFLDTIKQKLALKVHRLKRYKKAQQRKNDNILFKFNEKIFYKNLIGSKPDRAQNSEIPTQSQLESFWAGMWAENIQHNNEAGWITEEENKWRTIEEMEFNEITELDIANVTAGLHNWKSPGPDNIHNYWYKKLKSLHHIIAKNLTEIILGKQTVPQFIAKGRTYMIPKTNTYSAQPSQYRPITCLPTIYKILTSAIARKITTHIETHKIIAEEQKGCRQGHMGCKEQLVIDSTIHKHAMIKNRNLHCTYIDYKKAFDSIPHSWLLKILDIYKISPKLIKFIEKIMPLWKTTLQLNTSEKTVTTREISIKKGIYQGDSLSPLWFCLALNPLSHLLHQCNAGYSLKDSTDETIISHLIYMDDIKLYAKTEKQMNNLIYKVTQFSNDINMKFGLDKCKTLHIVKGKIRPGDYTVDNNVITAMETTDLYRYLGYEQLKGLEHTTIKHTLTTEYKRRINIICKKQLNSKNMIKAINTYAVPILTYSFGVIKWTKTDIEQIERTTRTTLTKHNHLHPKSAIERLTIKRHDGGRGLIDIYNLWQKQMSSLKTFFYKKANNSNIHRVIVHSDHNYTPLNLHESRDTYNTPNNPQSKILENWRKKTLHGRHCHDLELPHVDAEASNKWLQIGSLFPETEGFIIAIQDQIINTKNYKKYIIKDPTVLNDKCRKCHTQPETIQHITGACITLTQTDYTHRHNQIANIIHQKLAIKHSLAENKHTPYYKYTPETILENETYKLYYDRALLTDKTIHYNRPDITLQDKNSKITYLIDIAVPNTHNIQKTIAEKITKYTELKDEIKRIWRQNKVYIVPIVLSTTGVIPKYLHHSLKLIGLQKTIYITLQKAAILNTCRTVRKFMDIEETDITPQSHIT

SEQ ID NO: 21489 - protein, 1296 aa, Lymantria monacha
MALETHSMEMLLRNKRIGSLPGGDRRGTLGADAGCDSIRTVSGKELNRRAPAGSPEDTTANYTDTVSLDSAQLIAEPFSPSTLSYVPSPTSSMDQNSHGTLSPVLNVAQEVNTFLPASTKAGKPRIRMRWSQETNIFIMRTYFYITKLETDMTTYRKQLHEAFSQQYPDIKVTEQRISDQRRTIIRNKLLPTNTLHQIKEEVRIQLQEYENVNTNNTPNLSTQNSMFEEEPISQSNITSFRLRSQSQSQTFHIATQTDSQIFLLENEVDILTDHIPTLDISAQEMYDKLKTTLIHYSGMDPTARPKLPKLRDNYKLSQLVKVFNHNILNRFLSNDTKLVDIHTLIYCTALVISKELKYKITEITLNSRRKNIHKQPWQIRLEKDIELLRADCGRLTQYINNNRSKKVVRRVEAIFKSRVMHTKHENNNKKPEEFLDTIKQKLALKVHRLKRYKKAQQRKNDNILFKFNEKIFYKNLIGSKPDRAQNSEIPTQSQLESFWAGIWEENIQHNNEAGWITEEENKWRTIEEMEFNEITELDIANVTAGLHNWKSPGPDNIHNYWYKKLKSLHHIIAKNLTEIILGKQTVPQFIAKGRTYMIPKTNTYSAQPSQYRPITCLPTIYKILTSAIARKITTHIETHKIIAEEQKGCRQGHMGCKEQLVIDSTIHKHAMIKNRNLHCTYIDYKKAFDSIPHSWLLKILDIYKISPKLIKFIEKIMPLWKTTLQLNTSEKTVTTREISIKKGIYQGDSLSPLWFCLALNPLSHLLHQCNAGYSLKDSTDETIISHLIYMDDIKLYAKTEKQMNNLIYKVTQFSNDINMKFGLDKCKTLHIVKGKIRPGDYTVDNNVITAMETTDLYRYLGYEQLKGLEHTTIKHTLTTEYKRRINIICKKQLNSKNMIKAINTYAVPILTYSFGVIKWTKTDIEQIERTTRTTLTKHNHLHPKSAIERLTIKRHDGGRGLIDIYNLWQKQMSSLKTFFYKKANNSNIHRVIVHSDHNYTPLNLHESRDTYNTPNNPQSKILENWRKKTLHGRHCHDLELPHVDAEASNKWLQIGSLFPETEGFIIAIQDQIINTKNYKKYIIKDPTVLNDKCRKCHTQPETIQHITGACITLTQTDYTHRHNQIANIIHQKLAIKHSLAENKHTPYYKYTPETILENETYKLYYDRALLTDKTIHYNRPDITLQDKNSKITYLIDIAVPNTHNIQKTIAEKITKYTELKDEIKRIWRQNKVYIVPIVLSTTGVIPKYLHHSLKLIGLQKTIYITLQKAAILNTCRTVRKFMDIEETDITPQSHIT

SEQ ID NO: 21490 - protein, 1297 aa, Lymantria dispar
MALETHSMEMLLRSKRIGSLPGGDRWGTPRADAGCDSIRTVSGKELNRRAPAGSPEDTTANYTDTVSLNSNQSIAEPFSPSTSPYAPTPTTSMELNSHGTLSPALTAAQGVNTFLPASTKAGKPRVRMRWSQETNIFIMRTYFYVTKLETDMTTYRKQLHEAFSHQYPDIKVTEQRVADQRRTIIRNKLLSTNTLEQIKEEVRIQIKEYENIKHSNNLNIFTQNSTLEEDRFHTQSKNTQTSHTATQTESQLFLLENEVDISIDHTPTLDISSQEIYDKLKTTLFQFSGMNPTARPKLPKLRNSYKLSQLIRLFNQNILNRFLSNYTKLVDVHTLIYCTAMVISKELKYKITEMTFNSRRKDSQKPPWQIRLERDIEMLRADCGRLTQYINNNKSRKVVKRVEAIFKSKVMHTKHENDNRKPEEFLDTLKQKLALKVHRLKRYKKAQQRKNNNILFKSNEKIFYKNLAESKLDKAQNTETPTQSQFESFWAGIWEDNTQHNTKAGWIFEEENKWNTIKEMEFNEITELDIANITAKLHNWKSPGPDNVHNYWYKKLTALHHILAKNLTEIILGQQNIPQFIAKGITYMIPKTNTYSPEPSQYRPITCLPTIYKILTSAIARKITTHIEHHQIIAEEQIGCRQSHMGCKEQLVIDSTIHKHATTKNRNLHCTYIDYKKALDSIPHTWLLKILDIYKISPKITKFIQNIIPMWKTTLQLNINEKTVTTREISIKKGIYQGDSLSPLWFCLALNPLSHLLHRTKAGYSLKDTTDTTIISHLIYMDDIKLYAKTEKEMKNLIQTVTRFSKDINMEFGLDKCKTLHIVKGKIRPGDYVIDHNIITAMETTDLYKYLGYEQLKGLEHTAIKCTLTTEYKRRINTICKTQLTSKNMIKAINTYAIPILTYSFGVIKWSKTDIEQLERTTRTTLTKHNHLHPKSAIERLTIKRHDGGRGLIDIYNLWQKQIYSLKVFFNNKANTSKIHRAIKFNDHNYTPLNLYETQNTYSTPNNPQIQKLENWKKKTLHGRHCHDLEQPYIDAEASNKWLQIGYLFPETEGFIIAIQDQIINTKNYRKYIIKDPTILNDKCRKCHTQPETIQHITGACITLTQTDYTHRHNQIANIIHQTLAMKHSLIEKTHTPYYKYTPQIILENNTHKLYFDRALLTDKTIHYNRPDITLQDKISKITYLIDIAVPNTHNIQKTIAEKLNKYGELKEEIKRIWRQNKVYIVPIVLSTTGVILKYLHHSLKLIGVKNTIYTTLQKAAILNTCRIVRKFMEIEETDITSHNQTLSLQHSRDQHS

SEQ ID NO: 21491 - protein, 1297 aa, Lymantria dispar; identical to SEQ ID NO: 21487

SEQ ID NO: 21492 - protein, 1297 aa, Lymantria dispar
MALETHSMEMLLRSKRIGSLPGGDRWRTPRADAGCDSIRTVSGKELNRRAPAGSPEDTTANYTDTVSLNSNQSIAEPFSPSTSSYAPSPTTSMELNSHGTLSPALTAAQGVNTFLPASTKAGKPRVRMRWSQETNIFIMRTYFYVTKLETDMTTYQKQLHEAFSHQYPDIKVTEQRVADQRRTIIRNKLLSTNTLEQIKEEVRIQIQEYENIKHSNNLNIFTQNSTLEEDRFHTQSKNTQKSHTATQTESQLFLLENEVDISIDHTPTLDISSQEIYDKLKTTLIQFSGMNPTARPKLPKLRNSYKLSQLIRLFNQNILNRFLSNDTKLVDVHTLIYCTAMVISKELKYKITEMTFNSRRKDSQKPPWQIRLERDIEMLRADCGRLIQYINNNKSRKVVKRVEAIFKSKVMHTKHENDNRKPEEFLDTLKQKLALKVHRLKRYKKAQQRKNNNILFKSNEKIFYKNLAESKLDKAQNTETPTQSQFESFWAGIWEDNTQHNTEAGWIFEEENKWNTIEEMEFNEITELDIANITAKLHNWKSPGPDNVHNYWYKKLTALHHILAKNLTEIILGQQNIPQFIAKGITYMIPKTNTYSPEPSQYRPITCLPTIYKILTSAIARKITTHIEHHQIIAEEQKGCRQSHMGCKEQLVIDSTIHKHATTKNRNLHCTYIDYKKAFDSIPHTWLLKILDIYKISPKITKFIQNIIPMWKTTLQLNINEKTVTTREISIKKGIYQGDSLSPLWFCLALNPLSHLLHRTKAGYSLKYTTDTTIISHLIYMDDIKLYAKTEKEMKNLIQTVTRFSKDINMEFGLDKCKTLHIVKGKIRPGDYVIDHNIITAMETTDLYKYLGYEQLKGLEHTAIKCTLTTEYKRRINTICKTQLTSKNMIKAINTYAIPILTYSFGVIKWSKTDIEQLERTTRTTLTKHNHLHPKSAIERLTIKRHDGGRGLIDIYNLWQKQIYSLKVFFNNKANTSKIHRAIKFNDHNYTPLNLYETQNTYSTPNNPQIQKLENWKKKTLHGRHCHDLEQPYIDAEASNKWLQIGYLFPETEGFIIAIQDQIINTKNYRKYIIKDPTILNDKCRKCHTQPETIQHITGACITLTQTDYTHRHNQIANIIHQTLAMKHSLIEKTHTPYYKYTPQIILENNTHKLYFDRALLTDKTIHYNRPDITLQDKISKITYLIDIAVPNTHNIQKTIAEKLNKYAELKEEIKRIWRQNKVYIVPIVLSTTGVIPKYLHHSLKLIGVKNTIYTTLQKAAILNTCRIVRKFMEIEETDITSHNQTLSLQHSRDQHS

SEQ ID NO: 21493 - protein, 1270 aa, Lymantria monacha
MSTTIIMSIISIRTVSGKELNRRAPAGSPEDTTANYTDTVSLNSAQLIAEPFSPSTLSYVPSPTSSMDQNSHGTLSPVLNVAQEVNTFLPASTKAGKPRIRMRWSQETNIFIMRTYFYITKLETDMTTYRKQLHEAFSQQYPDIKVTEQRISDQRRTIIRNKLLPTNTLHQIKEEVRIQLQEYENVNTNNTPNLSTQNSMFEEEPISQSNITSFRLRSQSQSQTFHIATQTDSQIFLLENEVDILTDHIPTLDISAQEMYDKLKTTLIHYSGMDPTARPKLPKLRDNYKLSQLVKVFNHNILNRFLSNDTKLVDIHTLIYCTALVISKELKYKITEITLNSRRKNIHKQPWQIRLEKDIELLRADCGRLTQYINNNRSKKVVRRVEAIFKSRVMHTKHENNNKKPEEFLDTIKQKLALKVHRLKRYKKAQQRKNDNILFKFNEKIFYKNLIGSKPDRAQNSEIPTQSQLESFWAGMWAENIQHNNEAGWITEEENKWRTIEEMEFNEITELDIANVTAGLHNWKSPGPDNIHNYWYKKLKSLHHIIAKNLTEIILGKQTVPQFIAKGRTYMIPKTNTYSAQPSQYRPITCLPTIYKILTSAIARKITTHIETHKIIAEEQKGCRQGHMGCKEQLVIDSTIHKHAMIKNRNLHCTYIDYKKAFDSIPHSWLLKILDIYKISPKLIKFIEKIMPLWKTTLQLNTSEKTVTTREISIKKGIYQGDSLSPLWFCLALNPLSHLLHQCNAGYSLKDSTDETIISHLIYMDDIKLYAKTEKQMNNLIYKVTQFSNDINMKFGLDKCKTLHIVKGKIRPGDYTVDNNVITAMETTDLYRYLGYEQLKGLEHTTIKHTLTTEYKRRINIICKKQLNSKNMIKAINTYAVPILTYSFGVIKWTKTDIEQIERTTRTTLTKHNHLHPKSAIERLTIKRHDGGRGLIDIYNLWQKQMSSLKTFFYKKANNSNIHRVIVHSDHNYTPLNLHESRDTYNTPNNPQSKILENWRKKTLHGRHCHDLELPHVDAEASNKWLQIGSLFPETEGFIIAIQDQIINTKNYKKYIIKDPTVLNDKCRKCHTQPETIQHITGACITLTQTDYTHRHNQIANIIHQKLAIKHSLAENKHTPYYKYTPETILENETYKLYYDRALLTDKTIHYNRPDITLQDKNSKITYLIDIAVPNTHNIQKTIAEKITKYTELKDEIKRIWRQNKVYIVPIVLSTTGVIPKYLHHSLKLIGLQKTIYITLQKAAILNTCRTVRKFMDIEETDITPQSHIT

SEQ ID NO: 21494 - protein, 1071 aa, Lymantria monacha
MFEEEPISQSNITSFRLRSQSQSQTFHIATQTDSQIFLLENEVDILTDHIPTLDISAQEMYDKLKTTLIHYSGMDPTARPKLPKLRDNYKLSQLVKVFNHNILNRFLSNDTKLVDIHTLIYCTALVISKELKYKITEITLNSRRKNIHKQPWQIRLEKDIELLRADCGRLTQYINNNRSKKVVRRVEAIFKSRVMHTKHENNNKKPEEFLDTIKQKLALKVHRLKRYKKAQQRKNDNILFKFNEKIFYKNLIGSKPDRAQNSEIPTQSQLESFWAGIWEENIQHNNEAGWITEEENKWRTIEEMEFNEITELDIANVTAGLHNWKSPGPDNIHNYWYKKLKSLHHIIAKNLTEIILGKQTLPQFIAKGRTYMIPKTNTYSAQPSQYRPITCLPTIYKILTSAIARKITTHIETHKIIAEEQKGCRQGHMGCKEQLVIDSTIHKHAMIKNRNLHCTYIDYKKAFDSIPHSWLLKILDIYKISPKLIKFIEKIMPLWKTTLQLNTSEKTVTTREISIKKGIYQGDSLSPLWFCLALNPLSHLLHQCNAGYSLKDSTDETIISHLIYMDDIKLYAKTEKQMNNLIYKVTQFSNDINMKFGLDKCKTLHIVKGKIRPGDYTVDNNVITAMETTDLYRYLGYEQLKGLEHTTIKHTLTTEYKRRINIICKKQLNSKNMIKAINTYAVPILTYSFGVIKWTKTDIEQIERTTRTTLTKHNHLHPKSAIERLTIKRHDGGRGLIDIYNLWQKQMSSLKTFFYKKANNSNIHRVIVHSDHNYTPLNLHESRDTYNTPNNPQSKILENWRKKTLHGRHCHDLELPHVDAEASNKWLQIGSLFPETEGFIIAIQDQIINTKNYKKYIIKDPTVLNNKCRKCHTQPETIQHITGACITLTQTDYTHRHNQIANIIHQKLAIKHSLAENKHTPYYKYTPETILENETYKLYYDRALLTDKTIHYNRPDITLQDKNSKITYLIDIAVPNTHNIQKTIAEKITKYTELKDEIKRIWRQNKVYIVPIVLSTTGVIPKYLHHSLKLIGLQKTIYITLQKAAILNTCRTVRKFMDIEETDITPQSHIT

SEQ ID NO: 21495 - protein, 1297 aa, Lymantria dispar
MALETHSMEMLLRSKRIGSLPGGDRWGTPRADAGCDSIRTVSGKELNRRAPAGSPEDTTANYTDTVSLNSNQSIAEPFSPSTSSYAPSPTTSMELNSHGTLSPALTAAQGVNTFLPASTKAGKPRVRMRWSQETNIFIMRTYFYVTKLETDMTTYRKQLHEAFSHQYPDIKVTEQRVADQRRTIIRNKLLSTNTLEQIKEEVRIQIQEYENIKHSNNLNIFTQNSTLEEDRFHTQSKNTQTSHTATQTESQLFLLENEVDISIDHTPTLDISSQEIYDKLKTTLIQFSGMNPIARPKLPKLRNSYKLSQLIRLFNQNILNRFLSNDTKLVDVHTLIYCTAMVISKELKYKITEMTFNSRRKDSQKPPWQIRLERDIEMLRADCGRLTQYINNNKSRKVVKRVEAIFKSKVMHTKHENDNRKPEEFLDTLKQKLALKVHRLKRYKKAQQRKNNNILFKSNEKIFYKNLAESKLDKAQNTETPTQSQFESFWAGIWEDNTQHNTEAGWIFEEENKWNTIEEMEFNEITELDIANITAKLHNWKSPGPDNVHNYWYKKLTALHHILAKNLTEIILGQQNIPQFIAKGITYMIPKTNTYSPEPSQYRPITCLPTIYKILTSAIARKITTHIEHHQIIAEERKGCRQSHMGCKEQLVIDSTIHKHATTKNRNLHCTLIDYKKAFDSIPHTWLLKILDIYKISPKITKFIQNIIPMWKTTLQLNINEKTVTTREISIKKGIYQGDSLSPLWFCLALNPLSHLLHRTKAGYSLKDTTDTTIISHLIYMDDIKLYAKTEKEMKNLIQTVTRFSKDINMEFGLDKCKTLHIVKGKIRPGDYVIDHNIITAMETTDLYKYLGYEQLKGLEHTAIKCTLTTEYKRRINTICKTQLTSKNMIKAINTYAIPILTYSFGVIKWSKTDIEQLERTTRTTLTKHNHLHPKSAIERLTIKRHDGGRGLIDIYNLWQKQIYSLKVFFNNKANTSKIHRAIKFNDHNYTPLNLYETQNTYSTPNNPQIQKLENWKKKTLHGRHCHDLEQPYIDAEASNKWLQIGYLFPETEGFIIAIQDQIINTKNYRKYIIKDPTILNDKCRKCHTQPETIQHITGACITLTQTDYTHRHNQIANIIHQTLAMKHSLIEKTHTPYYKYTPQIILENNTHKLYFDRALLTDKTIHYNRPDITLQDKICKITYLIDIAVPNTHNIQKTIAEKLNKYAELKEEIKRIWRQNKVYIVPIVLSTTGVIPKYLHHSLKLIGVKNTIYTTLQKVAILNTCRIVRKFMEIEETDITSHNQTLSLQHSRDQHS

SEQ ID NO: 21496 - protein, 1296 aa, Lymantria monacha
MALETHSMEMLLRNKRIGSLPGGDRRGTLGADAGCDSIRTVSGKELNRRAPAGSPEDTTANYTDTVSLDSAQLIAEPFSPSTLSYVPSPTSSMDQNSHGTLSPVLNVAQEVNTFLPASTKAGKPRIRMRWSQETNIFIMRTYFYITKLETDMTTYRKQLHEAFSQQYPDIKVTEQRISDQRRTIIRNKLLPTNTLHQIKEEVRIQLQEYENVNTNNTPNLSTQNSMFEEEPISQSNITSFRLRSQSQSQTFHIATQTDSQIFLLENEVDILTDHIPTLDISAQEMYDKLKTTLIHYSGMDPTARPKLPKLRDNYKLSQLVKVFNHNILNRFLSNDTKLVDIHTLIYCTALVISKELKYKITEITLNSRRKNIHKQPWQIRLEKDIELLRADCGRLTQYINNNRSKKVVRRVEAIFKSIVMHTKHENNNKKPEEFLDTIKQKLALKVHRLKRYKKAQQRKNDNILFKFNEKIFYKNLIGSKPDRAQNSEIPTQSQLESFWAGIWEENIQHNNEAGWITEEENKWRTIEEMEFNEITELDIANVTAGLHNWKSPGPDNIHNYWYKKLKSLHHIIAKNLTEIILGKQTVPQFIAKGRTYMIPKTNTYSAQPSQYRPITCLPTIYKILTSAIARKITTHIETHKIIAEEQKGCRQGHMGCKEQLVIDSTIHKHAMIKNRNLHCTYIDYKKAFDSIPHSWLLKILDIYKISPKLIKFIEKIMPLWKTTLQLNTSEKTVTTREISIKKGIYQGDSLSPLWFCLALNPLSHLLHQCNAGYSLKDSTDETIISHLIYMDDIKLYAKTEKQMNNLIYKVTQFSNDINMKFGLDKCKTLHIVKGKIRPGDYTVDNNVITAMETTDLYRYLGYEQLKGLEHTTIKHTLTTEYKRRINIICKKQLNSKNMIKAINTYAVPILTYSFGVIKWTKTDIEQIERTTRTTLTKHNHLHPKSAIERLTIKRHDGGRGLIDIYNLWQKQMSSLKTFFYKKANNSNIHRVIVHSDHNYTPLNLHESRDTYNTPNNPQSKILENWRKKTLHGRHCHDLELPHVDAEASNKWLQIGSLFPETEGFIIAIQDQIINTKNYKKYIIKDPTVLNDKCRKCHTQPETIQHITGACITLTQTDYTHRHNQIANIIHQKLAIKHSLAENKHTPYYKYTPETILENETYKLYYDRALLTDKTIHYNRPDITLQDKNSKITYLIDIAVPNTHNIQKTIAEKITKYTELKDEIKRIWRQNKVYIVPIVLSTTGVIPKYLHHSLKLIGLQKTIYITLQKAAILNTCRTVRKFMDIEETDITPQSHIT

SEQ ID NO: 21497 - protein, 1349 aa, Lymantria dispar
MEKIPQSPGSTTRLKTNNNNNNKPPIIQPYVRVEHQTHVGGGHAIIYYCAANMALETHSMEMLLRSKRIGSLPGGDRWGTPRADAGCDSIRTVSGKELNRRAPAGSPEDTTANYTDTVSLNSNQSIAEPFSPSTSPYAPSPTTSMELNSHGTLSPALTAAQGVNTFLPASTKAGKPRVRMRWSQETNIFIMRTYFYVTKLETDMTTYRKQLHEAFSHQYPDIKVTEQRVADQRRTIIRNKLLSTNTLEQIKEEVRIQIQEYENIKHSNNLNIFTQNSTLEEDRFHTQSKNTQTSHTATQTESQLFLLENEVDISIDHTPTLDISSQEIYDKLKTTLIQFSGMNPTARPKLPKLRNSYKLSQLIRLFNQNILNRFLSNYTKLVDVHTLIYCTAMVISKELKYKITEMTFNSRRKDSQKPPWQIRLERDIEMLRADCGRLTQYINNNKSRKVVKRVEAIFKSKVMHTKHENDNRKPEEFLDTLKQKLALKVHRLKRYKKAQQRKNNNILFKSNEKIFYKNLAESKLDKAQNTETPTQSQFESFWAGIWEDNTQHNTKAGWIFEEENKWNTIEEMEFNEITELDIANITAKLHNWKSPGPDNVHNYWYKKLTALHHILAKNLTEIILGQQNIPQFIAKGITYMIPKTNTYSPEPSQYRPITCLPTIYKILTSAIARKITTHIEHHQIIAEEQKGCRQSHMGCKEQLVIDSTIHKHATTKNRNLHCTYIDYKKAFDSIPHTWLLKILDIYKISPKITKFIQNIIPMWKTTLQLNINEKTVTTREISIKKGIYQGDSLSPLWFCLALNPLSHLLHRTKAGYSLKDTTDTTIISHLIYMDDIKLYAKTEKEMKNLIQTVTRFSKDINMEFGLDKCKTLHIVKGKIRPGDYVIDHNIITAMETTDLYKYLGYEQLKGLEHTAIKCTLTTEYKRRINTICKTQLTSKNMIKAINTYAIPILTYSFGVIKWSKTDIEQLERTTRTTLTKHNHLHPKSAIERLTIKRHDGGRGLIDIYNLWQKQIYSLKVFFNNKANTSKIHRAIKFNDHNYTPLNLYETQNTYSTPNNPQIQKLENWKKKTLHGRHCHDLEQPYIDAEASNKWLQIGYLFPETEGFIIAIQDQIINTKNYRKYIIKDPTILNDKCRKCHTQPETIQHITGACITLTQTDYTHRHNQIANIIHQTLAMKHSLIEKTHTPYYKYTPQIILENNTHKLYFDRALLTDKTIHYNRPDITLQDKISKITYLIDIAVPNTHNIQKTIAEKLNKYGELKEEIKRIWRQNKVYIVPIVLSTTGVIPKYLHHSLKLIGVKNTIYTTLQKAAILNTCRIVRKFMEIEETDITSHNQTLSLQHSRDQHS

SEQ ID NO: 21498 - protein, 1039 aa, Hypermnestra helios
MSHSSAQTESITIMLENDIEILVDHEPLVVKSTEEICYKFRTTIAQYSGMDPAARPKLPKLRYSPKLSHLINLFNQNILKQFLSEDMQLIDLHTLIYCTALVISEELNYKVTNYKEYTRLRQNNKPPWERRLQKDIEKLRADCGRLTQYIHNNRSKKVVKRVKAIFKSGIIHTRHENINKTPEEFLDTLKQKLALKVHRLRRYKKRRDDNNTFATNEKIFYRKIHKLQIDTSIEHNSSIPTKEHLETFWSGIWEEQVHHNDKATWIAEEKNKWSTIKEMEFIEITEFDIKDITSRLHNWKSPGIDKIHNFWYKKLTLLHKSIAKNLTDIILGQQNVPEYISAGITYMLPKNTYSSLPSQYRPITCLPTIYKILTSAITSKINAHIERNNIIAEEQKGCRRGHMGCKEQLVIDSVIHKHATTKNRNLHCTYIDYKKAFDSIPHTWLIQILEIYKINSKVLNFLRNIMSHWKTTLHLNNNHNTVITRQIFIKNGIYQGDSLSPLWFCLALNPLSHLLQRCRAGYSLKDTTDDINISHLIYMDDIKLYAKSEKDMKKLIDTTAEFSKDINMQFGLDKCKTLHIIRGKIRPGDYVVNSTDIIKAMEPNDLYKYLGYMQLKGLDHKKVKETLRTEYKKRINAVCQTQLAGKHLIKALNSYAIPILTYSFGMIKWTKTDIEEIERITRTTLTKHNNLHPKSAIERLTIKRQNGGRGLIDIHDLWQKQINRLKTFFYIKSHTSHIHKAIIHNDQNYTPLNLNDQTPIHMDIVTNDDPHKKKIENWKKKVLHGRHPHDLEQSHINKIASNKWLKIGNLFPETEGFIIVIQDQIINTKNYRKYIIKDPTITNDKCRKCHTQPETIQHITGACTMLAQTDYTYRHNQVANIIHQQLAFKYTLIQNTNTYYKYTPQNVLENPTHKLYYDRAILTDKTIHYNRPDITLQDKINKITYLIDIAVPNTHNLQKTITEKLSKYTELKEEVTRIWKQEKVYIVPIVLSTTGIIPNHLFHSLKLIQLKESVLLTLQKAVILNTCRIVRKFMQIEEN

SEQ ID NO: 21499 - protein, 1301 aa, Mythimna ferrago
METRSKSKRLGPLPGGDRRGAPGADAGCHSMRTVGGEELSRRAPTDKDATAETTDDGDRLTNRTNTPVEPYSPSTVSYTPSNRSSPSIPSSPPITSLNSIQLTPAMDVAREVSTFLPASTKAGKVRVRMRWSKEVNLFIMRTYLFITKLETDMTTYRPQLHAIFKRQYPEISVSEQRVSDQRRVIVRNKLISQEEIDQLKEEVRMQLIQEEDYRDTSNDPQNTHECLSERQQSLTQSQTPVESQSYNSQTSHTSTQTECITLTLENDIDTVIVDPNPVTDTYVQEILDKFRMTLTQYSGMEPAARPKLPKLKYSPNLFRLLNLFNKNILNQFLSDDIQLIDINTLIYCTAVVIAEELNFKISEQTSNIRCRDHVKPPWQLRLENDIDKLRADCGRLTQYIRGCRSQKVVKKVEAIFKINPTHTRHESNNRKPEEYLDTLKQKLALKVHRLRRYVKAQQRKTDNATFSMNEKIFYRNIQKPPGVTIRDNNTDIPSKEQLESFWSSIWEEQVQHNDKATWITEEETKWGEIDEMEFMEITESDITNVTDRLHNWKSPGIDKIQNFWYKKLTIFHKYIAKTLTNIVLGQQNIPEFIATGITYMLPKTTHTTQPSQYRPITCLPTIYKILTSAITTKINAHIEHHNIIAEEQKGCRRGHMGCKEQLIIDSTIHKHATCKNRNLHCTYIDYQKAFDSIPHSWLVKILEIYKINSKIINFLRIIMSYWKTTLHLNNHHSSLITRQISIRKGIYQGDSLSPLWFCLALNPLSHLLHRCQVGYNLKHNTEDTIISHLIYMDDIKLYSRTEREMKKLIEITTKFSQDINMRFGLDKCKTLHIIRGKIKSGNYSINDTDTIAAMEPTDLYKYLGYKQLKGLDHTAIKQTLNTEYRRRINAVCKTQLSGKHLIKALNTFAIPILTYSFGVIKWCKTDIEQLERTTRTTLTKHHNLHPKSAIERLTIKRQNGGRGLIDIGHLWQKQITRLKTFFFTKSRTSVIHKAITLNDFNYTPLNLNNQNIQDTINTDPQSQKIEHWKKKALHGRHPHALDQPHVHKVASNKWLHIGNLFPETEGFMIAIQDQIINTKNYRKYIIKDPSVSNDRCRRCHTQPETIQHITGACISLTQTDYTHRHNQVANVVHQKLAIKYALIQDTNTPYYNYSPQTILENDTHKLYYDRAILTDRTIHYNRPDIILQDKINKITYLIDIAVPNTHNIQKTITEKISKYVELKEEITRIWRQEKVYVVPIVLSTTGVIPHHLFHSLKLLNLKDTLYILLQKAAILNTCRIVRKFLQIDEHEIGLLQNASST

SEQ ID NO: 21500 - protein, 1301 aa, Mythimna ferrago
METRSKSKRLGPLPGGDRRGAPGADAGCHSMRTVGGEELSRRAPTDKDATAETTDDGDRLTNRTNTPVEPYSPSTVSYTPSNRSSPSIPSSPPITSLNSIQLTPAMDVAREVSTFLPASTKAGKVRVRLRWSKEVNLFIMRTYLFITKLETDMTTYRPQLHAIFKRQYPEISVSEQRVSDQRRVIVRNKLISQEEIDQLKEEVRMQLIQEEDYRDTSNDTQNTHECLSERQQSLTQSQTPVESQSYNSQTSHTSTQTECITLTLENDIDTVIVDPNPVTDTYVPEILDKFRMTLTQYSGMEPAARPKLPKLKYSPNLFRLLNLFNKNILNQFLSDDIQLIDINTLIYCTAVVIAEELNFKISEQTSNIRCRDHVKPPWQLRLENDIDKLRADCGRLTQYIRGCRSQKVVKRVEAIFKINPTHTRHESNNRKPEEYLDTLKQKLALKVHRLRRYVKAQQRKTDNATFSMNEKIFYRNIQKPPGVTIRDNNTDIPSKEQLESFWSSIWEEQVQHNDKATWITEEETKWGAIDEMEFMEITESDITNVTDRLHNWKSPGIDKIQNFWYKKLTIFHKYIAKTLTNIVLGQQNIPEFIATGITYMLPKTTHTTQPSQYRPITCLPTIYKILTSAITTKINAHIEHHNIIAEEQKGCRRGHMGCKEQLIIDSTIHKHATCKNRNLHCTYIDYQKAFDSIPHSWLVKILEIYKINSKIINFLRIIMSYWKTTLHLNNHHSSLITRQISIRKGIYQGDSLSPLWFCLALNPLSHLLHRCQVGYNLKHNTEDTIISHLIYMDDIKLYSRTEREMKKLIEITTKFSQDINMRFGLDKCKTLHIIRGKIKSGNYLINDTDTIAAMEPTDLYKYLGYKQLKGLDHTAIKQTLNTEYRRRINAVCKTQLSGKHLIKALNTFAIPILTYSFGVIKWCKTDIEQLERTTRTTLTKHHNLHPKSAIERLTIKRQNGGRGLIDIGHLWQKQITRLKTFFFIKSRTSVIHKAITLNDFNYTPLNLNNQNIQDTINTDPQSQKIEHWKKKALHGRHPHDLDQPHVHKVASNKWLHIGNLFPETEGFMIAIQDQIINTKNYRKYIIKDPSVSNDRCRRCHTQPETIQHITGACISLTQTDYTHRHNQVANVVHQKLAIKYALTQDTNTPYYNYTPQTILENDTHKLYYDRAILTDRTIHYNRPDIILQDKINKITYLIDIAVPNTHNIQKTITEKISKYVELKEEITRIWRQEKVYVVPIVLSTTGVIPHHLFHSLKLLNLKDTLYILLQKAAILNTCRIVRKFLQIDEHEIGLLQNASST

SEQ ID NO: 21501 - protein, 1100 aa, Mythimna ferrago
MQLIQEEDYRDTSVMCHYTQNTHECLSERQQSLTQSQSPVESQSYNSQTSHTSTQTECITLTLENDIDTVVVDPNPVTDTYVQEILEKFRMTLTQYSGMDPAARPKLPKLKYSPNLFRLLNLFNKNILNQFLSDDIQLIDINTLIYCTAVVIAEELNFKISEQTSNIRSRDHVKPPWQLRLENDIDKLRADCGRLTQYIRGCRSQKVVKRIEAIFKINSTHTRHESNNRKPEEYLDTLKQKLALKVHRLRRYVKAQQRKTDNATFSMNEKIFYRNIQKPPGVTIRDNNTDIPSKEQLESFWSSIWEEQVQHNDKATWITEEETKWGEIDEMEFMEITESDITNVTDRLHNWKSPGIDKIQNFWYKKLTIFHKYIAKTLTNIVLGQQNIPEFIATGITYMLPKTTHTTQPSQYRPITCLPTIYKILTSAITTKINAHIEHHNIIAEEQKGCRRGHMGCKEQLIIDSTIHKHATCKNRNLHCTYIDYQKAFDSIPHSWLVKILEIYKINSKIINFLRIIMSYWKTTLHLNNHHSSLTTRQISIRKGIYQGDSLSPLWFCLALNPLSHLLHRCQVGYNLKHNTEDTIISHLIYMDDIKLYSRTEREMKKLIEITTKFSQDINMRFGLDKCKTLHIIRGKIKSGNYSINDTDTIAAMEPTDLYKYLGYKQLKGLNHTAIKQTLNTEYRRRINAVCKTQLSGRHLIKALNTFAIPILTYSFGVIKWCKTDIEQLERTTRTTLTKHHNLHPKSAIERLTIKRQNGGRGLIDIGHLWQKQITRLKTFFFTKSRTSVIHKAITLNDFNYTPLNLNNQNIQDTINTDPQSQKIENWKKKALHGRHPHALDQPHVHKVASNKWLHIGNLFPETEGFMIAIQDQIINTKNYRKYIIKDPSVSNDRCRRCHTQPETIQHITGACTSLTQTDYTHRHNQVANVVHQKLAIKYALIQDTNTPYYNYTPQTILENDTHKLYYDRAILTDRTIHYNRPDIILQDKINKITYLIDIAVPNTHNIQKTITEKNSKYVELKEEITRIWRQEKVYVVPIVLSTTGVIPHHLFHSLKLLNLKDTLYILLQKAAILNTCRIVRKFLQIDEHEIGLLQNASST

SEQ ID NO: 21502 - protein, 1232 aa, Cosmia trapezina
METRSKRKRIGPLPGGDRRGTPGADAGCLSMRTVSGEELNRRAPTDKVATAEVIDDGDRLTNRTDTPVEPYSPSTVSYAPSGTSSPSIPSSPIPSSPPITSVNIVSPTPALNVAREVSTFLPASTKAGKARVRMRWSKEVNLYIMRTYLHITKLETDMTTYRQQLHERFSRQYPEISVSEQRISDQRRTIVRNKLLSQVELDQLKEEVRTQLREESENYADTNTIILTQNTNENILQELPQSLTHLHPNSQSLTYNQSQAYTQTTHTSTQTQTESLTLTLENYIETLVVADQNLTTDTYIQEINDKFRTTITQYSGMDPAVRPKLPKLKYTPNLFRLVNLFNENILMQFISDDTQLIDIHLLIYCTAVVISEELNFKITDHTGTTRTSRTVKPAWQQRLEKDIEKLRADCGRLTQYINGCRSHKVVKRVEVIFKNNFTHTRHESNNRKPEEFLDTLKQKLSLKVHRLRRYLRAQQRKKDNAIFATNEKIFYRNIQKPHTDSTIENDRDTPSKEHLETFWSNIWEEQVHHNDKATWITEEATKWIAIDEMEFNEITESDITYITARLHNWKSPGIDKIQNFWYKKLTILHKSIAKNLTDIVLGEQNIPEFIATGITYMLPKTECTSEPSQYRPITCLPTIYKILTSAITNKINSHIEHHNIIAEEQKGCRRGHMGCKEQLVIDSTIHKHATTKNRNLHCTYIDYQKAFDSIPHSWLLQILEIYKINSKIIEFLRNIMTCWKTTLQINNRLSTLITRQIHIRKGIYQGDSLSPLWFCLALNPLSHLLNRCRAGYNFKNNTEETIISHLIYMDDIKLYAKTEKEMKSLIEVTTTFSQDINMQFGLDKCRTLHIIKGKVKPGNYAVSDTDTIAAMEPTDLYKYLGYKQLKGLDHTSIKQTLNTEYRRRINAICNTQLSGKHLIKALNTFAIPILTYSFGVIKWSKTDIEQLERTTRTTLTKHHNLHPKSAIERLTIKRQNGGRGLIDIYHLWQKQITRLKTFFYTKSRTSNIHKAITLNDLNYTPLNLNEQNIQDINIIDPQNQKIENWKKKVLHGRHPHDLEQSHIDKLASNKWLKIGNLFPETEGFIIAIQDQIINTKNYRKFIIKDPTITNDKCRRCHIQSETIQHITGACTTLTQTDYTHRHNQVANIIHQKLALKHSLIENSNTPYYKYTPQTILENDRHKMYYDRAILTDRTIHYNRPDITLQDKIRKITYLIDIAVPNTHNLQKTISEK

SEQ ID NO: 21503 - protein, 1249 aa, Apodemia zela
MRTVSGEELNRRASTDKITTAEPYYRNDRHTDSTNDSKEPFSPSMISYTPSEPTSPSIDSLNSNSSTPTLDVARGVNTFLPASTKAGKPRVRMKWNNQVNIFIMRTYYYITKLETDLTTYRKQLHELFEKQYPEIKVSEQRISDQRRTIIRNKLLNQEILNQLKEEVQMQLQTETQNTRINETVTPIHYEAEKTPQTQLLRQNTQLLHVSTQTETITLTVENDIETLTIYNTIADNQTQQIHDKFRKTLLDYSGSDPGARPKLPKLKYSPQLDRLVNLFNNNILNQFISEEAQLIDIHTIIYCTALVISEELHYKIPYDNIQNFRQKDKNKPAWEVRLERDIEKLRADCGRLTQYINNNRSKKLVKKVEAIFSNGLIHTRHENYNRTPQQFLDTLKQKLALKVNRLKRYRKAQQKKNDNKLFATNEKQFYRNLQKTKTRTEGDQNIIPTEEQLELFWSGIWEEQAEHNENADWISEEKNKWSFIQEMEFSEITESDIRIITTKLHNWKSPGIDKIHNYWYKKLTILHKSIAKNLTDIVLGQQNIPEFITTGITYMLPKTHYSTQPSQYRPITCLPTIYKILTAAIAIKINTHIEHHNIIAEEQKGCRRGHMGCKEQLIIDSTIHKHATSKNKNLHCTYIDYKKAFDSIPHSWLINILQIYKINPKLTDFLRNVMPQWKTTLQLNAHNKTLTTRQIYIKKGIYQGDSLSPLWFCLALNPLSHLLNSTRAGYYFKRNTEDTVISHLIYMDDIKLYATSEKEMKALIDTTTQFSSDIKMEFGIEKCKTLHIIRGKVRPGDYEINQVETITAMESTDLYKYLGYKQLKGLDHTSIKNTLTTEYKRRLNVLCKTKLSSKFLMKSINTFAVPILTYSFGIIKWSKTDIEQIERITRTTLTKHNNLHPKSAIERLTIKRQDGGRGLIDIHHLWKKQIINLKTFFYTKTQTSTIHRTITQYDQNYTPLNLSENTNTPNIDRDPQKQKTEDWKKKVLHGRHPHDLEQPHIDKISSNKWLKIGNLFPETEGFMIAIQDQVINTKNYQKYIIKDPTIINDKCRKCHTQSETIQHITGACTTLTQTDYTHRHNQVTNIIHQKLALKHQLIQNTNTPYYKYTPDTILENESYKLYYDRAILTDKTIHYNRPDITLQDKKNKTTYLIDIAVPNTHNLQKTIGEKINKYADLKEEVLRIWRQDRVYIVPIVLSTTGVIPKHLRHSLQLIELDNSIHIALQKAAILNTCRIVRKFMQIDEKENTP

SEQ ID NO: 21504 - protein, 949 aa, Apodemia hypoglauca
MIYCTALVISEELHYKIPYNKQNVRRNNPEKPPWEVRLERDIEKLRADCGRLTQYINNNRSRKLVKKVEAIFNNRLIHTRHENHNRKPQEFLDTLKQKLALKVNRLKRYKKAQQKIIDNKLFATSEKQFYRNLQKTKPHTRDDQDIPTKEQLELFWSGIWEEQVEHNTNADWIAVEKNKWNFIPEMEFSEITESDIRNTTTRLHNWKSPGIDKIHNYWYKKLTVLHKSIAKNFTDIILGHQNIPEFIATGITYMLPKTLHSTQPSQYRPITCLPTIYKILTSAITTKINTHIEDHNIIAEEQKGCRRGHMGCKEQLIIDSTIHKHATSKNKNLHCTYIDYKKAFDSIPHSWLIQILQIYKINPKLTDFLCNVMTHWKTTLQLNAHNRTVTTRQIHIKKGIYQGDSLSPLWFCLALNPLSHLLHSTQAGYYFKRNTEDTIISHLIYMDDIKLYATTVKDMKTLIDITTKFSSDIKMEFGIEKCKTLHIIRGKVRPGDYEINQMETITAMESTDLYKYLGYKQLKGLDHTSIKKILTMEYKRRLNLLCKTKLSSKFLIKSINTFAIPILTYSFGVIKWTKTDIDQIERTTRTTLTKHNNLHPKSAIERLTIRRQDGGRGLIDINHLWKKQIIKLKTFFYTKSQTSTIHKIITQCDQNYTPLNLVENKNTPNIDSDPQKQKIEDWKKKVLHGRHPHDLEQFHIDRLASNKWLKIGNLFPETEGFLIAIQDQVINTKNFQKYIIKDPKIINDKCRKCHAQPETIQHITGACTTLTQTDYTHRHNQVTNIIHQKLALKHKLIQNTNTPYYKYTPETILENENYKLYYDRAILTDKTIHYNRPDMTLQDKKNKTTYLIDIAVPNTHNLQKTISEKINKYADLKEEVLRIWRQDKVYIVPIVLSTTGVIPKHLNHSLKLIELDNNIHIMIQKAAILNTCRIVRKFMQIDEKENTPY

SEQ ID NO: 21505 - protein, 1265 aa, Udranomia eurus
MTSLAYRGNRMRRSNRIKNKMSAQPNTVAEISTVNTRTLSPTSSSTHSLFESPRSSPQSFENFISRSSTASPILQNTAKPTSDVAQGANAFLPVSTKAGKPRVRMRWNQDVNKFIMRTYYYITKLETDMTVYRKTLHELFTLQYPEINVSEQRVSDQRRMIIKNKYLSQDILEKIKEGVSRQLQEEEASNNNATPSHLEDGCNVLESHTNLHSQQHFTNVDQFDTHNFTQSSHTATQTVLTTLLLENEIETLTDLPPFADTRIKRINDKLHSTILQYSGLDPETRPRLPRLRYTKYLNDLVHLVNQQILINFIPIDAQLTDIHTLIYCTALVISEELNYKIINNTTYTKPKNTIKPAWQIRLERDIQKLRADIGRLTQYINNNRSNKLVKKVQEIFNNVTIHSKHESNNRKPEEFLDTLKQKLALKTHRLRRYKKAQQRKKDNLQFAANEKVFYRNMCKPENIEHLTEIPTKEQFESYWSDIWEEKNQHNSKANWIGEEKVKWQAIEEMEFSGITEQDLINITNKLHNWKSPGTDKIHNYWYKKLTSLHKPLARNLTEIILGKQNVPNFIATGITYLLPKTKNSSHPSQYRPITCLPTLYKILTSAITTKITAHTEKHHILAEEQKGCRRGHMGCKEQLIIDSIVHKHASAKNRNLHCTYIDFKKAFDSIPHSWLIEILRIYKINPVIIKFLSNIMSYWKTTLQLNKYDKLIITRQINIKKGIYQGDSLSPLWFCLALNPLSSLLQNCQAGYNLSHISKEIKISHLIYMDDIKLYAKTREDMKTLVDITTEFSNDINMQFGLDKCKTLHIIKGKIQPGDYTVNNSDIITAMEPTDVYKYLGYNQLRGLQHINIKQTLKTEYKRRINAICKSFLVGKHLSKAINSYAIPILTYSFGVVKWTKTDILQIERITRTTLTKHNCLHPKSAVERLTIKRQDGGRGIIDIQHLWQKQISNLRNFFFNKSTTCDIHAVITQIDQNFTPLNLVDHTNEPFNRNSQIQKLEDWKKKVLHGRHPHDLEHKHIDKTASNKWLKVGNLFPETEGFMISIQDQVVNTKNYRKYIIKDPSVTNDKCRRCHTQPETIQHITGACINLTQTDYTHRHNQVANIIHQKLALKHQLTQNTNTPYYNYTPQAVLETPTHKLYYDRAILTDRTIHYNRPDIILQDKVNKTTYLIDVAVPNTHNIQKTIAEKINKYTELKEEVSRIWKQDKVLLVPIVLSTTGVIPYHLHQSLRLLDLTHSTYILLQKAAILNTCRTVRKFMQIEE

SEQ ID NO: 21506 - protein, 1287 aa, Vanessa cardui
METRSKKKRIGPLPGGDRRGTPGAGAGCDSMRTVSGEELSRRASPDKFHTTAGRRELNRRAHGVNATAATDDEINRLTDRTSSPIEPYNSPSTSSYTPSVQSSPSTISLNTEPHLPALNVAREANAFLPASTKAGKPRVRMRWSKEVNSFIMRTYYYITNLETDMTTYRQKMHELFTQKYPGITVTEQRISDQRRTIVKNKLLTEDELNRLKEKARIQLQQHDVTTPLPRNPSHSEFHSQIEYFTLPNTQNTHTSDMSTQTESVTIILENEVNTLNAQNPITETYIQEIYDKFSTTLLQYSGTDPLIRPRLPKIKYSKQLYNLIQIFNENILNRFISEDTQLIDIHTIIYCTALVITEEVNPKQIKNMQRTKTKQTNKPPWQQRLERDIEKLRADCGRLTQYIYNNNRSNKVVKRVEEIFQNCNIHTKHDRNNKKPEEYLDTLKQKLALKVNRLRRYKKAEQRRNDNAIFTTNEKFFYRNLQKPHTPTNTVTDRNTDVPTKQDLEVFWSGIWEEQVSHNSKASWINDEKIEFSIIEEMEFVEVTETDITNITAKLHNWKSPGIDKIHNFWYKKLTSLHKCIAKNLTQIVLGQQKIPEFMTIGITYMLPKTKHSPQPSQYRPITCLPTIYKILTSVITNKISTHIEQHNIIAEEQKGCRRAHMGCKEQLVIDSTIHKHAATKNRNLHCTYIDYEKAFDSIPHSWLIEILEIYKINPKIIDFLRKIMSYWKTTLHLNYGQNTIVTRQIQIKKGIYQLNPLSHLLHRCRVGYSLKSIEETIISHLIYMDDIKLYAKSDKDMKKLIEVTKEFSTDINMQFGLDKCKTIHIIKGKIKPGNYAITSSDTITAMEPTDLYKYLGYNQLKGLDHTSIKHTLTIEYKRRINVICKTQLSGKNLIKAINTYAIPILTYSFGIIKWTKTDIEQIERNTRTILTKHNNLHPKSAIERLTLKRQNGGRGLIDIYNLWQKQINTLKTFFHLKSRTSDIHKAIVVNDNNYTPLNLSEQGYHMNDCIDDPQKQKLENWKKKVLHGRHPHDLEQPHINTIASNKWLKIGSLFPETEGFIIAIQDQIINTKNYKKYIIKDPTITNDKCRKCHIQPETIQHITGACITLTQTDYTHRHNQVSNIVHQKLALKYKLIQNTKTPYYKYTPQTILENATHKIYYDRGILTDKTIHYNRPDITLQDKINKVTYLIDIAVPNTHNLQKTIAEKINKYNELKEEVTRIWKQEKVYIIPIVISTTGVVPNHLLHSLKLLDLNESLYIPIQKAAILNTCRIVRKFMQLEETDTT

SEQ ID NO: 21507 - protein, 1167 aa, Trichoplusia ni
MKWSKEVNLFIMRTYYYITKLETDMTIYRKLLHENFLHKYPDIVVSEQRVSDQRRTIIRNKLLSQEELEQVKEEVRLQLENTELNLPSEDHAHNVNSHLPNTSNNQTAPLYTQSTPAPVNYVRDIVSVETQTESLILTVENDIEVLVEPDSLPDISNEDLLEKFKTALVLYSGMDPTARPRLPKLKYSPKLSQLILAFNEKILCKFISEDTQLIDLHTLIYCTALVISKELNFKVTEYVENNRTKYNNKPSWQIRLEKDVEKLRADCGILTQYINNNRSNRVVKKVETIFKSRLIHTKHENNNKKPEEFLDTLKQKLALKVHRLRRYKKAEQRKNDNILFSSNEKMFYRKLAKPQSSGSIVENIVEIPSKEELESFWSGIWEKQVVHNDAAEWIKEEENKFDSIEEMDFVEVTERDITNITSRLHNWKAPGLDKIHNFWYKKLDLLHKSLAKNFTDIILGKQLVPEFIATGITYMLPKGTHSVNASQYRPITCLPTIYKILTSVISSKINKHVEQHNIISEEQKGCRRGHMGCKEQLVIDSTIHKHASTKNRNLHCTFIDYKKAFDSIPHSWLVKILQIYKINSHIVDFLRLIMNRWKTTLQLNYLGNSVTTRQILIRKGIYQGDSLSPLWFCLALNPLSNMLNRSRVGYCLKHTSQDTVISHLIYMDDIKLYSKTEKDMKILINSTSQFSKDINMKFGLDKCKTLHVIRGKIKPGDYVVNDTDTIEAMEPNDVYKYLGYNQLKGLDHKTIKSSLNIEYRKRMNSLCKSQLSGKNLIKAINTYAVPILTYSFGIIKWTKTDIEQIERATRTTLTRYNNLHPKSAIERLTIKRQDGGRGLIDIHHLWQKQLSRLKTFFISKASSSEIHKAIAQNDDNYTPLNLKDQANTLNPSDSEPQVQKIENWKKKVLHGRHPHDLEQSHVDSVASNTWLKIGNLFPETEGFMIAIQDQIINTKNYRKYIIKDPTIVNDKCRKCHTHPETIQHITGACTTLTQTDYTHRHNQVVNIVHQQLALKHKLIDYNTYTPYYKYTPQTVLENSTHKLYYDRAILTDRTVHYNRPDITLVDKINKITYLIDVAVPNTHNLQKTIAEKLSKYADLKEEVSRIWKQNKVFVIPIVLSTTGVIPKQLHSSLKIIDLKKSLYIMLQKAAILNTCRIVRKFMSADES

SEQ ID NO: 21508 - protein, 1290 aa, Autographa gamma
METRSKKKRIGPLPGGYRRGTPGADAGCLSMRSVSGEELSRRAPTDKDTTAEISDEIDRLTDRTISPVEPFSPSTISYTPSLASSPLTNSNSDILPTPTLDVAREVNTFLPASTKAGKTRVRMRWSKEVNLFIMRTYYYITRLETDMTIYRKLLHEHFSQKYPDIVVSEQRVSDQRRTIIRNKLLSQEELDRLKEEVRLQLENSEVNIPSEDHTQDVNWVLPSSDINQTAHLHTLHTLTPNNSRRDAVCAETQTESLTLIIENDIGILVGPDPLPDISTREILDKFERALVLYSGMDPTVRPRLPKLKYSPKLTQLVLLFNENILNKFTSEDMQLVDLHTLIYCTAVVISEELNYKVTEYTGNNKAKYNNINKPPWQVRLERDIEKLRADCGILTQYINNNRSNKVVKRVEAIFRTRLIHTRHESNNNKPEDFLDTLKQKLALKVHRLRRYKKAEQRKNDNMLFSANEKMFYRNLSKPQTVGNVDNNIAEIPSKSELEDFWSGIWEKQELHNERAEWIKDEETKWNLIEEMDFVEITDIDIANITIRLHNWKAPGVDKIHNFWYKKLGSLHKPLAKNLTDIILGKQVVPEFIATGITYMLPKGTHSAQASQYRPITCLPTIYKILTSVIASSINKHIEQHNIIAEEQKGCRRGHMGCKEQLVIDSTIHKQATTKNRNLHCTFIDYKKAFDSIPHSWLVKILQIYRVNSKLIDFLSNIMNRWKTTLQLNYLNNSVTTRQILIRRGIYQGDSLSPLWFCLALNPLSHMLHRSRVGYCLKNTSQDAIISHLIYMDDIKLYSKSEKDMKILIDTTSQFSNDINMQFGLDKCKTLHIIRGKIKPGDYPVNNTDTIVAMEPTDLYKYLGYNQLKGLDHKTIKESLNIEYRRRINSLCKSQLSGKHLIKAINTYAIPVLTYSFGIIKWTKTDIERIERTTRTTLTKHNNLHPKSAIERLTIKRQDGGRGLIDIHHLWQKQISRLKSFFITKSSTSEIHKAVAQNDDNFTPLNLKDQASTLRLSDCEPQIERIENWKKKVLHGRHPHDLEQSHVDTVASNKWLKIGSLFPETEGFIIAIQDQIINTKNYRKFIIKDPSITNDKCRKCHIHPETIQHITGACTTLTQTDYTHRHNQVVNIVHQQLAIKHKLIDTTYTPYYKYTPQTVLENATHKLYYDRAILTDRTVHYNRPDITLQDKINKTTYLIDVAIPNTHNLQKTIAEKISKYADLKEEVARIWKQDKVFVIPIVVSTTGVIPKQLHNSLKIIDLKKTLYIMLQKAAILNTCRIVRKFMSAEEN

SEQ ID NO: 21509 - protein, 1289 aa, Trichoplusia ni
METRSKSKRIGPLPGGDRRGTPGADAGCLSMRTVSGEELSRRAPTDKDTTADPSDEIDRLTDRTNSPIEPFSPSTISYTPSLSTSPLTISNTDTPTSPTLDVAREVNAFLPASTKAGKPRVRMKWSKEVNLFIMRTYYYITKLETDMTIYRKLLHENFLHKYPDIVVSEQRVSDQRRTIIRNKLLSQEELEQVKEEVRLQLENTELNLPSEDHAHNANSHLPNTSNNQTAPLYKQSTPAPVNYVRDIVSVETQTESLILTVENDIEVLVEPDSLPDISNEDLLEKFKTALVLYSGMDPTARPRLPKLKYSPKLSQLILAFNEKILCKFISEDTQLIDLHTLIYCTALVISKELNFKVTEYVENNRTKYNNKPSWQIRLEKDVEKLRADCGILTQYINNNRSNRVVKKVETIFKSRLIHTKHENNNKKPEEFLDTLKQKLALKVHRLRRYKKAEQRKNDNILFSTNEKMFYRNLAKPQSSGSIVENIVEIPSKEELESFWSGIWEKQVVHNDAAEWIKEEENKFDSIEEMDFVEVTERDITNITSRLHNWKAPGLDKIHNFWYKKLDLLHKSLAKNFTDIILGKQLVPEFIATGITYMLPKGTHSVNASQYRPITCLPTIYKILTSVISSKINKHVEQHNIISEEQKGCRRGHMGCKEQLVIDSTIHKHASTKNRNLHCTFIDYKKAFDSIPHSWLVKILQIYKINSHIVDFLRLIMNRWKTTLQLNYLGNSVTTRQILIRKGIYQGDSLSPLWFCLALNPLSNMLNRSRVGYCLKHTSQDTVISHLIYMDDIKLYSKTEKDMKILINSTSQFSKDINMKFGLDKCKTLHVIRGKIKPGDYVVNDTDTIEAMEPNDVYKYLGYNQLKGLDHKTIKSSLNIEYRKRMNSLCKSQLSGKNLIKAINTYAVPILTYSFGIIKWTKTDIEQIERATRTTLTRYNNLHPKSAIERLTIKRQDGGRGLIDIHHLWQKQLSRLKTFFISKASSSEIHKAIAQNDDNYTPLNLKDQAHTLNPSDSEPQVQKIENWKKKVLHGRHPHDLEQSHVDSVASNTWLKIGNLFPETEGFMIAIQDQIINTKNYRKYIIKDPTIVNDKCRKCHTHPETIQHITGACTTLTQTDYTHRHNQVVNIVHQQLALKHKLIDYNTYTPYYKYTPQTVLENSTHKLYYDRAILTDRTVHYNRPDITLVDKINKITYLIDVAVPNTHNLQKTIAEKISKYADLKEEVSRIWKQNKVFVIPIVLSTTGVIPKQLHSSLKIIDLKKSLYIMLQKAAILNTCRIVRKFMSADES

SEQ ID NO: 21510 - protein, 822 aa, Trichoplusia ni
MFYRNLAKQQSSGSIVENIVEIPSKEELESFWSGIWEKQVVHNDAAEWIKEEENKFDSIEEMDFVEVTERDITNITSRLHNWKAPGLDKIHNFWYKKLDLLHKSLAKNFTDIILGKQLVPEFIATGITYMLPKGTHSVNASQYRPITCLPTIYKILTSVISSKINKHVEQHNIISEEQKGCRRGHMGCKEQLIIDSTIHKHASTKNRNLHCTFIDYKKAFDSIPHSWLVKILQIYKINSHIVDFLRLIMNRWKTTLQLNYLGNSVTTRQILIRKGIYQGDSLSPLWFCLALNPLSNMLNRSRVGYCLKHTSQDTVISHLIYMDDIKLYSKTEKDMKILINSTSQFSKDINMKFGLDKCKTLHVIRGKIKPGDYVVNDTDTIEAMEPNDVYKYLGYNQLKGLDHKTIKSSLNIEYRKRMNSLCKSQLSGKNLIKAINTYAVPILTYSFGIIKWTKTDIEQIERATRTTLTRHNNLHPKSAIERLTIKRQDGGRGLIDIHHLWQKQLSRLKTFFISKASSSEIHKAIAQNDDNYTPLNLKDQANTLNPSDSEPQVQKIENWKKKVLHGRHPHDLEQSHVDSVASNTWLKIGNLFPETEGFMIAIQDQIVNTKNYRKYIIKDPTIVNDKCRKCHTHPETIQHITGACTTLTQTDYTHRHNQVVNIVHQQLALKHKLIDYNTYTPYYKYTPQTVLENSTHKLYYDRAILTDRTVHYNRPDITLVDKINKTTYLIDVAVPNTHNLQKTIAEKISKYADLKEEVSRIWKQNKVFVIPIVLSTTGVIPKQLHSSLKIIDLKKSLYIMLQKAAILNTCRIVRKFMSADES

SEQ ID NO: 21511 - protein, 822 aa, Trichoplusia ni
MFYRNLTKPQSSGSIVENIGEIPSKEELESFWSGIWEKQVVHNDAAEWIKEEENKFDSIEEMDFVEVTERDITNITSRLHNWKAPGLDKIHNFWYKKLDLLHKSLAKNFTDIILGKQLIPEFIATGITYMLPKGTHSVNASQYRPITCLPTIYKILTSVISSKINKHVEQHNIISEEQKGCRRGHMGCKEQLVIDSTIHKHASTKNRNLHCTFIDYKKAFDSIPHSWLVKILQIYKINSHIVDFLRLIMNRWKTTLQLNYLGNSVTTRQILIRNGIYQGDSLSPLWFCLALNPLSNMLNRSRVGYCLKHTSQDTVISHLIYMDDIKLYSKTEKDMKILINSTSQFSKDINMKFGLDKCKTLHVIRGKIKPGDYVVNYTDTIEAMEPNDVYKYLGYNQLKGLDHKTIKSSLNIEYRKRMNSLCKSQLSGKNLIKAINTYAVPILTYSFGIIKWTKTDIEQIERATRTTLTRYNNLHPKSAIERLTIKRQDGGRGLIDIHHLWQKQLSRLKTFFISKASSIEIHKAIAQNDDNYTPLNLKDQANTLNPSDSEPQVQKIENWKKKVLHGRHPHDLEQSHVDSVASNTWLKIGNLFPETEGFMIAILDQIINTKNYRKYIIKDPTIVNDKCRKCHTHPETIQHITGACTTLTQTDYTHRHNQVVNIVHQQLALKHKLIDYNTYTPYYKYTPQTVLENSTHKLYYDRAILTDRTVHYNRPDITLVDKINKITYLIDGAVPNTHNLQKTIAEKISKYADLKEEVSRIWKQNKVFVIPIVLSTTGVIPKQLHSSLKILDLKKSLYIMLQKAAILNTCRIVRKFMSADES

SEQ ID NO: 21512 - protein, 994 aa, Trichoplusia ni
MDPTARPRLPKLKYSPKLSQLILAFNEKILCKFISEDTQLIDLHTLIYCTALVISKELNFKVTEYVENNRTKYNNKPSWQIRLEKDVEKLRADCGILTQYINNNRSNRVVKKVETIFKSRLIHTKHENNNKKPEEFLDTLKQKLALKVHRLRRYKKAEQRKNDNVLFSTNEKMFYRNLTKPQSSGSIVENIGEIPSKEELESFWSGIWEKQVVHNDAAEWIKEEENKFDSIEEMDFVEVTERDITNITSRLHNWKAPGLDKIHNFWYKKLDLFHKSLAKNFTDIILGKQLVPEFIATGITYMLPKGTHSVNASQYRPITCLPTIYKILTSVISSKINKHVEQHNIISEEQKGCRRGHMGCKEQLVIDSTIHKHASTKNRNLHCTFIDYKKAFDSIPHSWLVKILQIYKINSHIVDFLRLIMNRWKTTLQLNYLGNSVTTRQILIRKGIYQGDSLSPLWFCLALNPLSNMLNRSRVGYCLKHTSQDTVISHLIYMDDIKLYSKTEKDMKILINSTSQFSKDINMKFGLDKCKTLHVIRGKIKPGDYVVNDTDTIEAMEPNDVYKYLGYNHLKGLDHKTIKSSLNIEYRKRMNSLCKSQLSGKNLIKAINTYAVPILTYSFGIIKWTKTDIEQIERATRTTLTRYNNLHPKSAIERLTIKRQDGGRGLIDIHHLWQKQLSRLKTFFISKASSSEIHKAIAQNDDNYTPLNLKDQANTLNPSDSEPQVQKIENWKKKVLHGRHPHDLEQSHVDSVASNTWLKIGNLFPETEGFMIAIQDQIINTKNYRKYIIKDPTIVNDKCRKCHTHPETIQHITGACTTLTQTDYTHRHNQVVNIVHQQLALKHKLIDYNTYTPYYKYTPQTVLENSTHKLYYDRAILTDRTVHYNRPDITLVDKINKITYLIDVAVPNTHNLQKTIAEKISKYADLKEEVSRIWKQNKVFVIPIVLSTTGVIPKQLHSSLKIIDLKKSLYIMLQKAVILNTCRIVRKFMSADES

SEQ ID NO: 21513 - protein, 1299 aa, Endotricha flammealis
METRSKRKRIGPLPGGDRRGTPGADAGCLSMRTVGGEELNRRAPTTQDTTAEDTHTYTRDSPTLEPYSPSTASYTPSLPSSPSTVSADRHSPIPTLDVAREANAFLPESTKAGKSRVRMKWSNEVNIFIMRTYYLITSLETDMTTYRRKLYEIFSQQYPDVKVTEQRVADQRRTIVKNKLISQELLNRLKEEVRIQLQEIDNSANFNHTTLINIQEDYTMQPPDNNTHEQLTIISQPHFHVQTQPSPQTRSQNTQTTHISTQTESITLTLENDVEILTEDSILTAIHVQEIYDKFKATLTQYSGMDPAARPKLPKLKYSLKLIQLINLFNDNILNQFITEDTQLTDIHTIIYCTALTISTELNYKITDNITNLRPKNNKPPWQIRLERDIEKLRADCGRLTQYIHNSNISSRLVRKVEAIFKSKKVHSRHENDNKTPEEFLDTLKQKLTIKVNRLKRYKKAQQRRSDNVTFSTNEKVFYRNLKNPRTETNCADIPKEDHLETFWAGIWEEQAQHNDKAEWITEEERKWSTIDEMEFNQITELDVSNITSRLHNWKSPGIDKIHNYWYKKIYVLHKPIAKNLTDLILGKQTLPSFIATGITYMIPKSQYTALPSQYRPITCLPTIYKILTATIASKINTHIERYNIIAEEQKGCRRGHMGCKEQLIIDSIIHKHATTHNRNLHCTYIDYKKAFDSIPHSWLIQILQIYKINPKIVDFLQNIMPLWKTSLQLHTQKQHITTREISIRKGIYQGDSLSPLWFCLALNPLSHQLQCTQFGYHLKQSTSQTTISHLIYMDDIKLYARSEKDMKKLIEVTTEFSKDINMQFGLEKCKTLHIIKGKIQPGDIEINDSETIEAMDSNELYKYLGYKQLKGLDHKAIKNTVGNEYKRRIHTICKTQLSGKNLIKALNTYAIPVLTYSFGVIKWTKTDIEQLQRSTRTILTKHNNLHPKSATERLTIKRQYGGRGMIDIGHLWEKQISTLQTFFHTKSHTSDIHKTIAHNDHNYTPLNLHDLTYTQNTRNDNDPQKKKIEEWKKKVLHGRHPHDLEQPNIDTLASNKWLKSGNLFPETEGFIIAIQDQIINTKNYRKYIIKDPTVANDKCRKCHTQPETIQHITGACTILTQTDYTHRHNQIANIIHQKLALKHTLIQNTNTPYYKYTPQTILENTSHKLYYDRAILTDKTIHYNRPDITLQDKANKTTYLIDIAVPNTHNLQKTITEKINKYADLREEIIRIWKQEKVYVVPIVLSTTGVIPNHLHSSLKLIDLPSSLYIIMQKAAILNTCRIVRKFLQIDENQNTTS

SEQ ID NO: 21514 - protein, 1302 aa, Endotricha flammealis
METRSKKKRIGPLPGGDRRGTPGADAGCLSMRTVGGEELSRRAPTTQDTTAEDTHTYTRDSPTLEPYSPSTASYTPSLPSSPSTVSADRHSPIPTLDVAREANAFLPESTKAGKSRVRMKWSNEVNIFIMRTYYLITSLETDMTTYRRKLYEIFSQQYPDVKVTEQRVADQRRTIVKNKLISQELLNRLKEEVRIQLQEIDITANINHTTLINIQEDYTMQPPDNNTHEQLTIISQPHLHVQTQPSPQTQTRSQNTQTTHISTQTESITLTLENDVEILTEDSNLTAIHVQEIYDKFKATLTQYSGMDPAARPKLPKLKYSLKLIQLINLFNDNILNQFITEDTQLTDIHTIIYCTALTISTELNYKITDNITNLRPKNNKPPWQIRLERDIEKLRADCGRLTQYIHNSNISSRLVRKVEAIFKSKKVHSRHENDNKTPEEFLDTLKQKLTIKVNRLKRYKKAQQRRSDNVTFSTNEKVFYRNLKNPRTETTNCADIPKEDHLETFWAGIWEEQAQHNDKAEWITEEERKWSTIDEMEFNQITELDVSNITSRLHNWKAPGIDKIHNYWYKKLYVLHKPIAKNLTDLILGKQTLPSFIATGITYMIPKSQYTAQPSQYRPITCLPTIYKILTATIASKINTHIERYNIIAEEQKGCRRGHMGCKEQLIIDSIIHKHATTHNRNLHCTYIDYKKAFDSIPHSWLIQILQIYKINPKIVDFLQNIMPLWKTTLQLHTQKQHITTREISIRKGIYQGDSLSPLWFCLALNPLSHQLQCTQFGYHLKQSTSQTTISHLIYMDDIKLYARSEKDMKKLIEVTTEFSKDINMQFGLEKCKTLHIIKGKIQPGDIEINDSETIEAMDSNELYKYLGYKQLKGLDHKAIKNTVGNEYKRRIHTICKTQLSGKNLIKALNTYAIPVLTYSFGVIKWTKTDIEQLQRSTRTILTKHNNLHPKSATERLTIKRQYGGRGMIDIGHLWEKQISTLQTFFHTKSHTSDIHKTIAHNDHNYTPLNLHDLTYTQNTRNDNDPQKKKIEEWKKKVLHGRHPHDLEQPNIDTLASNKWLKSGNLFPETEGFIIAIQDQIINTKNYRKYIIKDTTVANDKCRKCHTQPETIQHITGACTTLTQTDYTHRHNQIANIIHQKLALKHTLIQNTNTPYYKYTPQTILENTSHKLYYDRAILTDKTIHYNRPDITLQDKANKTTYLIDIAVPNTHNLQKTITEKINKYADLREEIIRIWKQEKVYVVPIVLSTTGVIPNHLHSSLKLIDLPSSLYIIMQKAAILNTCRIVRKFLQIDENQNTTS

SEQ ID NO: 21515 - protein, 1302 aa, Endotricha flammealis
METRSKRKRIGPLPGGDRRGTPGADAGCLSMRTVGDEELNRRAPTTQDTTAEDTHTYTRDSPTLEPYSPSTASYTPSLPSSPSTVSADRHSPIPTLDVAREANAFLAESTKAGKSRVRMKWSNEVNIFIMRTYYLITSLETDMTTYRRKLYEIFSQQYPDVKVTEQRVADQRRTIVKNKLISQELLNRLKEEVRIQLQEIDNTANFNHTTLINIQEDYTMQPPDNNTHEQLTIISQPHLHVQTQPSPQTQTRSQNTQTTHISTQTESITLTLENDVEILTEDSILTAIHVQEIYDKFKATLTQYSGMDPAARPKLPKLKYSLKLIQLINLFNDNILNQFITEDTQLTDIHTIIYCTALTISTELNYKITDNITNLRPKNNKPPWQKRLERDIEKLRADCGRLTQYIHNSNISSRLVRKVEAIFKSKKVHSRHENDNKTPEEFLDTLKQKLTIKVNRLKRYKKAQQRRSDNVTFSTNEKVFYRNLKNPRTETTNCADIPKEDHLETFWAGIWEEQAQHNDKAEWITEEERKWSTIDEMEFNQITELDVSNITSRLHNWKSPGIDKIHNYWYKKLYVLHKPIAKNLTDLILGKQTLPSFIATGITYMIPKSQYTALPSQYRPITCLPTIYKILTATIASKINTHIERYNIIAEEQKGCRRGHMGCKEQLIIDSIIHKHATTHNRNLHCTYIDYKKAFDSIPHSWLIQILQIYKINPKIVNFLQNIMPLWKTTLQLHTQKQHITTREISIRKGIYQGDSLSPLWFCLALNPLSHQLQCTQFGYHLKQSTSQTTISHLIYMDDIKLYARSEKDMKKLIEVTTEFSKDINMQFGLEKCKTLHIIKGKIQPGDIEINDSETIEAMDSNELYKYLGYKQLKGLDHKAIKNTVGNEYKRRIHTICKTQLSGKNLIKALNTYAIPVLTYSFGVIKWTKTDIEQLQRSTRTILTKHNNLHPKSATERLTIKRQYGGRGMIDIGHLWEKQISTLQTFFHTKSHTSDIHKTIAHNDHNYTPLNLHDLTYTQNTRNDNDPQKKKIEEWKKKVLHGRHPHDLEQPNIDTLASNKWLKSGNLFPETEGFIIAIQDQIINTKNYRKYIIKDPTVANDKCRKCHTQPETIQHITGACTTLTQTDYTHRHNQIANIIHQKLALKHTLIQNTNTPYYKYTPQTILENTSHKLYYDRAILTDKTIHYNRPDITLQDKANKTTYLIDIAVPNTHNLQKTITEKINKYADLREEIIRIWKQEKVYVVPIVLSTTGVIPNHLHSSLKLIDLPSSLYIIMQKAAILNTCRIVRKFLQIDENQNTTS

SEQ ID NO: 21516 - protein, 1299 aa, Ernsta colotes
METRSMKKQRSGPLPGGDRRGTPGADAGCHSMRSVSGEELNRRASTGSSENATAEIDIITDRSTPITPYSPSTVSYTPSVPTSPSTSLSSSKPESPIRTLDVAQGANAFLPASTKAGKPRVRMRWSEEVNLFIMRTYYYITKLETDLTTYRKQLYEHFSRQYPDIKVTEQRIADQRRTIVKNKRINEETLNQLKEEVKLQLEIDRQNEIHTDSSIPTDSHIIQNNSQTQISSQNILLNEPIQNSQTSHTFTLNDSTALLLGKDTNPHEDLNCNPDINIQEIHDLFRTILVKYSAIDPIDRPKLPKLKYSPKLFQLIKIFNNNILGQFISDTIQISDIHTIIYCTALVISEKLDYKIIDYTQNIRIKDQKKPSWQRRIEKDIERLRADCARVTQYINGNRSSKIIKHVETIFKSKIIHTTHEKNNKKPEEFLDTLKQKLAVKVNRLRRYKKALQRKNDNSIFSANEKIFYRNLRNPQTDIAESNTEIPTEEQLEAFWSGIWEEQVQHKEEAEWITEEKVKWNTIEEMEFTAITESDITNITNRLHNWKSPGVDKIHNFWYKKLFSLHKAIAKIFTDIILGKQEVPEFITTGITYMLPKSKYSPEPSQYRPITCLPTIYKILTSTITLKINKHIEQYNIIAEEQKGCRLGHMGCKEQLIIDSTIHKHATSRNKNLHCTYIDYKKAFDSIPHSWLIRILEIYKINSKIINFLSNIMPRWKTTLNLCTRQKSVKTRQIYIKKGIFQGDSLSPLWFCLALNPLSHMLNHSQVGYCLKHDETDTIISHLIYMDDIKLYANSETNIKKLLDITTRFSKDINMDFGLDKCKLLHIKQGKVLPGDYTLNNIETISALEPTDVYKYLGYKQLKGLNHTTIKETLTTEYTKRINALCRTQLSGKNLFKSFNTYAIPVLTYSFGIVKWTKTDIDRLERITRTTLTKYNYSHPKSAIERITIKRQDGGRGLIDINQLWQKQITSLKSFFVQKSQTSDIHKAIVHNDHNYTPLNLKEATNTLHTQTINNSNNAHTQKIEDWRKKSLHGRHRHDLEQPHVDTIASNKWLQIGNLFPETEGFMIAIQDQIINTKNYRKHIIKDPKTTSDKCRKCHTQSETIQHITGACTTLTQTDYTHRHNQIVNIIHQKLALKHKLIQDTKTPYYQYNPQTVLENKTHKLYYDRAILTDKTIHYNRPDITLQDKINKLTYLIDIAVPNTHNIQKTITEKISKYTELQEEVARIWKQDKVLIVPIVVSTTGVIPKHLKHSLNQLNLNENTYILLQKAAILNTCRIVRKFLKIEETEILSNHLTSN

SEQ ID NO: 21517 - protein, 1315 aa, Amphipyra tragopoginis
METRSKRKRIGPLPGGDRRGTPGAGAGCLSMRTVSGEELNRRTPTDKDATAEIIDDGDRLSDRTNTPVEPYSPSTMSYTPSSPSIPSSPPIISLNTVPPTPTLNVTREVCSFLPASTKAGKARVRMKWSKEVNLFIMRTYLQITKLETDLTTYRQQLHELFSRKYPEISVTEQRISDQRRTIVRNKLLSQEVIDQLKEEVRTQLQEESERNAANNTNTLTQNTTEYIGQTQPQIDTQSQTNTQTNIQTQSHYQSQASSQNTYTSHTSTQTESITITLENDIETLADIDQNQSTDARIQEIHDNFKTALTQYSGINPAARPKLPKLRYTPKLHQLVHLFNQNILNQYISEETQLTDVHTLIYCTALVISEELNYKITEYTGNTRSRNSNKPAWQYRLEKDIEKLRADCSRLTQYINNNRSNKVVKRVEAIFKNTTIHTRHENDNRKPEEFLDTLKQKLALKVRRLRRYKKAQERKNDNSLFATNEKSFYRNLQKQQTDTTTENEIELPTAEQLETFWSGIWEEQVQHNEKSGWITDEETRWSSLEQMEFVEITESDITNITARLHNWKSPGIDKIHNYWYKKLESLHKVLAKNLTDIILGKQNIPEFIATGITYMLPKSQYSPQPSQYRPITCLPTIYKILTSAITTKINKHIEHHNIIAEEQKGCRRGHMGCKEQLVIDSVIHKHAATKNRNLHCTYIDYKKAFDSIPHSWLIQILQIYKINPKIIEFLQNIMSRWKTTLQLNYRHNAVTTRQISIKKGIYQGDSLSPLWFCLAMNPLSYLLQRAQAGYCLKLTTEETIISHLIYMDDIKLYAKTEKEMKKLIETTTEFSKDINMQFGLEKCKTVHIIRGKIKPGDYLINNTDTITAMEPTDLYKYLGYRQLKGLDHTAIKQTLNTEYKRKVTAVCKTQLAGKYLIKALNTYAIPILTYSFGVIKWSKSDIQQIERTTRTTLTKHNNLHPKSAIERMTIKRQYGGRGLIDIHHLWQKQIARLRTFFHTKSHTSNIHKAVVINDLKYTPLNLNEYNTTHDTQHSNNDDPQKQKLEDWKKKVLHGRHPHDLEQPHIDTIASNKWLKIGNLFPETEGFIIAIQDQIINTKNYRKFIIKDPTITNDKCRKCHSQPETIQHITGACTTLTQTDYTHRHNQVANVIHQKLALKHKLIQDTNTPYYKYTPQTVLENTTHKLYYDRAILTDRTVHYNRPDITLQDKVNKVTYLIDIAVPNTHNLQKTIGEKISKYAELKEEVTRIWRQEKVFVVPIVVSTTGVIPNHLHHSLKLIDLKDSIYITLQKAAILNTCRIVRKFMQIEENEITLHSS

SEQ ID NO: 21518 - protein, 1319 aa, Amphipyra tragopoginis
METRSKRKRIGPLPGGDRRGTPGAGAGCLSMRTVSGEELNRRTPTDKDATAEIIDDGDRLSDRTNTPVEPYSPSTMSYTPSSPSIPSSPPIISLNTVPPTPTLNVTREVCSFLPASTKAGKARVRMKWSKEVNLFIMRTYLQITKLETDLTTYRQQLHELFSRKYPEISVTEQRISDQRRTIVRNKLLSQEVIDQLKEEVRSQLQEESERNAANNTNTLTQNTTEYIGQTQPQIDTQSQTNTQTQSQTNIQTQSHYQSQASSQNTYTSHTSTQTESITITLENDIETLADIDQNQSTDARIQEIHDNFKTALTQYSGINPAARPKLPKLRYTPKLHQLVHLFNQNILNQYISEETQLTDVHTLIYCTALVISEELNYKITEYTGNTRSRNSNKPAWQYRLEKDIEKLRADCSRLTQYINNNRSNKVVKRVEAIFKNTTIHTRHENDNRKPEEFLDTLKQKLALKVHRLRRYKKAQERKNDNSLFATNEKSFYRNLQKQQTDTTTENEIELPTAEQLETFWSGIWEEQVQHNEKSGWITDEETRWSSLEEMEFVEITESDITNITARLHNWKSPGIDKIHNYWYKKLESLHKVLAKNLTDIILGKQNIPEFIATGITYMLPKSQYSPQPSQYRPITCLPTIYKILTSAITTKINKHIEHHNIIAEEQKGCRRGHMGCKEQLVIDSIIHKHAATKNRNLHCTYIDYKKAFDSIPHSWLIQILQIYKINPKIIDFLQNIMSRWKTTLQLNYRHNAVTTRQISIKKGIYQGDSLSPLWFCLAMNPLSYLLQRAQAGYCLKLTTEETIISHLIYMDDIKLYAKTEKEMKKLIDTTTEFSKDINMQFGLDKCKTVHIIRGKIKPGDYLINNTDTITAMEPTDLYKYLGYRQLKGLAHTAIKQTLNTEYKRRVTAVCKTQLAGKYLIKALNTYAIPILTYSFGVIKWSKSDIQQIERTTRTTLTKHNNLHPKSAIERMTIKRQYGGRGLIDIHHLWQKQIARLRTFFHTKSHTSNIHKAVVINDLKYTPLNLNEYNTTHDTQHSNNDDPQKQKLEDWKKKVLHGRHPHDLEQPHIDTIASNKWLKIGNLFPETEGFIIAIQDQIINTKNYRKFIIKDPTITNDKCRKCHSQPETIQHITGACTTLTQTDYTHRHNQVANVIHQKLALKHKLIQDTNTPYYKYTPQTVLENTTHKLYYDRAILTDRTVHYNRPDITLQDKVNKITYLIDIAVPNTHNLQKTIGEKISKYAELKEEVTRIWRQEKVFVVPIVVSTTGVIPNHLHHSLKLIDLKDSIYITLQKAAILNTCRIVRKFMQIEENEITLHSS

SEQ ID NO: 21519 - protein, 1319 aa, Amphipyra tragopoginis
METRSKRKRIGPLPGGDRRGTPGAGAGCLSMRTVSGEELNRRTPTDKDATAEIIDDGDRLSDRTNTPVEPYSPSTMSYTPSSPSIPSSPPIISLNSVPPTPTLNVTREVCSFLPASTKAGKARVRMKWSKEVNLFIMRTYLQITKLETDLTTYRQQLHELFSRKYPEISVTEQRISDQRRTIVRNKLLSQEVIDQLKEEVRTQLQEESERNAANNTNTLTQNTTEYIGQTQPQIDTQSQTNTQTQPQTNIQTQSHYQSQASSQNTYTSHTSTQTESITITLENDIETLADIDQNQSTDARIQEIHDNFKTALTQYSGINPAARPKLPKLRYTPKLHQLVHLFNQNILNQYITEETQLTDVHTLIYCTALVISEELNYKITEYTGNTRSKNSNKPAWQHRLEKDIEKLRADCSRLTQYINNNRSNKVVKRVEAIFKNTIIHTRHENDNRKPEEFLDTLKQKLALKVHRLRRYKKAQERKNDNSLFATNEKSFYRNLQKQQTDTTTENGIELPTAEQLETFWSGIWEEQVQHNEKSGWITDEETRWSSLEEMEFVEITESDITNITARLHNWKSPGIDKIHNYWYKKLESLHKVLAKNLTDIILGKQNIPEFIATGITYMLPKSQYSPQPSQYRPITCLPTIYKILTSAITTKINKHIEHHNIIAEEQKGCRRGHMGCKEQLVIDSVIHKHAATKNRNLHCTYIDYKKAFDSIPHSWLIQILQIYKINPKIIEFLQNIMSRWKTTLQLNYRHTAVTTRQISIKKGIYQGDSLSPLWFCLAMNPLSYLLQRAQAGYCLKLTTEETIISHLIYMDDIKLYAKTEKEMKKLIETTTEFSKDINMQFGLDKCKTVHIIRGKIKPGDYLINNTDTITAMEPTDLYKYLGYRQLKGLDHTAIKQTLNTEYKRRVTAVCKTQLAGKYLIKALNTYAIPILTYSFGVIKWSKSDIQQIERTTRTTLTKHNNLHPKSAIERMTIKRQYGGRGLIDIHHLWQKQIARLRTFFHTKSHTSNIHKAVVINDLKYTPLNLNEYNTTHDTQHFNNDDPQKQKLEDWKKKVLHGRHPHDLEQPHIDTIASNKWLKIGNLFPETEGFIIAIQDQIINTKNYRKFIIKDPTITNDKCRKCHSQPETIQHITGACTTLTQTDYTHRHNQVANVIHQKLALKHKLIQDTNTPYYKYTPQTVLENTTHKLYYDRAILTDRTVHYNRPDITLQDKVNKVTYLIDIAVPNTHNLQKTIGEKISKYAELKEEVTRIWRQEKVFVVPIVVSTTGVIPNHLHHSLKLIDLKDSIYITLQKAAILNTCRIVRKFMQIEENEITLHSS

SEQ ID NO: 21520 - protein, 1319 aa, Amphipyra tragopoginis
METRSKRKRIGPLPGGDRRGTPGAGAGCLSMRTVSGEELNRRTPTDKDATAEIIDDGDRLSDRTNTPVEPYSPSTMSYTPSSPSIPSSPPIISLNTVPPTPTLNVTREVCSFLPASTKAGKARVRMKWSKEVNLFIMRTYLQITKLETDLTTYRQQLHELFSRKYPEISVTEQRISDQRRTIVRNKLLSQEVIDQLKEEVRTQLQEESERNAANNTNTLTQNTTEYIGQTQPQIDTQSQTNTQTQSQTNIQTQSHYQSQAFSQNTYTSHTSTQTESITITLENDIETLADIDQNQSTDARIQEIHDNFKTALTQYSGINPAARPKLPKLRYTPKLHQLVHLFNQNILNQYISEETQLTDVHTLIYCTALVISEELNYKITEYTGNTRSRNINKPAWQYRLEKDIEKLRADCSRLTQYINNNRSNKVVKRVEAIFKNTSIHTRHENDNRKPEEFLDTLKQKLALKVHRLRRYKKAQERKNDNSLFATNEKSFYRNLQKQQTDTTTENEIELPTAEQLETFWSGIWEEQVQHNEKSGWITDEETRWSSLEEMEFVEITESDITNITARLHNWKSPGIDKIHNYWYKKLESLHKVLAKNLTDIILGKQNIPEFIATGITYMLPKSQYSPQPSQYRPITCLPTIYKILTSAITTKINKHIEHHNIIAEEQKGCRRGHMGCKEQLVIDSVIHKHAATKNRNLHCTYIDYKKAFDSIPHSWLIQILKIYKINPKIIDFLQNIMSRWKTTLQLNYRHNAVTTRQISIKKGIYQGDSLSPLWFCLAMNPLSYLLQRAQAGYCLKLTTEETIISHLIYMDDIKLYAKTEKEMKKLIETTTEFSKDINMQFGLDKCKTVHIIRGKIKPGDYLINNTDTITAMEPTDLYKYLGYRQLKGLDHTAIKQTLNTEYKRRVTAACKTQLAGKYLIKALNTYAIPILTYSFGVIKWSKSDIQQIERTTRTTLTKHNNLHPKSAIERMTIKRQYGGRGLIDIHHLWQKQIARLRTFFHTKSHTSNIHKAVVINDLKYTPLNLNEHDTTHDTQHSNNDDPQKQKLEDWKKKVLHGRHPHDLEQPHIDTIASNKWLKIGNLFPETEGFIIAIQDQIINTKNYRKFIIKDPTITNDKCRKCHSQPETIQHITGACTTLTQTDYTHRHNQVANVIHQKLALKHKLIQDTNTPYYKYTPQTILENTTHKLYYDRAILTDKTVHYNRPDITLQDKVNKVTYLIDIAVPNTHNLQKTIGEKISKYAELKEEVTRIWRQEKVFVVPIVVSTTGVIPNHLHHSLKLIDLKDSIYITLQKAAILNTCRIVRKFMQIEENEITPHPS

SEQ ID NO: 21521 - protein, 1319 aa, Amphipyra tragopoginis
METRSKRKRIGPLPGGDRRGTPGAGAGCLSMRTVSGEELNRRTPTDKDATAEIIDDGDRLSDRTNTPVEPYSPSTMSYTPSSPSIPSSPPIISLNTVTPTPTLNVTREVCSFLPASTKAGKARVRMKWSKEVNLFIMRTYLQITKLETDLTTYRQQLHELFSRKYPEISVTEQRISDQRRTIVRNKLLSQEVIDQLKEEVRTQLQEESERNAANNTNTLTQNTTEYIGQTQPQIDTQSQTNTQTQSPTNIQTQSHYQSQTSSQNTYTSHTSTQTESITITLENDIETLADIDQNQSTDARIKEIYDNFKTALTQYSGINPAARPKLPKLRYTPKLHQLVHLFNQNILNQYITEETQLTDVHTLIYCTALVISEELNYKITEYTGNTRSKNSNKPAWQHRLEKDIEKLRADCSRLTQYINNNRSNKVVKRVEAIFKNTTIHTRHENDNRKPEEFLDTLKQKLALKVHRLRRYKKAQERKNDNSLFATNEKSFYRNLQKQQTDTTTENEIELPTAEQLETFWSGIWEEQVQHNEKSGWITDEETRWSSLEEMEFVEITESDITNITARLHNWKSPGIDKIHNYWYKKLESLHKVLAKNLTDIILGKQNIPKFIATGITYMLPKSQYSPQPSQYRPITCLPTIYKILTSAITTKINKHIEHHNIIAEEQKGCRRGHMGCKEQLVIDSVIHKHAATKNRNLHCTYIDYKKAFDSIPHSWLIQILQIYKINPKIIEFLQNIMSRWKTTLQLNYRHNAVTTRQISIKKGIYQGDSLSPLWFCLAMNPLSYLLQRAQAGYCLKLTTEETIISHLIYMDDIKLYAKTEKEMKKLIETTTEFSKDINMQFGLDKCKTVHIIRGKIKPGDYLINNTDTITAMEPTDLYKYLGYRQLKGLDHTAIKQTLNTEYKRRVTAVCKTQLAGKYLIKALNTYAIPILTYSFGVIKWSKSDIQQIERTTRTTLTKHNNLHPKSAIERMTIKRQYGGRGLIDIHHLWQKQIARLRTFFHTKSHTSNIHKAVVINDLKYTPLNLNEYNTTHDTQHFNNDDPQKQKLEDWKKKVLHGRHPHDLEQPHIDTIASNKWLKIGNLFPETEGFIIAIQDQIINTKNYRKFIIKDPTITNDKCRKCHSQPETIQHITGACTTLTQTDYTHRHNQVSNVIHQKLALKHKLIQDTNTPYYKYTPQTVLENTTHKLYYDRAILTDRTVHYNRPDITLQDKVNKVTYLIDIAVPNTHNLQKTIGEKISKYAELKDEVTRIWRQEKVFVVPIVVSTTGVIPNHLHHSLKLIDLKDSIYITLQKAAILNTCGIVRKFMQIEENEITLHSS

SEQ ID NO: 21522 - protein, 764 aa, Anthocharis cardamines
MEFVEITETDIKNITDRLHNWKSPGIDKIHNYWFKKLTILHKSLAKNLTEIILGQQNIPEFIATGITYMLPKSQYSPQPSQYRPITCLPTIYKLLTSALTTKINTHIEHYNIIAEEQKGCRRGHMGCKEQLIIDSTIHKHATTKNRNLHCTYIDYKKAFDSIPHSWLIQILQIYKINSKIVDFLRSIMTQWKTTLQLSTHNKSVATRQISIKKGIYQGDSLSPLWFCLALNPLSHLLHCSRAGYQIKHNNKDNIAISHLIYMDDIKLYAKSEKDMKKLIDTTTLFSKDIKMEFGLEKCKTLHIIKGKIRPGDYVINEAETITAMESNDFYKYLGYRQLKGLDHTVIKQTLSAEYKKRLNMLCKTQLSGKNLIKSINTYAIPILTYSFGIIKWTKTNIEQLERSTRTTLTKYNNLHPKSAIERLTIKRPNGGRGLIDIHHLWKKQIINLRSFFQTKSHTSSIHKAITQIDQNYTPLNLNNNDDITNVPSDPQKQKIEDWRKKILHGRHLKDLEQPHVDTVASNKWLKIGNLFPETEGFIIAIQDQIINTKNYRKHIIKDPTIINDKCRKCHIQPETIQHITGACTTLTQTDYTHRHNQVANIIHQKLALKHRLIQNTNTPYYKYSPDTVLENDSYKLYYDRAILTDKTIHNNRPDITLQDKINKTTYLIDIAVPNTHNLQKTITEKINKYTELKEEVSRIWRQEKVYIVPIVLSSTGVIPNHMKHSLKLLKLNNTEYIPLQKAAILNTCRIVRKFLQDDDHIIST

SEQ ID NO: 21523 - protein, 1297 aa, Anthocharis cardamines
MVHTRNSTKRPQVPGGPSSSTGYDGSQPEPWSRGAKNLRVRSISRQTTQATTMDSDMQHDKPSDKNNRRTDTTTPEEPYSPSTASYTPSVPTSPSSHSLNSNSPIPFSDVTREVNSFLPASTKAGKPRVRMRWSKDVNIFIMRTYYFITKLETDLTTYRKQLHELFTRQYPEVNVTEQRISDQRRTIIRNKLLDQETLNQLKEEVQTQLQIINQNIDTTEKDTPRHNQDENSSQPHINLETSLSTNNTQTAHTSSQMEPLSIILENETETITDNDTISEVHTQDICEKFRITLLDYSETDPVSRPKLPKLKYSHQLDKLVLLFNNSILKQFISENAQLIDIHTIIYCTALVISEELNYKVARHPQKDDQTSQPRIRTEPPWQIRLKKDIEKLRADCGRLTQYINNNRSRKLVKKVEDIFRNRITHTRHENNNRKPEEYLDTLKQNLALKVHRLRRYEKAQKRKKDNTTFATNQKQFYRNLNKTQTNTHVESNQDIPSKEQLELFWSGIWEEQIEHNDKADWITEEKNKWRTVEEMEFVEITETDIKNITDRLHNWKSPGIDKIHNYWFKKLTILHKSLAKNLTEIILGQQNIPEFIATGITYMLPKSQYSPQPSQYRPITCLPTIYKLLTSALTTKINTHIEHYNIIAEEQKGCRRGHMGCKEQLIIDSTIHKHATTKNRNLHCTYIDYKKAFDSIPHSWLIQILQIYKINSKIVDFLRSIMTQWKTTLQLSTHNKSVATRQIFIKKGIYQGDSLSPLWFCLALNPLSHLLHCSRAGYQIKHNNKDNIAISHLIYMDDIKLYAKSEKDMKKLIDTTTQFSKDIKMEFGLEKCKTLHIIKGKIRPGDYVINDAETITAMESNDFYKYLGYRQLKGLDHTVIKQTLSAEYKKRLNMLCKTQLSGKNLIKSINTYAIPILTYSFGIIKWTKTNIEQLERSTRTTLTKYNNLHPKSAIERLTIKRPNGGRGLIDIHHLWKKQIINLRSFFQTKSHTSSIHKAITQIDQNYTPLNLNNNDDITNVPSDPQKQKIEDWRKKILHGRHLKDLEQPHVDTVASNKWLKIGHLFPETEGFIIAIQDQIINTKNYRKHIIKDPTIINDKCRKCHIQPETIQHITGACTTLTQTDYTHRHNQVANIIHQKLALKHRLIQNTNTPYYKYSPDTVLENDSYKLYYDRAILTDKTIHNNRPDITLQDKINKTTYLIDIAVPNTHNLQKTITEKINKYTELKEEVSRIWRQEKVYIVPIVLSSTGVIPNHMKHSLKLLKLNNTEYIPLQKAAILNTCRIVRKFLQDDDHIST

SEQ ID NO: 21524 - protein, 1297 aa, Anthocharis cardamines
MVHTRNSTKRPQVPGGPSSSTGSDGSQPEAWSRGAKNLRVRSISRQTTQATTTDSDMQHDKPSDKNNRRTDTTTPEEPYSPSTASYTPSVPTSPSSNSLNSNSPIPFSDVTREVSSFLPASTKAGKPRVRMRWSKDVNIFIMRTYYFITKLETDLTTYRKQLHELFTRQYPEVNVTEQRISDQRRTIIRNKLLDQETLNQLKEEVQTQLQIINQNIDTTEIETPRHNQDENSSQPHINLETSLSTNNTQTAHTSSQMEPLSIILENETETITDNDTISEVHTQDICEKFRITLLDYSETDPVSRPKLPKLKYSHQLDKLVLLFNNSILKQFISENAQLIDIHTIIYCTALVISEELNYKVARHPQKDDQTSQPRIRTEPPWQIRLKKDIEKLRADCGRLTQYINNNRSRKLVKKVEDIFRNRITHTRHENNNRKPEEYLDTLKQKLALKVHRLRRYEKAQKRKKDNTTFATNQKQFYRNLNKTQTNTHVESNQDIPSKEQLELFWSGIWEEQIEHNDKADWITEEKNKWRTVEEMEFVEITETDIKNITDRLHNWKSPGIDKIHNYWFKKLTILHKSLAKNLTEIILGQQNIPEFIATGITYMLPKSQYSPQPSQYRPITCLPTIYKLLTSALTTKINTHIEHNNIIAEEQKGCRRGHMGCKEQLIIDSTIHKHATTKNRNLHCTYIDYKKAFDSIPHSWLIQILQIYKINSKIVDFLRSIMTQWKTTLQLSTHNKSVATRQISIKKGIYQGDSLSPLWFCLALNPLSHLLHCSRAGYQIKHNNKDNIAISHLIYMDDIKLYAKSEKDMKKLIDTTTQFSKDIKMEFGLEKCKTLHIIKGKIRPGDYVINDAEKITAMESNDFYKYLGYRQLKGLDHTVIKQTLSAEYKKRLNMLCKTQLSGKNLIKSINTYAIPILTYSFGIIKWTKTNIEQLERSTRTTLTKYNNLHPKSAIERLTIKRPNGGRGLIDIHHLWKKQIINLRSFFQTKSHTSSIHKAITQIDQNYTPLNLNNNDDITNVPSDPQKQKIEDWRKKILHGRHLKDLEQPHVDTVASNKWLKIGNLFPETEGFIIAIQDQIINTKNYRKHIIKDPTIINDKCRKCHIQPETIQHITGACTTLTQTDYTHRHNQVANVIHQKLALKHRLIQNTNTPYYKYSPDTVLENDSYKLYYDRAILTDKTIHNNRPDITLQDKINKTTYLIDIAVPNTHNLQKTITEKINKYTELKEEVSRIWRQEKVYIVPIVLSSTGVIPNHMKHSLKLLKLNNTEYIPLQKAAILNTCRIVRKFLQDDDHIST

SEQ ID NO: 21525 - protein, 1297 aa, Anthocharis cardamines
MVHTRNSTKRPQVPGGPSSSTGSDGSQPEAWSRGAKNLRVRSISRQTTQATTTDSDMQHDEPSDKNNRQTDTTTPEEPYSPSTASYTPSVPTSPSSNSLNSNSPIPFSDVTREVNSFLPASTKAGKPRVRMRWSKDVNIFIMRTYYFITKLETDLTTYRKQLHELFTRQYPEVNVTEQRISDQRRTIIRNKLLDQETLNQLKEEVQTQLQIINQNIDTTEIDTPRHNQDENSSQPHINLETSLSTHNTQTSHTPSQMEPLSIILENETETITDNDTISEVHTQDICEKFRITLLDYSETDPVSRPKLPKLKYSHQLDKLVLLFNNSILKQFISENAQLIDIHTIIYCTALVISEELNYKVARHPQKDDQTSQPRIRTEPPWQIRLKKDIEKLRADCGRLTQYINNNRSRKLVKKVEDIFRNRITHTRHENNNRKPEEYLDTLKQKLALKVHRLRRYEKAQKRKKDNTTFATNQKQFYRNLNKTQTNTHVECNQDIPSKEQLELFWSGIWEEQIEHNDKACWITEEKNKWRTVEEMEFVEITETDIKNITDRLHNWKSPGIDKIHNYWFKKLTILHKSLAKNLTEIILGQQNIPEFIATGITYMLPKSQYSPQPSQYRPITCLPTIYKLLTSALTTKINTHIEHYNIIAEEQKGCRRGHMGCKEQLIIDSTIHKHATTKNRNLHCIYIDYKKAFDSIPHSWLIQILQIYKINSKIVDFLRSIMTQWKTTLQLSTHNKTVATRQISIKKGIYQGDSLSPLWFCLALNPLSHLLHCSRAGYQIKHNNKDNIAISHLIYMDDIKLYAKSEKDMKKLIDTTTQFSKDIKMEFGLEKCKTLHIIKGKIRPGDYVINDAETITAMESNDFYKYLGYRQLKGLDHTVIKQTLSAEYKKRLNMLCKTQLSGKNLIKSINTYAIPILTYSFGIIKWTKTNIEQLERSTRTTLTKYNNLHPKSAIERLTIKRPNGGRGLIDIHHLWKKQIINLRSFFQTKSHTSSIHKAITQNDQNYTPLNLNNNDAITNVPSDPQKQKIEDWRKKILHGRHLKDLEQPHVDTLASNKWLKIGNLFPETEGFIIAIQDQIINTKNYRKHIIKDPTIINDKCRKCHIQPETIQHITGACTTLTQTDYTHRHNQVANIIHQKLALKHRLIQNTNTPYYKYSPDTVLENDSYKLYYDRAILTDKTIHNNRPDITLQDKINKTTYLIDIAVPNTHNLQKTITEKINKYTELKEEVSRIWRQEKVYIVPIVLSSTGVIPNHMKHSLKLLKLNNTEYIPLQKAAILNTCRIVRKFLQDDDHIST

SEQ ID NO: 21526 - protein, 1293 aa, Anthocharis cardamines
MVHTRNSTKRPQVPGGPSSSTGSDGSQPEAWSRGAKNLRVRSISRQTTQATTTDSDMQHDKPSDKNNRRTDTTTPEEPYSPSTASYTPSPSSNSLNSNSPIPFSDVTREVNSFLPASTKAGKPRVRMRWSKDVNIFIMRTYYFITKLETDLTTYRKQLHELFTRQYPEVKVTEQRISDQRRTIIRNKLLDQETLNQLKEEVQTQLQIINQNIDTTEIDTPRHNQDENSSQPHINLETSLSTNNTQTAHTSSQMEPLSIILENETETITDNDTISEVHTQDICEKFRITLLDYSETDPVSRPKLPKLKYSHQLDKLVLLFNNNILKQFISENAQLIDIHTIIYCTALVISEELNYKVARHPQKDDQTSQPRIRTEPPWQIRLKKDIEKLRADCGRLTQYINNNRSRKLVKKVEDIFRNRITHTRHENNNRKPEEYLDTLKQKLALKVHRLRRYEKAQKRKKDNTTFATNQKQFYRNLNKTQTNTHVESNQDIPSKEQLELFWSGIWEEQIEHNDKADWITEEKNKWRTVEEMEFVEITETDIKNITDRLHNWKSPGIDKIHNYWFKKLTILHKSLAKNLTEIILGQQNIPEFIATGITYMLPKSQYSPQPSQYRPITCLPTIYKLLTSALTTKINTHIEHYNIIAEEQKGCRRGHMGCKEQLIIDSTIHKHATTKNRNLHCTYIDYKKAFDSIPHSWLIQILQIYKINSKIVDFLRSIMTQWKTTLQLSTHNKSVATRQISIKKGIYQGDSLSPLWFCLALNPLSHLLHCSRAGYQIKHNNKDNVAISHLIYMDDIKLYAKSEKDMKKLIDTTTQFSKDIKMEFGLEKCKTLHIIKGKIRPGDYVINDAETITAMESNDFYKYLGYRQLKGLDHTVIKQKLSAEYKKRLNMLCKTQLSGKNLIKSINTYAIPILTYSFGIIKWTKTNIEQLERSTRTTLTKYNNLHPKSAIERLTIKRPNGGRGLIDIHHLWKKQIINLRSFFQTKSHTSSIHKAITQIDQNYTPLNLNNNDDITNVPSDPQKQKIEDWRKKILHGRHLKDLEQPHVDTVASNKWLKIGNLFPETEGFIIAIQDQIINTKNYRKHIIKDPTIINDKCRKCHIQPETIQHITGACTTLTQTDYTHRHNQVANIIHQKLALKHRLIQNTNTPYYKYSPDTVLENDSYKLYYDRAILTDKTIHNNRPDITLQDKINKTTYLIDIAVPNTHNLQKTITEKINKYTELKEEVSRIWRQEKVYIVPIVLSSTGVIPNHMKHSLKLLKLNNTEYIPLQKAAILNTCRIVRKFLQDDDHIST

SEQ ID NO: 21527 - protein, 1297 aa, Anthocharis cardamines
MVHTRNSTKRPQVPGGPSSRTGSDGSQPEAWSRGAKNLRVRSISRQTTQATTTDSDMQHDEPSDKNNRRTDTTTPEEPYSPSTASYTPSIPTSPSSNSLNSNSPIPFSDVTREVNSFLPASTKAGKPRVRMRWSKDVNIFIMRTYYFITKLETDLTTYRKQLHELFTRQYPEVNVTEQRISDQRRTIIRNKLLGQETLNQLKEEVQTQLQIINQNIDTTEIDTPRHNQDENSSQPHINLETSLSTHNTQTSHTPSQMEPLSIILENETETITDNDTISEVHTQDICEKFRITLLDYSETDPVSRPKLPKLKYSHQLDKLVLLFNNSILKQFISENAQLIDIHTIIYCTALVISEELNYKVARHPQKDDQTSQPRIRTEPPWQIRLKKDIEKLRADCGRLTQYINNNRSRKLVKKVEDIFRNRITHTRHENNNRKPEEYLDTLKQKLALKVHRLRRYEKAQKRKKDNTTFATNQKQFYRNLNKTQTNTHVESNQDIPSKEQLELFWSGIWEEQIEHNDKAGWITEEKNKWRTVEEMEFVEITETDIKNITDRLHNYKSPGIDKIHNYWFKKLTILHKSLAKNLTEIILGQQNIPEFIATGITYMLPKSQYSPQPSQYRPITCLPTIYKLLTSALTTKINTHIEHYNIIAEEQKGCRRGHMGCKEQLIIDSTIHKHATKKNRNLHCTYIDYKKAFDSIPHSWLIQILQIYKINSKIVDFLRSIMTQWKTTLQLSTHNKTVATRQISIKKGIYQGDSLSPLWFCLALNPLSHLLHCSRAGYQIKHNNKDNIAISHLIYMDDIKLYAKSEKDMKKLIDTTTQFSKDIKMEFGLEKCKTLHIIKGKIRPGDYVINDAETITAMESNDFYKYLGYRQLKGLDHTVIKQTLSAEYKKRLNMLCKTQLSGKNLIKSINTYAIPILTYSFGIIKWTKTNIEQLERSTRTTLTKYNNLHPKSAIERLTIKRPNGGRGLIDIHHLWKKQIINLRSFFQTKSHTSSIHKAITQNDQNYTPLNLNNNDAITNVPSDPQKQKIEDWRKKILHGRHLKDLEQPHVDTVASNKWLKIGNLFPETEGFIIAIQDQIINTKNYRKHIIKDPTIINDKCRKCHIQPETIQHITGACTTLTQTDYTHRHNQVANIIHQKLALKHRLIQNTNTPYYKYSPDTVLENDSYKLYYDRAILTDKTIHNNRPDITLQDKINKTTYLIDIAVPNTHNLQKTITEKINKYTELKEEVSRIWRQEKVYIVPIVLSSTGVIPNHMKHSLKLLKLNNTEYIPLQKAAILNTCRIVRKFLQDDDHIST

SEQ ID NO: 21528 - protein, 1027 aa, Thyatira batis
MDPAARPKLPKLKYSPKLCRYVNLFNENILNQFTSDDTKLIDIHTLIYCTAVVISEELNFKITDHLINSRPKHKTQPPWQQRLEKDIEKLRADCGRLTQYINNNRSSNVVRRVEAIFQSSLTHTRHENNNRRPDEFLDTLKQKLALKVHRLRRYNKAQQRKNDNALFAKNEKMFYRTLYKPHTDNVNTNDTNTNNTDTNNTNTNNTDTNNTADIPTKEQLETFWSSIWEEQVQHNDKASWIIDEETKWKAIDEMEFVEITESDISNITARLHNWKSPGLDKIHNFWYKKLTSLHKALAKNLTEIILGKQNIPDFIATGITYMLPKSKNSVQPSQYRPITCLPTIYKILTSAITAKINIHIEHHKIMAEEQKGCRRGHMGCKEQLIIDSTIHKHATIKNRNLHCTYIDYKKAFDSVPHSWLLQILKIYKINPKIIAFLRNIMSQWKTTLQISCNHNTIITRQISIKKGIYQGDSLSPMWFCLALNPLSHLLQRCQAGYNLKHTINQTKVSHLIYMDDIKLYAQTEKDMKKLVVATSEFSKDINMQFGLDKCKTLHIIRGKVKPGNYSINNTDIITAMEPADLYKYLGYSQLKGLDHVRIKNTLTIEYKRRLNAVCKSQLTGKHLIKALNTYAIPILTYSFGVIKWTKTDTEQLERTTRTTLTKHNNLHPKSAIERLTIKRQNGGRGLIDIQHLWQKQVNRLKTFFHTKPLTSNIHKAIVLNDHNYTPLNLMEQVDTQYTNNEDPQKQKIEDWKKKVLHGRHPQQSHDLQQSHINTLASNKWLKIGNLFPETEGFMIAIQDQIINTKNYRKYIIKDPTVTNDKCRKCHSQPETIQHITGACTTLTQTDYTHRHNQVANVIHQKLALKYTLIQNTNTPYYNYTPQTILENTTHKLYYDRAILTDRTIHYNRPDITLQDKVNKITYLIDIAVPNTHNIQKTITEKITKYLELKDEVTRIWRQEKVYIVPIVLSTTGVIPNHLLHSLKLIDLHETLYITLQKAAILNTCRIVRKFMQLEEGEIDPHSQNTHT

SEQ ID NO: 21529 - protein, 1315 aa, Noctua fimbriata
METRSKKKRIGPLPGGDRRGAPGADAGCLSMRTVSGEELNRRAPTDKDTTAEIIDDGDRLTDRTDTPVEPYSPSTVSYTPSRRSSPSIPSSPTLSSPPIISLNTVTPTPTLSVTRGVSTFLPASTKAGKARVRMKWSKEVNLFIMRTYFYITKLETDMTTYRQQLHELFTRQYPEISVSEQRISDQRRAIVRNKLLSQEIIDQIKEETRIQLELDENATQLSQNITDIAQQPQTQPYIELQSSIQTQLYNQSQANTQTSHTSTQTEYITITLENDIETLVVENHNLNTDTYIQEIHDKFRTTLAQYSGMDPAIRPRLPKLRYSPKLFRLVNLFNENILNQFISDETQLIDIHTLIYCTAVVISEELNFKITQNTGNIRPKENIKPAWQQRLERDIEKLRADIGRLTQYINNNRSSKVVRRVEAIFRSHLIHTRHEHNNRKPEEFLDTIKQKLALKVHRLRRYKKAQQRKNDNAIFATNEKIFYRNLNKPNTDTNYDTNTDTPTKEQLETYWSSIWEEQVRHNEEATWITEEETKWRAIHEMEFVEITEADITHITGRLHNWKSPGIDKVHNFWFKKLTSLYKPIARNLTQIILGQQNIPEFIATGITYMLPKTKNSPHPSQYRPITCLPTIYKILTSAITTKINKHIEHHNIMAEEQKGCRRGHMGCKEQLIIDSTIHKHATTKNRNLHCTYIDYKKAFDSVPHSWLIQILKIYKVNSKIIDFLCNIMSQWKTTLHLNCNRNNVTTREIYIKKGIYQGDSLSPLWFCLALNPLSNLLQSCRAGYCLKHTTSQEQLQEQTTISHLIYMDDIKLYAQTEKDMKKLVEATTEFSQDINMQFGLDKCKTLHIIRGKIRPGNYLVNNTDTITAMEPSDLYKYLGYTQLKGLDHVRIKETLTAEFKRRLNAVCKTQLSGKNLIKALNTFAIPILTYSFGVIKWTKTDTEQLERTTRTTLTKHNNLHPKSAIERLTIKRQNGGRGLIDIKHLWRKQVCRLKTFFHTKSHSSNIHKAIVQNDYNYTPLNLNEQSDTSHIATEDPQTQKIDDWKKKVLHGRHPHDLEQSHVNKIASNKWLKIGNLFPETEGFIIAIQDQIINTKNYRKFIIKDPSVTNDKCRKCHTQPETIQHITGACTTLTQTDYTHRHNQVANVIHQRLAVQYSLIQDTNTPYYNYTPQVTLENDTHKLYYDRAILTDRTIHYNRPDIILQDKINKVTYLIDIAVPNTHNIQKTITEKISKYAELKQEVTRIWRQEKIYVVPIVLSTTGVIPNHLLHSLKLLSLKETLYITLQKAAILNTCRIVRKFMQIDENEIGPHHNTP

SEQ ID NO: 21530 - protein, 775 aa, Noctua fimbriata
MEFVEITEADITHITGRLHNWKSPGIDKVHNFWFKKLTSLYKPIARNLTQIILGQQNIPEFIATGITYMLPKTKNSPHPSQYRPITCLPTIYKILTSAITTKINKHIEHHNIMAEEQKGCRRGHMGCKEQLIIDSTIHKHATTKNRNLHCTYIDYKKAFDSVPHSWLIQILKIYKVNSKIIDFLCNIMSQWKTTLHLNCNRNNVTTREIYIKKGIYQGDSLSPLWFCLALNPLSNLLQSCRAGYCLKHTTSQEQLQEQTTISHLIYMDDIKLYAQTEKDMKKLVEATTEFSQDINMQFGLDKCKTLHIIRGKIRPGNYLVNNTDTITAMEPSDLYKYLGYTQLKGLDHVRIKETLTAEFKRRLNAVCKTQLSGKNLIKALNTFAIPILTYSFGVIKWTKTDTEQLERTTRTTLTKHNNLHPKSAIERLTIKRQNGGRGLIDIKHLWRKQVCRLKTFFHTKSHSSNIHKAIVQNDHNYTPLNLNEQSDTSHIATEDPQTQKIDDWKKKVLHGRHPHDLEQSHVNKIASNKWLKIGNLFPETEGFIIAIQDQIINTKNYRKFIIKDPSVTNDKCRKCHTQPETIQHITGACTTLTQTDYTHRHNQVANVIHQRLAVQYSLIQDTNTPYYNYTPQVTLENDTHKLYYDRAILTDRTIHYNRPDIILQDKINKVTYLIDIAVPNTHNIQKTITEKISKYAELKQEVTRIWRQEKVYVVPIVLSTTGVIPNHLLHSLKLLSLKETLYITLQKAAILNTCRIVRKFMQIDENEIGPHHNTP

SEQ ID NO: 21531 - protein, 1232 aa, Noctua fimbriata
METRSKKKRIGPLPGGDRRGAPGADAGCLSMRTVSGEELNRRAPTDKDTTAEIIDDGDRLTDRTDTPVEPYSPSTVSYTPSRRSSPSIPSSPTLSSPPIISLNTVTPTPTLSVTRGVSTFLPASTKAGKARVRMKWSKEVNLFIMRTYFYITKLETDMTTYRQQLHELFTRQYPEISVSEQRISDQRRAIVRNKLLSQEIIDQIKEETRIQLELDENATQLSQNITDIAQQPQTQPYLELQPSIQTQLYNQSQANTQTSHTSTQTEDITITLENDIETLVVENHNLNTDTYIQEIHDKFRTTLAQYSGMDPAIRPRLPKLRYSPKLFRLVNLFNENILNQFISDETQLIDIHTLIYCTAVVISEELNFKITQNTENIRPKENIKPAWQQRLERDIEKLRADIGRLTQYINNNRSSKVVRRVEAIFRSHLIHTRHEHNNRKPEEFLDTIKQKLALKVHRLRRYQKAQQRKNDNAIFATNEKIFYRNLNKPNTDTNYDTNTDTPTKEQLETYWSSIWEEQVRHNEEATWITEEETKWRAIHEMEFVEITEADITHITGRLHNWKSPGIDKVHNFWFKKLTSLFKPIARNLTQIILGQQNIPEFIATGITYMLPKTKNSPHPSQYRPITCLPIIYKILTSAITTKINKHIEHHNIMAEEQKGCRRGHMGCKEQLIIDSTIHKHATTKNRNLHCTYIDYKKAFDSVPHSWLIQILKIYKVNSKIIDFLCNIMSQWKTTLHINCNRNNVTTREIYIKKGIYQGDSLSPLWFCLALNPLSNLLESCRAGYCLKHATSQEQLQEQTTISHLIYMDDIKLYAQTEKDMKKLVEATTEFSQDINMQFGLDKCKTLHIIRGKIRPGNYLVNNTDTITAMEPSDLYKYLGYTQLKGLDHVRIKETLTAEFKRRLNAVCKTQLSGKNLIKALNTFAIPILTYSFGVIKWTKTDTEQLERTTRTTLTKHNNLHPKSAIERLTIKRQNGGRGLIDIKHLWRKQVCRLKTFFHTKSHSSNIHKAIVQNDHNYTPLNLNEQSDTSHIATEDPQTQKIDDWKKKVLHGRHPHDLEQSHVNKIASNKWLKIGNLFPETEGFIIAIQDQIINTKNYRKFIIKDPSVTNDKCRKCHTQPETIQHITGACTTLTQTDYTHRHNQVANVIHQRLAVQYSLIQDTNTPYYNYTPQVTLENDTHKLYYDRAILTDMTIHYNRPDIILQDKINKVTYLIDIAVPNTHNIQKTITEKK

SEQ ID NO: 21532 - protein, 1315 aa, Noctua fimbriata
METRSKKKRIGPLPGGDRRGAPGADAGCLSMRTVSGEELNRRAPTDKDTTAEIIDDGDRLTDRTDTPVEPYSPSTVSYTPSRRSSPSIPSSPTLSSPPIISLNTVTPTPTLSVTRGVSTFLPASTKAGKARVRMKWSKEVNLFIMRTYFYITKLETDMTTYRQQLHELFTRQYPEISVSEQRISDQRRAIVRNKLLSQEIIDQIKEETRIQLELDENATQLSQNITDIAQQPQTQPYIELQPSIQTQLYNQSQANTQTSHTSTQTEYITITLENDIETLVVENHNLNTDTYIQEIHDKFRTTLAQYSGMDPAIRPRLPKLRYSPKLFRLVNLFNENILNQFISDETQLIDIHTLIYCTAVVISEELNFKITQNTGNIRPKENIKPAWQQRLERDIEKLRADIGRLTQYINNNRSSKVVRRVEAIFRSHLIHTRHEHNNRKPEEFLDTIKQKLALKVHRLRRYKKAQQRKNDNAIFATNEKIFYRNLNKPNTDTNYDTNTDTPTKEQLETYWSSIWEEQVRHNEEATWITEEEKKWRAIHEMEFVEITEADITHITGRLHNWKSPGIDNVHNFWFKKLTSLYKPIARNLTQIILGQQNIPEFIATGITYMLPKTKNSPHPSQYRPITCLPTIYKILTSAITTKINKHIEHHNIMAEEQKGCRRGHMGCKEQLIIDSTIHKHATTKNRNLHCTYIDYKKAFDSVPHSWLIQILKIYKVNSKIIDFLCNIMSQWKTTLHLNCNRNNVTTREIYIKKGIYQGDSLSPLWFCLALNPLSNLLQSCRAGYCLKHTTSQEQLQEQTTISHLIYMDDIKLYAQTEKDMKKLVEATTEFSQDINMQFGLDKCKTLHIIRGKIRPGNYLVNNTDTITAMEPSDLYKYLGYTQLKGLDHVRIKETLTAEFKRRLNAVCKTQLSGKNLIKALNTFAIPILTYSFGVIKWTKTDTEQLERTTRTTLTKHNNLHPKSAIERLTIKRQNGGRGLIDIKHLWRKQVCRLKTFFHTKSHSSNIHKAIVQNDHNYTPLNLNEQSDTSHIATEDPQTQKIDDWKKKVLHGRHPHDLEQSHVNKIASNKWLKIGNLFPETEGFIIAIQDQIINTKNYRKFIIKDPSVTNDKCRKCHTQPETIQHITGACTTLTQTDYTHRHNQVANVIHQRLAVQYSLIQDTNTPYYNYTPQVTLENDTHKLYYDRAILTDRTIHYNRPDIILQDKINKVTYLIDIAVPNTHNIQKTITEKISKYAELKQEVTRIWRQEKVYVVPIVLSTTGVIPNHLLHSLKLLSLKETLYITLQKAAILNTCRIVRKFMQIDENEIGPHHNTP

SEQ ID NO: 21533 - protein, 1315 aa, Noctua fimbriata
METRSKKKRIGPLPGGDRRGAPGADAGCLSMRTVSGEELNRRAPTDKDTTAEIIDDGDRLTDRTDTPVEPYSPSTVSYTPSRRSSPSIPSSPTLSSPPIISLNTVTPTPTLSVTRGVSTFLPASTKAGKARVRMKWSKEVNLFIMRTYFYITKLETDITTYRQQLHELFTRQYPEISVSEQRISDQRRAIVRNKLLSQEIIDQIKEETRIQLELDENATQLSQNITDIAQQPQTQPYIELQPSIQTQLYNQSQANTQTSHTSTQTEYITITLENDIETLVVENHNLNTDTYIQEIHDKFRTTLAQYSGMDPAIRPRLPKLRYSPKLFRLVNLFNENILNQFISDETQLIDIHTLIYCTAVVISEELNFKITQNTGNIRPKENIKPAWQQRLERDIEKLRADIGRLTQYINNNRSSKVVRRVEAIFRSHLIHTRHEHNNRKPEEFLDTIKQKLALKVHRLRRYKKAQQRKNDNAIFATNEKIFYRNLNKPNTDTNYDTNTDTPTKEQLETYWSSIWEEQVRHNEEATWITEEEKKWRAIHEMEFVEITEADITHITGRLHNWKSPGIDKVHNFWFKKLTSLYKPIARNLTQIILGQQNIPEFIATGITYMLPKTKNSPHPSQYRPITCLPTIYKILTSAITTKINKHIEHHNIMAEEQKGCRRGHMGCKEQLIIDSTIHKHATTKNRNLHCTYIDYKKAFDSVPHSWLIQILKIYKVNSKIIDFLCNIMSQWKTTLHLNCNRNNVTTREIYIKKGIYQGDSLSPLWFCLALNPLSNLLQSCRAGYCLKHTTSQEQLQEQTTISHLIYMDDIKLYAQTEKDMKKLVEATTEFSQDINMQFGLDKCKTLHIIRGKIRPGNYLVNNTDTITAMEPSDLYKYLGYTQLKGLDHVRIKETLTAEFKRRLNAVCKTQLSGKNLIKALNTFAIPILTYSFGVIKWTKTDTEQLERTTRTTLTKHNNLHPKSAIERLTIKRQNGGRGLIDIKHLWRKQVCRLKTFFHTKSHSSNIHKAIVQNDHNYTPLNLNEQSDTSHIATEDPQTQKIDDWKKKVLHGRHPHDLEQSHVNKIASNKWLKIGNLFPETEGFIIAIQDQIINTKNYRKFIIKDPSVTNDKCRKCHTQPETIQHITGACTTLTQTDYTHRHNQVANVIHQRLAVQYSLIQDTNTPYYNYTPQVTLENDTHKLYYDRAILTDRTIHYNRPDIILQDKINKVTYLIDIAVPNTHNIQKTITEKISKYAELKQEVTRIWRQEKVYVVPIVLSTTGVIPNHLLHSLKLLSLKETLYITLQKAAILNTCRIVRKFMQIDENEIGPHHNTP

SEQ ID NO: 21534 - protein, 1315 aa, Noctua fimbriata
METRSKKKRIGPLPGGDRRGAPGADAGCLSMRTVSGEELNRRAPTDKDTTAEIIDDGDRLTDRTDTPVEPYSPSTVSYTPSRRSSPSIPSSPTLSSPPIISLNTVTPTPTLSVTRGVSTFLPASTKAGKARVRMKWSKEVNLFIMQTYFYITKLETDMTTYRQQLHELFTRQYPEISVSEQRISDQRRAIVRNKLLSQEIIDQIKEETRIQLELDENATQLSQNITDIAQQPQTQPYIELQPSIQTQLYNQSQANTQTSHTSTQTEYITITLENDIETLVVENHNLNTDTYIQEIHDKFRTTLAQYSGMDPAIRPRLPKLRYSPKLFRLVNLFNENILNQFISDETQLIDIHTLIYCTAVVISEELNFKITQNTGNIRPKENIKPAWQQRLERDIEKLRADVGRLTQYINNNRSSKVVRRVEAIFRSYLIHTRHEHNNRKPEEFLDTIKQKLALKVHRLRRYKKAQQRKNDNAIFATNEKIFYRNLNKPNTDTNYDTNTDTPTKEQLETYWSSIWEEQVRHNEEATWITEEETKWRAIHEMEFVEITEADITHITGRLHNWKSPGIDKVHNFWFKKLTSLYKPIARNLTQIILGQQNIPEFIATGITYMLPKTKNSPHPSQYRPITCLPTIYKILTSAITTKINKHIEHHNIMAEEQKGCRRGHMGCKEQLIIDSTIHKHATTKNRNLHCTYIDYKKAFDSVPHSWLIQILKIYKVNSKIIDFLCNIMSQWKTTLHLNCNRNNVTTREIYIKKGIYQGDSLSPLWFCLALNPLSNLLQSCRAGYCLKHTTSQEQLQEQTTISHLIYMDDIKLYAQTEKDMKKLVEATTEFSQDINMQFGLDKCKTLHIIRGKIRPGNYLVNNTDTITAMEPSDLYKYLGYTQLKGLDHVRIKETLTAEFKRRLNAVCKTQLSGKNLIKALNTFAIPILTYSFGVIKWTKTDTEQLERTTRTTLTKHNNLHPKSAIERLTIKRQNGGRGLIDIKHLWRKQVCRLKTFFHTKSHSSNIHKAIVQNDHNYTPLNLNEQSDTSHIATEDPQTQKIDDWKKKVLHGRHPHDLEQLHVNKIASNKWLKIGNLFPETEGFIIAIQDQIINTKNYRKFIIKDPSVTNDKCRKCHTQPETIQHITGACTTLTQTDYTHRHNQVANVIHQRLAVQYSLIQDTNTPYYNYTPQVTLENDTHKLYYDRAILTDRTIHYNRPDIILQDKINKVTYLIDIAVPNTHNIQKTITEKISKYAELKQEVTRIWRQEKVYVVPIVLSTTGVIPNHLLHSLKLLSLKETLYITLQKAAILNTCRIVRKFMQIDENEIGPHHNTP

SEQ ID NO: 21535 - protein, 1315 aa, Noctua fimbriata
METRSKKKRIGPLPGGDRRGAPGADAGCLSMRTVCGEELNRRAPTDKDTTAEIIDDGDRLTDRTDTPVEPYSPSTVSYTPSRRSSPSIPSSPTLSSPPIISLNTVTPTPTLSVTRGVSTFLPASTKAGKARVRMKWSKEVNLFIMRTYFYITKLETDMTTYRQQLHELFTRQYPEISVSEQRISDQRRAIVRNKLLSQEIIDQIKEETRIQLELDENATQLSQNITDIAQQPQTQPYIELQPSIQTQLYNQSQANTQTSHTSTQTEYITITLENDIETLVVENHNLNTDTYIQEIHDKFRTTLAQYSGMDPAIRPRLPKLRYSPKLFRLVNLFNENILNQFISDETQVIDIHTLIYCTAVVISEELNFKITQNTGNIRPKENIKPAWQQRLERDIEKLRADIGRLTQYINNNRSSKVVRRVEAIFRSHLIHTRHEHNNRKPEEFLDTIKQKLALKVHRLRRYKKAQQRKNDNAIFANNEKIFYRNLNKPNTDTNYDTNTDTPTKEQLETYWSSIWEEQVRHNEDATWITEEETKWRAIHEMEFVEITEADITHITGRLHNWKSPGIDKVHNFWFKKLTSLYKPIARNLTQIILGQQNIPEFIATGITYMLPKTKNSPHPSQYRPITCLPTIYKILTSAITTKINKHIEHHNIMAEEQKGCRRGHMGCKEQLIIDSTIHKHATTKNRNLHCTYIDYKKAFDSVPHSWLIQILKIYKVNSKIIDFLCNIMSQWKTTLHINCNRNNVTTREIYIKKGIYQGDSLSPLWFCLALNPLSNLLQSCRAGYCLKHTTSQEQLQEQTTISHLIYMDDIKLYAQTEKDMKKLVEATTEFSQDINMQFGLDKCKTLHIIRGKIRPGNYLVNNTDTITAMEPSDLYKYLGYTQLKGLDHVRIKETLTAEFKRRLNAVCKTQLSGKNLIKALNTFAIPILTYSFGVIKWTKTDTEQLERTTRTTLTKHNNLHPKSAIERLTIKRENGGRGLIDIKHLWRKQVCRLKTFFHTKSHSSNIHKAIVQNDHNYTPLNLNEQSDASHIATEDPQTQKIDDWKKKVLHGRHPHDLEQSHVNKIASNKWLKIGNLFPETEGFIIAIQDQIINTKNYRKFIIKDPSVTNDKCRKCHTQPETIQHITGACTTLTQTDYTHRHNQVANVIHQRLAVQYSFIQDTNTPYYNYTPQVTLENDTHKLYYDRAILTDRTIHYNRPDIILQDKINKVTYLIDIAVPNTHNIQKTITEKISKYAELKQEVTRIWRQEKVYVVPIVLSTTGVIPNHLLHSLKLLSLKETLYITLQKAAILNTCRIVRKFMQIDENEIGPHHNTP

SEQ ID NO: 21536 - protein, 1313 aa, Noctua fimbriata
METRSKKKRIGPLPGGDRRGAPGADAGCLSMRTVSGEELNRRAPTDKDTTAEIIDDGDRLTDRTDTPVEPYSPSTVSYTPSRRSSPSIPSSPTLSSPPIISLNTVTPTPTLSVTRGVSTFLSASTKAGKARVRMKWSKEVNLFIMRNYFYITKLETDMTTYRQQLHELFTRQYPEISVSEQRISDQRRAIGRNKLLSQEIIDQIKEETRIQLELDENATQLSQNITDIAQQTQPYIELQPSIQTQLYNQSQANTQTSHTSTQTEYITITLENDIDTLVVENHNLNTDTYIQEIHDKFRTALAQYSGMDPAIRPRLPKLRYRPKLFRLVNLFNENMLNQFISDETQLIDIHTLIYCTAVVISEELNFKITQNTGNIRPKENIKPAWQQRLERDIEKLRADIGRLTQYINNNRSSKVVRRVEAIFRSHLIHTRHEHNNRKPEEFLDTIKQKLALKVHRLRRYKKAQQRKNDNAIFATNEKIFYRNLNKPNTDTNYDTNTDTPTKEQLETYWSSIWEEQVRHNEEATWITEEETKWRAIHEMEFVEITEADITHITGRLHNWKSPGIDKVHNFWFKKLTSLYKPIARNLTQIILGQQNIPEFIATGITYMLPKTKNSPHPSQYRPITCLPTIYKILTSAITTKINKHIEHHNIMAEEQKGCRRGHMGCKEQLIIDSTIHKHATTKNRNLHCTYIDYKKAFDSVPHSWLIQILKIYKVNSKIIDFLCNIMSQWKTTLHINCNRNNVTTREIYIKKGIYQGDSLSPLWFCLALNPLSNLLQSCRAGYCLKHTTSQEQLQEQTTISHLIYMDDIKLYAQTEKDMKKLVEATTLFSQDINMQFGLDKCKTLHIIRGKIRPGNYLVNNTDTITAMEPSDLYKYLGYTQLKGLDHVRIKETLTAEFKRRLNAVCKTQLSGKNLIKALNTFAIPILTYSFGVIKWTKTDTEQLERTTRTTTTKHNNLHPKSAIERLTIKRQNGGRGLIDIKHLWRKQVCRLKTFFHTKSHSSNIHKAIVQNDHNYTPLNLNEQSDTSHIATEDPQTQKIDDWKKKVLHGRHPHDLEQSHVNKIASNKWLKIGNLFPETEGFIIAIQDQIINTKNYRKFIIKDPSVTNDKCRKCHTQPETIQHITGACTTLTQTDYTHRHNQVANVIHQRLAVQYSLIQDTNTPYYNYTPQVTLENDTHKLYYDRAILTDRTIHYNRPDIILQDKINKVTYLIDIAVPNTHNIQKTITEKISKYAELKQEVTRIWRQEKVYVVPIVLSTTGVIPNHLLHSLKLLSLKETLYITLQKAAILNTCRIVRKFMKIDENEIGPHHNTP

SEQ ID NO: 21537 - protein, 1271 aa, Entheus sp.
MRRSIRIKNKNSAQSSTVAEIISNPSSPISSTHSLFISPNSTPLSFENSIDRSTTVSPISTDVEQTQNIIFPASDVAQVANAFLPTSTKAGKPRVRMSWSNEVNLFIMRTYYYITKLETDFTTYRKQLHELFLRQYPETNVTEQRIADQRRTIVKNNRLNQDTLNQLKEEVRVQLDIENASHSRNSSSHQNSLQSQLSTKNIQPLQTSIQKTQSSNTIAPDIQPSQMFTQTESETLILENDINILKVNDVATKTNVQDIYNKFRIALSQYSGMNPVVRPKLPKLRYCPQLFQLINIFNQDILKQFISENTQLKDVHTIIYCTALVISQELDYKINDNTQNTIKVHKKPSWQIRLENDIEKLRANCGRLTQYIKGNRSKKILKHIEALFKNTNIHTRYEKENKKAEEFLDTIKQKLALKVGRLKRYKKAQQRITDNTLFTTNEKIFYRNLQKSTTDSSTENNPDLPTEHQLETFWSSIWEKQVHHNENADWIVEEKNKWSTIEEMTFVEITETDITNITNRLHNWKSAGVDKIHNFWYKKLFTLHKLIAKNLTDIILEKQDTPEFITTGITYMLPKTQYSHEPSQYRPITCLPTIYKILTSVITLKISEHIEQYNIIAEEQKGCRRGHMGCKEQLIIDSTIHKHATSKNRNLHCTYIDYKKAFDSIPHSWLIEILHIYKISPKFICFLRKAMNRWQTTLHLSTRHKSITTRQISIRRGIYQGDALSPLWFCLALNPLSHLLHRCQVGYCLKHDTTDTIISHLIYMDDIKIFAKTEKDMKTLLDTTNQFSKDIAMEFGLDKCKTLHIIRGKVRPGNYEINNTDTIKSLEPADMYKYLGYNQLKRLDHAAIKNTLTTEYRKRINTLCKTQLSGKQLIKSLNTYAIPILTYSFGIIKWTKTDLEQLERTTRTILTKHNNLHPKSAVERLTIKRQDGGRGLVNISQLWQKQISRLKQFFYTKSQTSNIHKSIVHNDQNYTPLNLKEETSTQYTQSNNDDPQKQKIENWKKKVLHGRHPQDLEQTHIDAIASNKWLQIGSLFPETEGFMIAIQDQIINTKNYRKYIVKDPTILNDKCRKCHTHPETIQHITGACITLTQTDYTHRHNQVANVIHQKLALKYKLVHNTNTPYYNYIPQTILENETHKLYYDRAILTDKTIHYNRPDITLRDKINKVTYLIDIAVPNTHNLQKTITEKIGKYAELKDEVKRIWQQEKVLIVPIVLSTTGVIPKHLRHSLNQLNLPDNTYIRLQKAAILNTCRIVRKFMQIEEDTIHSST

SEQ ID NO: 21538 - protein, 1298 aa, Vanessa cardui
METRSKKKRIGPLPGGDRRGTPGAGAGCDSMRTVSGEELSRRASPDKFHTTAGRRELNRRAHGVNATAATDDEINRLTDRTSSPIEPYNSPSTSSYTPSVQSSPSTISLNTEPHLPALNVAREANAFLPASTKAGKPRVRMRWSKEVNSFIMRTYYYITNLETDMTTYRQKMHELFTIEYPGITVTEQRISDQRRTIVKNKLLTEDELNRLKEEARIQLQQHDVTTSLPRNPSHSEFHSQTESFTLPNTQNTHTSDMSTQTESVTIILENEVNTLNAQNPITETYIQDMYDKFSTTLLQYSGTDPLIRPRLPKIKYSPQLYNLIQIFNQNILNRFISEDTQLIDIHTLVYCTALVMTEEVNPKQIENMQRTKTKQTNKPPWQQRLEKDIEKLRADCGRLTQYIYNNNRSNKVVKRVEEIFRNCYIHTKHDRNNRKPEEYLDTLKQKLALKVNRLRRYKKAQQRRNDNAIFTTNEKLFYRNLHKPHTPTNTVTDRNTDVPTKQDLEVFWSGIWEEQVSHNSKASWINDEKIEFSIIEEMEFVEVTETDITNITAKLHNWKSPGIDKIHNFWYKKLTSLHKCIAKNLTRVILGQQKIPEFMTIGITYMLPKTKHSRQPSQYRPITCLPTIYKILTSAITNKIYTHIEQHNIIAEEQKGCRRAHMGCKEQLVIDSTIHKHAATKNRNLHCTYIDYQKAFDSIPHSWLIQILEIYKINPKIIDFLRQIMSSWKTTLHLNYGQNTIVTRQIQIKKGIYQGDSLSPLWFCLALNPLSHLLHRCRVGYSLKSIKETIISHLIYMDDIKLYAKSDKDMKKLIEVTKEFSTDINMQFGLDKCKTTHIIKGKIKPGNYAITSSDTITAMEPTDLYKYLGYNQLKGLDHTSIKQTLTIEYKRRLNVICKTQLSGKNLIKAFNTYAIPILTYSFGIIKWTKTDIEQIERNTRTILTKHNNLHPKSAIERLTLKRQNGGRGLIDIYNLWQKQINTLKTFFHLKSRTSDIHKAIVVNDINYTPLNLSDQGYYMNNYIDPQKQKLENWKKKVLHGRHPHDLEQPHINTIASNKWLKIGNLFPETEGFIIAIQDQIINTKNYKKYIIKDPTITNDKCRKCHIQPETIQHITGACITLTQTDYTHRHNQVSNIVHQKLALKHKLIQNTKTPYYKYTPQTILENATHKMYYDRGILTDKTIHYNRPDITLQDKINKVTYLIDIAVPNTHNLQKTIAEKINKYNELKEEVTRIWKQEKVYIIPIVISTTGVVPNHLLHSLKLLDLNESLYIPIQKAAILNTCRIVRKFMQLEETDTT

SEQ ID NO: 21539 - protein, 1315 aa, Abrostola tripartita
METRSKRKRIGPLPGGDRRGTPGADAGCLSMRTVSGEELNRRAPTDKDATADIIDDGDTLTVRDSPVEPYSPSTVSYIPSSPSIPSSPSVPSSPPVHSSPLIPSSPPTINLNTESSNPALNVAREVNTFLPASTKAGKPRVRMRWNKDVNTFIMRTYLYITKLETDMTTYRQKLHELFTQRYPDINVTEQRISDQRRTIVRNKLLSPAEIDNLKEEIRTQLQEVENNSGTNTVTLTQNTIENTPQLQINTQSQLYNHTQASTQTSHMSTQTESITLMLENDIDTLVVTERNFITVGLIQEIHDKFRTTLTQYSGMDPGARPKLPKLRFSPYLFRLVNLFNESILTQYLSDDTQLIDIHTLIYCTAVVISEELNFKITEHTGNRRPKHDYKPPWQQRLENDIEKLRADCGRVTQYINNNRSNKVVKRVKAIFKNSFTHTRHENSNRKPEEFLDTLKQKLALKVHRLRRYKKAQQRKHDNAIFATNEKTFYRQLHKLHTDTPADTDTDTPTKEHLETFWSNIWEEQVQHNDKASWIADEAAKWGAIDEMEFCEITESDITSITTKLHNWKSPGIDKIHNFWYKKLTSLHKSIAKNLSDIILGRQIIPEFLATGITYMIPKTKYSPQPSQYRPITCLPTIYKILTSTLTNKIYTHIEHHNIIAEEQKGCRRGHMGCKEQLIIDSTIHKHATTKNRNLHCTYIDYKKAFDSVPHSWLIQILDIYKINPKIISFLRNIMLHWKTTLQLNCSQNITTRQISIKKGIYQGDSLSPLWFCLALNPLSHLLQRCQSGYCLKHTTEETLISHLIYMDDIKLYAKTEKEMNILVETTAQFSRDINMQFGLDKCRTLHIVRGKIRPGDYVVNNTDTITAMEPNDVYKYLGYTQLKGLDHIRIKNTLTTEFKKRLNAICKSQLSGKHLIKALNTYAIPVLTYSFGVIKWTKTDTEHLERTIRTTLTRHNNLHPKSAIERLTIKRQNGGRGLIDINHLWQKQICNLKTFFHTKSLTSNIHKAITLNDINYTPLNLVEASTLTTSINDPQKQKIDDWKKKVLHGRHIHDLEQSHVDIVASNKWLKIGALFPETEGFIIAIQDQIINTKNYRKYIIKDPSITNDKCRKCHSQPETIQHITGACTTLTQTDYTHRHNQVANVIHQRLALKYTLIQNTHTPYYNYTPQTVLENTTHKLYYDRAILTDRTIHYNRPDITLQDKINKVTYLIDIAVPNTHNVQKTISEKISKYAELKDEVTRIWRQEKVYVVPIVLSTTGVIPNHLLHSLKLLDLKETTYITLQKAAILNTCRIVRKFMQIEENEVAPHHNTPST

SEQ ID NO: 21540 - protein, 1173 aa, Abrostola tripartita
MRWNKDVNTFIMRTYLYITKLETDMTTYRQKLHELFTQRYPDINVTEQRISDQRRTIVRNKLLSPAEIDNLKEEIRTQLQEVENNSGTNTVTLTQNTIENTPQLQINTQSQLYNHTQASTQTSHMSTQTESITLMLENDIDTLVVTERNFITVGLIQEIHDKFRTTLTQYSGMDPGARPKLPKLRFSPYLFRLVNLFNESILTQYLSDDTQLIDIHTLIYCTAVVISEELNFKITEHTGNRRPKHDYKPPWQQRLENDIEKLRADCGRVTQYINNNRSNKVVKRVEAIFKNSFTHTRHENSNRKPEEFLDTLKQKLALKVHRLRRYKKAQQRKHDNAIFATNEKTFYRQLHKLHTDTPADTDTDTPTKEHLETFWSNIWEEQVQHNDKASWIADEAAKWGAIDEMEFCEITESDITSITTKLHNWKSPGIDKIHNFWYKKLTSLHKSIAKNLSDIILGRQIIPEFLATGITYMIPKTKYSPQPSQYRPITCLPTIYKILTSTLTNKIYTHIEHHNIIAEEQKGCRRGHMGCKEQLIIDSTIHKHATTKNRNLHCTYIDYKKAFDSVPHSWLIQILDIYKINPKIISFLRNIMLHWKTTLQLNCSQNITTRQISIKKGIYQGDSLSPLWFCLALNPLSHLLQRCQSGYCLKHTTEETLISHLIYMDDIKLYAKTEKEMNILVETTAQFSRDINMQFGLDKCRTLHIVRGKIRPGDYVVNNTDTITAMEPNDVYKYLGYTQLKGLDHIRIKNTLTTEFKKRLNAICKSQLSGKHLIKALNTYAIPVLTYSFGVIKWTKTDTEHLERTIRTTLTRHNNLHPKSAIERLTIKRQNGGRGLIDINHLWQKQICNLKTFFHTKSLTSNIHKAITLNDINYTPLNLVEASTLTTSINDPQKQKIDDWKKKVLHGRHIHDLEQSHVDIVASNKWLKIGALFPETEGFIIAIQDQIINTKNYRKYIIKDPSITNDKCRKCHSQPETIQHITGACTTLTQTDYTHRHNQVANVIHQRLALKYTLIQNTHTPYYNYTPQTVLENTTHKLYYDRAILTDRTIHYNRPDITLQDKINKVTYLIDIAVPNTHNVQKTISEKISKYAELKDEVTRIWRQEKVYVVPIVLSTTGVIPNHLLHSLKLLDLKETTYITLQKAGILNTCRIVRKFMQIEENEVAPHHNTPST

SEQ ID NO: 21541 - protein, 1315 aa, Abrostola tripartita
METRSKRKRIGPLPGGDRRGTPGADAGCLSMRTVSGEELNRRAPTDKDATADIIDDGDTLTVRDSPVEPYSPSTLSYIPSSPSIPSSPSVPSSPPIHSSPLIPSSPPTINLNTESSNPALNVAREVNTFLPASTKAGKPRVRMRWNKDVNMFIMRTYLYITKLETDMTTYRQKLHELFTQRYPDINVTEQRISDQRRTIVRNKLLSPAEIDNLKEEIKTQLQEVENNSGTNTVTLTQNTIENTPQLQINTQSQLYNHTQASTQTSHMSTQTESITLMLENDIDTLVVTERNSITVGLIQEIHDKFRTTLTQYSGMDPGARPKLPKLRFSPYLFRLVNLFNESILTQYLSDDTQLIDIHTLIYCTAVVISEELNFKITEHTGNGRPKHDYKPPWQQRLENDIEKLRADCGRVTQYINNNRSNKVVKRVEAIFKNSFTHTRHESSNRKPEEFLDTLKQKLALKVHRLRRYKKAQQRKHDNAIFATNEKTFYRQLHKLHTDTPADTDTDTPTKEHLETFWSNIWEEQVQHNDKASWIADEAAKWGAIDEMEFCEITESDITSITTKLHNWKSPGIDKIHNFWYKKLTSLHKSIAKNLSDIILGRQIIPEFLATGITYMIPKTKYSPQPSQYRPITCLPTIYKILTSTLTNKIYTHIEHHNIIAEEQKGCRRGHMGCKEQLIIDSTIHKHATTKNRNLHCTYIDYKKAFDSVPHSWLIQILDIYKINPKIISFLRNIMLHWKTTLQLNCSQNITTRQISIMKGIYQGDSLSPLWFCLALNPLSHLLQRCQSGYCLKHTSEETLISHLIYMDDIKLYAKTEKEMNILVETTAQFSRDINMQFGLDKCKTLHIVRGKIRPGDYVVNNTDTITAMEPNDVYKYLGYTQLKGLDHIRIKNTLTTEFKKRLNAICKSQLSGKHLIKALNTYAIPVLTYSFGVIKWTKTDTEHLERTIRTTLTRHNNLHPKSAIERLTIKRQNGGRGLIDINHLWQKQICKLKTFFHTKSLTSNIHKAITLNDINYTPLNLVEASILTTSINDPQKQKIDDWKKKVLHGRHIHDLEQSHVDIVASNKWLKIGALFPETEGFIIAIQDQIINTKNYRKFIIKDPSMTNDKCRKCHSQPETIQHITGACTTLTQTDYTHRHNQVANVIHQRLALKYTLIQNTNTPYYKYTPQTVLENTTHKLYYDRAILTDRTIHYNRPDITLQDKINKVTYLIDIAVPNTHNVQKTISEKISKYAELKEEVTRIWRQEKVYVVPIVLSTTGVIPNHLLHSLKLLDLKETTYIALQKAAILNTCRIVRKFMQIEENEVAPHHNTPSA

SEQ ID NO: 21542 - protein, 1303 aa, Apodemia duryi
METRSKYRKRIGPLPGGNRRGTPGADAGCHSMRTVSGVELSRRAPTGSSELVTADPNDNTDRLIDSDNISSNSINTIVEPSSSSTNSYIPSPVPSVDENSREVPTPTLNVAQEVNAFLPASTKAGKPRMRMSWNKDVNMFIMRTYYYITKLETEMTTYRKQLHESFTQQYPQIKVTEQRISDQRRAIIRNKLLTDEVLNRLKDEVKTQLGNETQNNIHTNVITHTNNIQENAQSLPSQTDTLLIPYTQSQIQSYAQTVDTSTQTETVTFTLENDIELFVDPTPITNTHEQEITDKFRSALTKYSGMNPALRPKLPKLKNSEKLFQLTNLFNQSILKEFLSDDIQLVDIHTIIYCTAVVISEELNYKILERDKSSNLKPKHIDKPPWQVRLEKDIEKLRVDCGRLTQYINNNRSNKVVKRVEAIFKSRMIHTRHEGNNRKPEEFLDTLKQKLALKVHRLRRYKKAQQRKNDNILFTNNEKLFYKNLEKAFTETPITHSIEIPSQEQLETFWSGIWEKQAQHNDKAHWIIEEENRWNTIGEMEFHKITKSDITKVTARLHNWKSPGIDKIHNFWYKKLTSLHNCIARTLTDIITGKQNIPEFIATGITYMIPKSNYSAQPSQYRPITCLPTIYKILTSVIASKITTHIEQNRIISEEQKGCRRGHMGCKEQLIIDSTIHKHATTKLRNLHCTYIDYKKAFDSIPHSWLLKILKIYKINSKIIEFIKNIMQHWKTTLQINNHNNTVATRQIFIRKGIYQGDSLSPLWFCLALNPLSNMLHCCRAGYCLKHTGQDTVLSHLIYMDDIKLYAKSENDMKKLLDKTIEFSKDINMEFGIDKCKTLHITRGKIQPGDYVIDDNTIIAAMEPTDLYKYLGYKQLKGLDHTLIKKTLTTEYKRRLGSICKSQLSGKNLIKALNTYAIPILTYSFGIIKWSKTDIENLERVTRTTLTKHNHLHPKSAIERLTIKRQNGGRGLIDISNLWQKQIYKLKIFFQAKSEISNLHKAIIYNDYNFTPINLSEPNIQDPTNTDTQTRKIDTWKKKTLHGRHPHDLDQTHVDKIASNKWLKVGSLFPETEGFIIAIQDQVINTKNYRKHIIKDPSVTNDKCRRCHSQPETIQHITGACTTLTQTDYTHRHNQVVNIIHQNLALKHQFIQDTNTPYYKYKPETVLENTTHKLYYDRAILTDRTIPYNRPDITLQDKIKKITYLIDIAVPNTHNIQKTITEKISKYAELKDEVTRIWKQDKVYIVPIVISTTGIIPKQLHNSLKLIDLKDNLYITLQNASILNTCRIVRKCMQLEEGEILQH

SEQ ID NO: 21543 - protein, 1303 aa, Apodemia mejicanus
METRSKYRKRIGPLPGGNRRGTPGADAGCHSMRTVSGVELSRRAPTGSSELVTADPNDNTDRLIDSDNISSNPINTIVEPSSSSTNSYIPSPVPSVDENSREAPTPTLNVAQEVNAFLPASTKAGKPRMRMSWNKDVNMFIMRTYYYITKLETDMTTYRKQLHESFTQQYPQIKVTEQRISDQRRAIIRNKLLTDEVLNRLKDEVKTQLGNETHNNIHTNIITHTNNIQENTQSLPSQTDTLLIPYTQSQIQSYAQTVDTSTQTETVTLTLENDIELFVDPTPITNTHEQEITDKFRSALTKYSGMNPALRPKLPKLKNSEKLFQLTNLFNQSILKEFISDDIQLVDIHTIIYCTAVVISEELNYKILERDKSSNLKPKHIDKPPWQVRLEKDIEKLRVDCGRLTQYINNNRSNKVVKRVEAIFKSRMIHTRHEGNNRKPEEFLDTLKQKLALKVHRLRRYKKAQQRKNDNILFTNNEKLFYKNLEKAYTETPITHSIEIPSQEQLETFWSGIWEEQAQHNDKAHWIIEEENRWNTIGEMEFHKITKSDITKVTARLHNWKSPGIDKIHNFWYKKLTSLHNCIARTLTDIITGKQNIPEFIATGITYLIPKSNYSAQPSQYRPITCLPTIYKILTSVIASKITTHIEQNRIISEEQKGCRRGHMGCKEQLIIDSTIHKHATTKLRNLHCTYIDYKKAFDSIPHSWLLKILKIYKINSKIIEFIKNIMQHWKTTLQINNHNNTVATRQIFIRKGIYQGDSLSPLWFCLALNPLSNMLHCCRAGYCLKHTGQDTVLSHLIYMDDIKLYAKSENDMKKLLDKTIEFSKDINMEFGIDKCKTLHITRGKIQPGDYVIDDNTIIAAMEPTDLYKYLGYKQLKGLDHTLIKKTLTTEYKRRLGSICKSQLSGKNLIKALNTYAIPILTYSFGIIKWSKTDIENLERVTRTTLTKHNHLHPKSAIERLTIKRQNGGRGLIDISNLWQKQIYNLKIFFQAKSEISNLHKAIIYNDYNFTPINLSEPNIQDPTNTDTQTRKIDTWKKKTLHGRHPHDLDQTHVDKIASNKWLKVGSLFPETEGFIIAIQDQVINTKNYRKHIIKDPSVTNDKCRRCHSQPETIQHITGACTTLTQTDYTQRHNQVVNIIHQNLALKHQFIQDTNTPYYKYKPETVLENTTHKLYYDRAILTDRTIPYNRPDITLQDKIKKITYLIDIAVPNTHNIQKTITEKISKYAELKDEVTRIWKQDKVYIVPIVISTTGIIPKQLHNSLKLIDLKDNLYITLQKASILNTCRIVRKFMQLEEDEILQH

SEQ ID NO: 21544 - protein, 1303 aa, Apodemia mormo
METRSKYRKRIGPLPGGNRRGTPGADAGCHSMRTVSGAELSRRAPTGSSELVTADPNDNTDRLIDSDNISSNSINTIVEPSSSSTNSYIPSPVPSVDENSREAPTPTLNVAQEVNAFLPASTKAGKPRMRMSWNKDVNMFIMRTYYYITKLETDMTTYRKQLHESFTQQYPQIKVTEQRISDQRRAIIRNKLLTDEVLNRLKDEVKTQLGNEIHNNIHTNIITHTNNIQENAQSLPSQTDTLLIPYTQSQIQSYAQTLDTSTQTETVTLTLENDIELFVNPTPITNTHEQEITDKFRSALTKYSGMNPALRPKLPKLKNSEKLFQLTNLFNQSILKEFISDDIQLVDIHTIIYCTAVVISEELNYKILERDKSSNLKPKHIDKPPWQVRLEKDIEKLRVDCGRLTQYINNNRSNKVVKRVEAIFKSRMIHTRHEGNNRKPEEFLDTLKQKLALKAHRLRRYKKAQQRKNDNILFTNNEKLFYKNLEKAYTETPITHSIEIPSQEQLETFWSGIWEEQAQHNDKAHWIIEEENRWNTIGEMEFHKITKSDITKVTDRLHNWKSPGIDKIHNFWYKKLTSLHNSIARTLTDIITGKQNIPEFIATGITYMIPKSNYSAQPSQYRPITCLPTIYKILTSAITSKITTHIEQNRIISEEQKGCRRGHMGCKEQLIIDSTIHKHATTKLRNLHCTYIDYKKAFDSIPHSWLLKILKIYKINSKIIEFIKNIMQHWKTTLQINNHNNTVATRQIFIRKGIYQGDSLSPLWFCLALNPLSNMLHGCRAGYCLKHTGQDTVLSHLIYMDDIKLYAKSEKDMKKLLDKTIEFSKDINMEFGIDKCKTLHITRGKIQPGDYVIDDNTIITAMEPTDLYKYLGYKQLKGLDHTLIKKTLTTEYKRRLGSICKSQLSGKNLIKALNTYAIPILTYSFGIIKWSKTDIENLERVTRTTLTKHNHLHPKSAIERLTIKRQNGGRGLIDISNLWQKQIYNLKIFFQAKSEISNLHKAIIYNDYNFTPINLSEPNIQDPTNTDTQTRKIDTWKKKTLHGRHPHDLDQTHVDKIASNKWLKVGSLFPETEGFIIAIQDQVINTKNYRKHIIKDPSVTNDKCRRCHSQPETIQHITGACTTLTQTDYTHRHNQVVNIIHQNLALKHQFIQDTNTPYYKYKPETVLENTTHKLYYDRAILTDRTIPYNRPDITLQDKIKKITYLIDIAVPNTHNIQKTITEKISKYAELKDEVTRIWKQDKVYIVPIVISTTGIIPKQLHNSLKLIDLKDNLYITLQKASILNTCRIVRKFMQLEEGEILQH

SEQ ID NO: 21545 - protein, 1284 aa, Entheus sp.
MRRSNRIKLKKSAQPESVAGMTSTIESNPSSPISSTHSLVPSPSSSQYTFENSVTIESHSNTMSPTSSNIDREMNTVVPTSDVARGANAFLPASTKAGKPRVRMKWSQDVNLFIMRTYYYITKLETDMTIYRKTLHELFSLQYPEVTVSEQRVSDQRRMIIKHKYLPQQILDKLKEEVTRQLEKENLKDRVNNNMTQNQIEVNHDILESDAQSQATLSFSLSCTNLVHPNTQTSQNRTEPVSLLVENDIDTNAELHQLTDARSQELHDKLYTKILEYSGMDPVARPRLPRIRYTKYLNELVNLFNEHILVRFISEDTQLTDIHTLVYCTALVISEELNYKITQDTTHIQATHTTKQPWQIRLERDIEKLRVDIGRLTQYINKNRSAKLVQNVQKIFNNITKHSKHEIDNSKPEEFLDTLKQKLALKTHRLKRYKKTQQRKKDNKQFVLNEKIFYRNLRKSDIISEVHNSTETPTQEQLENYWTDIWENKAQHNEKADWITEENTRWEKIEEMDFQEITENDIKNITARLHNWKSPGADKIHNYWYKKLTALHISLAKNLTEIILGKQNIPYFIATGITYMLPKGKNSTQPSQYRPITCLPTIYKILTSAITTKITTHIEHNRILAEEQKGCRRGHMGCKEQLIIDSVIHKQAATKNRNLHCTYIDYKKAFDSVPHSWLIQILQIYKINHGIIDFLRNIMSYWKTTIQLNQNNKQISTRQININNGIYQGDSLSPLWFCLALNPLSNLLNKCRTGYRFSNGNKETVSHLIYMDDIKLYAQTEKHMKNLIDSTTAFSKDINMQFGLDKCKTVHIIRGKILPGDYTVSDTDIITAMESSDIYKYLGYDQSKGLQHTNIKNTLTTEYKRRINAICKTQLTGKHLTKAVNTYAIPILTYSFGIIKWTKTDIGEIERTTRTVLTKHNHLHPKSAIERLSTKRQDGGRGITDIQYLWHKQINSLRHFFFIKSATSNLHLAIKHNDNNYTPLNLIEYSNQQEPNNNRHIQKIEEWKKKVLHGRHPHDLEQIHVDKIASNKWLQVGNLFPETEGFMVAIQDQVINTKNYRKYIIKDPNTTNDKCRRCHRQPETIQHITGACSSLTQSDYTHRHNQTANIIHQKLALKHKLIQNTKTPYYKYLAPTVIENTTHKLYYDRAILTDRTIHHNRPDIILQDKLNKITYLIDVAVPNTHNINKTITEKINKYMELKEEVIKIWKQNKVYIVPIVLSTTGVIPYHLHKSLKLLDLAQSIYIPLQKAVILNTCRIVRKFMQIEENDIAPYNIIDPAIDSL

SEQ ID NO: 21546 - protein, 1317 aa, Ochropleura plecta
METRSKNKRIGPLPGGDRRGAPGADAGCHSMRTVSGEELNRRAPTDKDTTAEIIDDGDRLTDRTDTPVEPYSPSTVSYTPSRPSSPSISSSPTLSTHPIITLNTVSPTPTLNAARGVSTFLPASTKAGKARVRMKWSKEVNLFIMRTYFYITKLETDMTTYRKQLHELFTQQYPEITVSEQRISDQRRAIVRNKLLSQAIIDQLKEDIRVQLQADDNTTPLLENLTDIAQQPQTQLNTQPQPNIQSQLYNQSQANTQTSHTSTQTEYITFTLENDIETLVVENHNPTTDTYIQEIHDKFRTTLSQYSGMDPAIRPKLPKLRYSPNLFRLVNLFNENILNQFISDETQLIDIHTLIYCTAVVISEELNFKITQNTGNPRPKQNIKPAWQQRLEKDIEQLRADIGRLTQYINNNRSSKVVRRVEAIFRTHLVHTRHENNNRKPEEFLDTIKQKLALKVHRLRRYKKAQQRKNDNAIFATNEKIFYRNLNKPNTDTHYDTNTDTPTQPTKEQLETYWASIWEQQARHNDEAAWITEEETKWKAIDEMEFVEVTEADITHITGRLHNWKSPGIDKVHNFWFKKLTSLYKPIARNLTQIILGQQNAPEFIATGITYMLPKTKNSPQPSQYRPITCLPIIYKILTSAISTKINRHIEQHNIMAEEQKGCRRDHMGCKEQLIIDSTIHKHATTKNRNLHCTYIDYKKAFDSVPHSWLIQILKIYRVNSKIIDFLSNIMSQWKTTLQINCNQNSITTRQILIKNGIYQGDSLSPLWFCLALNPLSHLLQRCQAGYRLKHTTEQTTISHLIYMDDIKLYAQTEKDMKKLVEVTADFSQDINMQFGLDKCKTLHIIRGKIRPGNYVVNNTDTITAMEPSDLYKYLGYTQLKGLDHVRIKETLTAEYKRRLNVVCKTQLSGKNLIKALNTFAIPILTYSFGVIKWTKTDTEQLERTTRTTLTKHNNLHPKSAIERLTIKRQNGGRGLIDIQHLWRKQVCRLKTFFHTKSHTSNIHKAIVQNDHNYTPLNLNEQLDHTSHNTNEDPQTQKIDDWKKKVLHGRHPYDLEQTHVNKDASNKWLKIGNLFPETEGFIIAIQDQIINTKNYRKFIIKDPSVTNDKCRKCHTQPETIQHITGACTTLTQTDYTHRHNQVANVIHQRLAVQYTLIQDTNTPYYNYTPQATLENDTHKLYYDRAILTDRTIHYNRPDIILQDKINKITYLIDIAVPNTHNIQKTITEKISKYAELKEEVTRIWREEKVYVVPIVLSTTGVIPNHLLHSLKLLSLKETLYITLQKAAILNTCRIVRKFMQIEENEIGPHHNTPHTST

SEQ ID NO: 21547 - protein, 1311 aa, Pellicia arina
METRSKKKRSGPLPGGDRRGTPGADAGCLSMRTVSGEELNRRTPTGSSENATAETNTLTNRSSQIACYSPSTISYMPSMPTSPSISRCSSDPESPVLTLDVAQVANAFMPVSTKAGKPRVRMRWSKEINLFIMRTYYYITKLETDFTTYRKQLHEHFTRQYPDVKVTEQRIADQRRTIVKNKRLNEETLNQLKQDVKLHLEKETQMQEQTNTIVPIEEHVMQLQNFPTSQYHNHSTLGTQNTQSSNLTAYNTHSPQSFTQIGSENLSQENYTNNVESHTSRDNIQEIYDKFKTALTLYSGMNPIVRPKLPKLRYSPQLFQLISIFNYNILNNFLSDNTDFTDIHTIIYCTALVISEKLNYKITDYTQHKTLKDHYKPPWQLRLEKDIEKLRADCGRVTQYINGNRSAKITKHIETIYKAKIKHSMHEKDNRKPEEFLDTLKQQLALKVSRLRRYKKAQQRKTDNIVFTTNEKIFYRNLRKPQANDSNKNSPNLPTKEQLETFWSDIWEEQVQHNSNAEWIVEEEAKWSALEEMEFTEITETDIFNITNRLQNWKTPGVDKIHNFWYKKLTTLHKSLAKILTDIVLRQQKVPEFIATGITYMLPKSQYSPQPSQYRPITCLPTIYKILTSAITLKINKHIEQHNIIAEEQKGCRRGHMGCKEQLIIDSTIHKHANSKNRNLHCTYIDYKKAFDSIPHSWLIKILQIYKINSKLINFLRIIMSHWKTTLQLSTQETSITTRQILIKKGIYQGDSLSPLWFCLALNPLSSLLKRCQVGYSFKKNKTDIIISHLIYMDDIKLYAKTETDIKKLLDTTAQFSTDINMEFGLDKCKLLHIKRGKIQPGAYTLNNSHTIIAMEPNEIYKYLGYRQLKGLDHTATKEILTIEYRKRINALCQTQLSGKNLIKSLNTYAIPILTYSFGIVKWTKTDIENLERMTRTTLTKHNYLHPKSAIERVTIKRQDGGRGLIDINQLWRKQITTLKSFFLVKSQISDIHKTIVINDHNYTPLNLAQEINEHHSQDTNNSNNAQLQKIEDWKKKTLHGRHAYDLGQPHVDTMASNKWLQIGNLFPETEGFIIAIQDQIINTKNYRKHIIKDKTIINDKCRKCHTQSETIQHITGACATLTQTDYTYRHNQVANIIHQKLALKHKLIHNTHTPYYNYTPQTILENKTHKLYYDRAILTDKTIHYNRPDITLQDKLNNITYIIDIAVPNTHNLQKTITEKISKYTELQEEVARIWKQHKVYIVPIVVSTTGVIPKHLRQSLKVLNLKDNTYITLQKAAILNTCRIVRKFLSLEENEIVPPHVPRSNTTFS

SEQ ID NO: 21548 - protein, 1232 aa, Polyctor polyctor
MPTSPSTSRCSSEPKSPGLTLDVTQVANAFMPASTKAGKPRVRMSWSKEINLFIMRTYYYITKLETDLTTYRKQLHEHFTRQYPDIKVTEQRIADQRRTIVKNKRLNEETLNQLKEEVKLQLEKNTQMQEQTNTIVPIENHIIQFQNVSTSQNHTHSSLVTQNTQSPHVTVHNNHSSQSFTHIGSSNLSLENDTDNVENHTRRDIEEIYDKFKTALTHYSGMDPVVRPKLPKLRYTPELFQLINIFNNNILSNFLSNNTQLTDIHTIIYCTALVISEKLNYKVTDYTQHKTLKNYHKPPWQMRLEKDIEKLRADCGRVTQYIKGNRSSKIIKHIETIFKTKIKHSTHEKDNRKPEEFLDTLKQKLALKVSRLRRYKKAQQRKTDNIIFNTNEKIFYRNLRKHNADDANKNDQNLPTKEQLETFWSGIWEKQVHHNSNAKWIAEEELKWSTIEEMEFSEITEADVINVTNRLHNWKSPGVDKIHNFWYKKLITLHKLLAKNLTDIVLGKQEVPEFIATGITYMLPKSQHSPQPSQYRPITCLPTIYKILTSAITLKINKHIEQYNIIAEEQKGCRRGHMGCKEQLIIDSTIHKQATTKNRNLHCTYIDYKKAFDSIPHAWLIQILQIYKINPKLINFLRNIMSHWKTTLQLSTHENSITTRQILIKKGIYQGDSLSPLWFCLALNPLSSLLKRCQVGYCFKYDKKEIIISHLIYMDDIKLYAKTETDIKKLLDTTTQFSTDINMEFGLDKCKLLHIKRGKIQPGDYILNNSDTITALEPNDLYKYLGYKQLKGLDHTSTKEILTIEYKKRINALCQTQLSGKNLIKSLNTYAIPILTYSFGIVKWTKTDIEKLERLTRTTLTKHNYLHPKSAIERVTIKRQDGGRGLIDISQLWQKQITTLKSFFLIKSQTSDIHKAIVANDHNYTPLNLAQETNEHHSENTNNSNNAQVQKIETWKKKTLHGRHAYDLGQAHVDTMASNKWLQIGNLFPETEGFIIAIQDQIINTKNYRKHIIKDKTITNDKCRRCHTQPETIQHITGACATLTQTDYTYRHNQVANIIHQKLALKYKLIQNTRTPYYNYTPQTILENKTHKLYYDRAILTDKTIHYNRPDITLQDKLSNTTYLIDIAVPNTHNLQKTIIEKISKYTELQQEVTRIWKQQKVYIVPIVVSTTGVIPKHLRHSLKTLNLKDNVFITLQKAAILNTCRIVRKFLSIEENEIVTPHIPRSNTTFG

SEQ ID NO: 21549 - protein, 1326 aa, Noctua janthe
METRSNKKRIGPLPGGDRRGSPGADAGCLSMRTVSGEELNRRAPTDKDTTAEIIDDGDRLTDRTDTPVEPYSPSTVSYTPSRRSSPSIPSSPTPTPLSPPIISLNTVSPTPTLNAARGVSTFLPASTKAGKARVRMKWSKEVNTFIMRTYLYITKLETDMTTYRQQLHELFIRRYPEITVSEQRISDQRRTIVRNKLLSQEEIDRLKVEVRTQLHLESVNDEDTNNIAVTQNTIENIQQEQPQSYDQSEPYTQSQPYFYLSSQAYSQITHTSTQTENVTIMLENDIEVLANINQNPPTDTRIREIHDKFKTALTQYSGMDPAARPKLPKLRYTPKLAQLVHVFNQNILTQYISEDTQLTDVHTLIYCTALVISEELNFKITEYTGNTRQSNVNKPAWQQRLEKDIEKLRADCGRLTQYINNNRSNKVVKRVEVIFKNMSVHTRHENHNRRPEEFLDTLKQKLALKVHRLRRYKKAQERKNDNALFATNEKNFYRKLQKPQTDTDTPVTVNNIELPTTAQLETFWAGIWEEQIHHKETSEWIQDEETKWSSLEEMEFIELSESDITSITARLHNWKSPGIDKIHNYWYKKLESLHKILAKNLTEIILGKQNIPEFIATGITYMLPKTHYSSQPSQYRPITCLPTIYKILTSAITTKINKHVEHHNIIAEEQKGCRRGHMGCKEQLVIDSIIHKHAATKNRNLHCTYIDYKKAFDSIPHSWLIQILHIYKINPQIIEFLRNIMSRWKTTLQLNYRNNAVTTRQIAIKKGIYQGDSLSPLWFCLALNPLSHLLQRCQAGYCLKQTTTEETTISHLIYMDDIKLYSKTEKEMKKLIDITTEFSKDINMQFGLDKCKTVHIIRGKIKPGDYAINTTDTITAMEPTDLYKYLGYRQLKGLDHTTIKQTLNTEYKRRVVAVCKTQLSGKHLIKALNTYAIPILTYSFGVIKWSKTDIQQIERTTRTTLTKHNNLHPKSAIERLTIKRQNGGRGLIDIHHLWQKQITRLKTFFNSKSHTSNIHKAIVINDNSYTPLNLNEQTDTQNTNNEDPQKQKLEDWKKKVLHGRHPHDLEQPHIDTLASNKWLKIGSLFPETEGFIIAIQDQIINTKNYRKFIIKDPTMTNDKCRKCHTQPETIQHITGACTTLTQTDYTHRHNQVANIIHQNLALKHKLIQDSNTPYYKYVAQPVVENTTHKLFYDRGILTDRTIHYNRPDIILQDKVNKVTYLIDIAVPNTHNLQKTIGDKISKYAELKEEVTRIWRQEKVYVVPIVVSTTGVIPNHLHHSLKLLDLKDSIYITLQKAAILNTCRIVRKFMQIDENEISHNSHTHTLR

SEQ ID NO: 21550 - protein, 1326 aa, Noctua janthe
METRSKKKRIGPLPGGDRRGAPGADAGCLSMRTVSGEELNRRAPTDKDTTAEIIDDGDRLTDRTDTPVEPYSPSTVSYTPSRRSSPSIPSSPTPTPLSPPIISLNTVSPTPTLNAARGVSTFLPASTKAGKARVRMKWSKEVNTFIMRTYLYITKLETDMTTYRQQLHELFIRRYPEITVSEQRISDQRRTIVRNKLLSQEEIDRLKVEVRTQLHLESVNDEDTNNIAVTQNTIENIQQEQPQSYDQSEPYTQSQPYFYLSSQAYSQITHTSTQTENVTIMLENDIEVLANINQNPPTDTRIREIHDKFKTALTQYSGMDPAARPKLPKLRYTPKLAQLVHVFNQNILTQYISEDTQLTDVHTLIYCTALVISEELNFKITEYTGNARQSNVNKPAWQQRLEKDIEKLRADCGRLTQYINNNRSNKVVKRVEVIFKNMTVHTRHENHNRRPEEFLDTLKQKLALKVHRLRRYKKAQERKNDNALFATNEKNFYRKLQKPQTDTDTPVTENTIELPTTAQLETFWAGIWEEQIHHKETSEWIQDEETKWSSLEEMEFIELSESDITSVTARLHNWKSPGIDKIHNYWYKKLESLHKILAKNLTEIILGKQNIPEFIATGITYMLPKTHYSSQPSQYRPITCLPTIYKILTSAITTKINKHVEHHNIIAEEQKGCRRGHMGCKEQLVIDSIIHKHAATKNRNLHCTYIDYKKAFDSIPHSWLIQILHIYKINPQIIEFLRNIMSRWKTTLQLNYRNNAVTTRQIAIKKGIYQGDSLSPLWFCLALNPLSHLLQRCQAGYCLKQTTTEETTISHLIYMDDIKLYSKTEKEMKKLIDITTEFSKDINMQFGLDKCKTVHIIRGKIKPGDYAINTTDTITAMEPTDLYKYLGYRQLKGLDHTTIKQTLNTEYKRRVVAVCKTQLSGKHLIKALNTYAIPILTYSFGVIKWSKTDIQQIERTTRTTLTKHNNLHPKSAIERLTIKRQNGGRGLIDIHHLWQKQITRLKTFFNSKSHTSNIHKVIVINDNSYTPLNLNEQTDTQNTNNEDPQKQKLEDWKKKVLHGRHPHDLEQPHIDTLASNKWLKIGSLFPETEGFIIAIQDQIINTKNYRKFIIKDPTMTNDKCRKCHTQPETIQHITGACTTLTQTDYTHRHNQVANIIHQNLALKHKLIQDSNTPYYKYVAQPVVENTTHKLFYDRGILTDRTIHYNRPDIILQDKVNKVTYLIDIAVPNTHNLQKTIGDKISKYAELKEEVTRIWRQEKVYVVPIVVSTTGVIPNHLHHSLKLLDLKDSIYITLQKAAILNTCRIVRKFMQIDENEISHNSHTHTLR

SEQ ID NO: 21551 - protein, 1191 aa, Noctua janthe
MKWSKEVNTFIMRTYLYITKLETDMTTYRQQLHELFIRRYPEITVSEQRISDQRRTIVRNKLLSQEEIDRLKVEVRTQLHLESVNDEDTNNIAVTQNTIENIQQEQPQSYDQSEPYTQSQPYYYLSSQAYSQITHTSTQTENVTIMLENDIEVLANINQNPPTDTRIREIHDKFKTALTQYSGMDPAARPKLPKLRYTPKLAQLVHVFNQNILTQYISEDTQLTDVHTLIYCTALVISEELNFKITEYTGNARQSNVNKPAWQQRLEKDIEKLRADCGRLTQYINNNRSNKVVKRVEVIFKNMAVHTRHENHNRRPEEFLDTLKQKLALKVHRLRRYKKAQERKNDNALFATNEKNFYRKLQKPQTDTDTPVTENNIELPTTAQLETFWAGIWEEQIHHKETSEWIQDEETKWSSLEEMEFIELSESDITSVTARLHNWKSPGIDKIHNYWYKKLESLHKILAKNLTEIILGKQNIPEFIATGITYMLPKTHYSSQPSQYRPITCLPTIYKILTSAITTKINKHVEHHNIIAEEQKGCRRGHMGCKEQLVIDSIIHKHAATKNRNLHCTYIDYKKAFDSIPHSWLIQILHIYKINPQIIEFLRNIMSRWKTTLQLNYRNNAVTTRQIAIKKGIYQGDSLSPLWFCLALNPLSHLLQRCQAGYCLKQTTTEETTISHLIYMDDIKLYSKTEKEMKKLIDITTEFNKDINMQFGLDKCKTVHIIRGKIKPGDYAINTTDTITAMEPTDLYKYLGYRQLKGLDHTTIKQTLNTEYKRRVVAVCKTQLSGKHLIKALNTYAIPILTYSFGVIKWSKTDIQQIERTTRTTLTKHNNLHPKSAIERLTIKRQNGGRGLIDIHHLWQKQITRLKTFFNSKSHTSNIHKAIVMNDNSYTPLNLNEETDTQNTNNEDPQKQKLEDWKKKVLHGRHPHDLEQPHIDTLASNKWLKIGSLFPETEGFIIAIQDQIINTKNYRKFIIKDPTMTNDKCRKCHTQPETIQHITGACTTLTQTDYTHRHNQVANIIHQNLALKHKLIQDSNTPYYKYVAQPVVENTTHKLFYDRGILTDRTIHYNRPDITLQDKVNKVTYLIDIAVPNTHNLQKIIGDKISKYAELKEEVTRIWRQEKVYVVPIVVSTTGVIPNHLHHSLKLLDLKDSIYITLQKAAILNTCRIVRKFMQIDENEISHNSHTHTLR

SEQ ID NO: 21552 - protein, 1326 aa, Noctua janthe
METRSKKKRIGPLPGGDRRGAPGADAGCLSMRTVSGEELNRRAPTDKDTTAEIIDDGDRLTDRTHTPVEPYSPSTVSYTPSRRSSPSIPSSPTPTPLSPPIISLNTVSNTPTLNAARGVSTFLPASTKAGKARVRMKWSKEVNTFIMRTYLYITKLESDMTTYRQQLHELFIRRYPEITVSEQRISDQRRTIVRNKLLSQEEIDRLKVEVRTQLHLESVNDEDTNNIAVTQNTIENIQQEQPQSYDQSEPYTQSQPYFYLSSQAYSQITHTSTQTENVTIMLENDIEVLANINQNPPTDTRIREIHDKFKTALTQYSGMDPAARPKLPKLRYTPKLAQLVHVFNQNILTQYISEDTQLTDVHTLIYCTALVISEELNFKITEYTGNARQSNVNKPAWQQRLEKDIEKLRADCGRLTQYINNNRSNKVVKRVEVIFKNMTVHTRHENHNRRPEEFLDTLKQKLALKVHRLRRYKKAQERKNDNALFATNEKNFYRKLQKPQTDTDTPVTENTIELPTTAQLETFWAGIWEEQIHHKERSEWIQDEETKWSSLEEMEFIELSESDITSVTARLHNWKSPGIDKIHNYWYKKLESLHKILAKNLTEIILGKRNIPEFIATGITYMLPKTHYSSQPSQYRPITCLPTIYKILTSAITTKINKHVEHHNIIAEEQKGCRRGHMGCKEQLVIDSIIHKHADTKNRNLHCTYIDYKKAFDSIPHSWLIQILHIYKINPQIIEFLRNIMSRWKTTLQLNYRNNAVTTRQIAIKKGIYQGDSLSPLWFCLALNPLSHLLQRCQAGYCLKQTTTEETTISHLIYMDDIKLYSKTEKEMKKLIDITTEFSKDINMQFGLDKCKTVHIIRGKIKPGDYAINTTDTITAMEPTDLYKYLGYRQLKGLDHTSIKQTLNTEYKRRVVAVCKTQLSGKHLIKALNTYAIPILTYSFGVIKWSKTDIQQIERTTRTTLTKHNNLHPKSAIERLTIKRQNGGRGLIDIHHLWQKQITRLKTFFNSKSHTSNIHKAIVMNDNSYTPLNLNEQTDTQNTNNEDPQKQKLEDWKKKVLHGRHPHDLEQLHIDTLASNKWLKIGSLFPETEGFIIAIQDQIINTKNYRKFIIKDPTMTNDKCRKCHTQPETIQHITGACTTLTQTDYTHRHNQVANIIHQNLALKHKLIQDSNTPYYKYVAQPVVENTTHKLFYDRGILTDRTIHYNRPDITLQDKVNKVTYLIDIAVPNTHNLQKTIGDKISKYAELKEEVTRIWRQEKVYVVPIVVSTTGVIPNHLHHSLKLLDLKDSIYITLQKAAILNTCRIVRKFMQIDENEISHNSHTHTLR

SEQ ID NO: 21553 - protein, 1021 aa, Tagiades gana
MLENDVEILVDHNIVNETYIQRLYDKLKTALIKYSGMDPTVRQKLPKLNYSPKLSKLIHIFNHNILHQFLSNNTQLTDIHTLIYCTALVIAEELDYKITDRTGFIRPKNTQKPSWQVRLERDIEKLRADCGRLTQYINNNRSNKVIRAVQEIFKNSAKHTKHEKINRKPEEFLDTLKQKLALKVHRLRRYKKAQQRKKDNIMFSTNEKMFYRNLLKVDTNASQVDSPTSSQLETFWSGIWEEQIHHNDEAAWITQENNRWSTIEEMNFDEITELDITNITVKLHNWKSPGIDKIHNYWYKKLTSLHKSIARNLTDIVLGKQNIPEFIATGISYMLPKTKHSQQPSQYRPITCLPTIYKILTSAIANKINTHIEHNQILAEEQKGCRRGHMGCKEQLVIDSTIHKHANIKNRNLHCTYIDYKKAFDSIPHSWLLKILHIYKINPKLINFLRNIMSHWKTTLHLNTHEQTVVTRQIAIKKGIYQGDSLSPLWFCLALNPLSYLLNSCQSGYRFTANQTLISHLIYMDDIKLYAKTENEMKKLIKTTTDFSKDINMEFGLDKCKILHVVRGKVKPGNIEINDNNSITALEPTDIYKYLGYNQLKGLDHTSVKLTLNKEYRRRINAICNTQLSGKNLIKALNTYAVPILTYSFGVIKWSNTDIEHLERITRTTLTKYNHLHPNSAVERLTIKRHSGGRGFIDIHHLWQKQIHSLRTFFHNKSYTSKIHKAIAQNDSNYTPLNLNENLNNSLGNYDSQTQKIENWKKKTLHGRHPHDLEQNHIDPEASNKWLKIGNLFPETEGFMIAIQDQIINTKNYRKFIIKDPSIINDKCRKCHTQSETIQHITGACTLLTQTDYTHRHNQITNIIHQKLALKYNLIQNTNTPYYKYTPQTVLENASYKLYYDRAILTDKTIHYNRPDITLKDKNNNTTYLIDIAVPNTHNIQKTIAEKINKYEELKAEILRIWKQDKVYIVPIVISTTGVVPKYLLQSLKLLNLKENIYITVQKAAILNTCRIVRKFLQIEI

SEQ ID NO: 21554 - protein, 1322 aa, Agrochola circellaris
METRSKRKRIGPLPGGDRRGAPGADAGCLSMRTVSGEELNRRAPTDKVATAEADDGDRLTNRTDTPVEPYSPSTVSYAPSRTSSPSIPSSPIQSSPPIPSFNTVTSTPALNVAREVSTFLPASTKAGKSRVRMRWSKEVNLFIMRTYLYITKLETDMTTYRQQLHELFTRQYPEITVTEQRISDQRRAIVRNKLLSKEIIDQLKDEVRTQLLEESENIEGAITIALTQNAIEHNPQEQPQPYTQPQPITQSQPYFQSHAYSQTTHTSTQTESITIMLENEIETLVDNNQNQSTDTRIQEIHDKFKTALTQYSGMDPATRPKLPKLRYTPKLFHLVNLFNQNILNQYISEETQLIDVHTLIYCTALVISEELNFKITEYTGNTRQGNVNKPAWQQRLEKDIEKLRADCSRLTHYINNNRSNKVVKRVETIFKNMSTHTRHENDNRKPEEFLDTLKQKLALKVHRLRRYKKAQERKNDNSLFASNEKNFYRKLQKPQTDTETPTAENNIELPTAEQLETFWSSLWEEQVQHNAQSDWISDEETKWSSLEEMEFVELTESDIGSITARLHNWKSPGIDKIHNYWYKKLDSLHKVLAKNLTEIILGKQNIPEFIATGITYMLPKKQYSPQPSQYRPITCLPTIYKILTSAITTKINKHIEHHNIVAEEQKGCRRGHMGCKEQLVIDSIIHKHAATKNRNLHCTYIDYKKAFDSIPHSWLIQILQIYKINSKIIDFLQNIMSRWKTTLQLNYRHNTITTQQISIKKGIYQGDSLSPLWFCLALNPLSHLLHRCQAGYSLKHTTEETVISHLIYMDDIKLYAKSEKEMKKLIDITTEFSKDINMQFGLDKCKTIHIIRGKIKPGDYPVNNTDTITAMEQTDLYKYLGYNQLKGIDHTAIKHTLNTEYKRRVIAVCKTQLSGKHLIKALNTYAIPILTYSFGVIKWSKTDIQQIERSTRTTLTKHNNLHPKSAIERLTIKRQYGGRGLIDVHNLWQKQIANLRTFFHSKSHTSNIHKAVIMNDIRYTPLNLHEQIDIDIYTQNTSNNDPHKQKLEDWKKKVLHGRHPHDLEQSHIDTIASNKWLKIGNLFPETEGFIIAIQDQIINTKNYRKFIIKDPTITNDKCRKCHSQPETIQHITGACTTLTQTDYTHRHNQVANVIHQKLALKYKLIQDTNTPYYKYIPQVILENTTHKLYYDRAILTDRTVHYNRPDITLQDKVNKVTYLIDIAVPNTHNLQKTIGEKISKYADLKEEVTRIWRQEKVYVVPIVVSTTGVIPNHLHHSLKLIDLKDSIYITLQKAAILNTCRIVRKFMQIEENEITPHNINST

SEQ ID NO: 21555 - protein, 1294 aa, Eupsilia transversa
METRSKRKRIGPLPGGDRRGAPGADAGCHSMRTVSGEELNRRAPTDKDVTAEISDDGDRLTNRTDTPVEPYSPSTLSYTPSRISSPSIPSSPIQSSPPINSLNSIPPTPALNVAREVSTFLPASTKAGKARVRMRWSKEVNLFIMRTYFYITKLETDMTTYRQQLHELFTRQYPEITVSEQRISDQRRAIVRNKLLSQEVIDQLKEEVRKQLLQEETENSANTNTITQNTNENSLQDQPESLTQSQPNIESLPYYQSQTSHISTQTESITLTLENDIETVAAVNQNPITDMYIQEIHDKFRTTLTQYSGMEPAARPKLPKLKYSPNLFRLVNLFNEDILKLFLSDDTQLTDIHTLIYCTAVVISEELNFKITEHTRNTIQRDTVKPPWQQRLEKDIEKLRADCGRLTHYINGCRSHKVVKRVEAIFKNNFTHTRHENNNRKPEEFLDTLKQKLALKVHRLRRYLKAQQRKKDNAIFATNEKIFYRNIQKPHTHLTTQNYTDIPSKEHLETFWSNIWEEQVHHNDKATWITEEATKWGTIDEMEFKEITESEITYLTAKLHNWKSPSIDKIQNFWYKKLTILHKSIAKNLTDIVLGEQNIPEFIATGITYMLPKTEYTSEPSQYRPITCLPTIYKILTSAITNKINSHIEHHNMIAEEQKGCRRGHMGCKEQLVIDSTIHKHATTKNRNLHCTYIDYQKAFDSIPHSWLIQILEIYKINSKIIEFLRIIMTRWKTTLQINNRISTLITRQIHIRKGIYQGDSLSPLWFCLALIPLSHLLNRCRAGYKFKNNTDETIISHLIYMDDIKLYTQTEKEMKTLIEITTTFSQDINMQFGLDKCRTLHIIKGKVKPGNYAVSDTDTIVAMEPTDLYKYLGYKQLKGLEHTAIKQTLNTEYRRRINAICKTQLAGKHLIKALNTFAIPILTYSFGVIKWSKTDIEQLERTTRTTLTKHNKSIKRQNGGRGLIDIHDLWQKQITRLKTFFYTKSRTSNIHKAITSNDFNYTPLNLNEQNIQDINIIDPQNQKIENWKKKVLHGRHPHDLEQPHINKLASNKWLKIGNLFPETEGFIIAIQDQIINTKNYRKFIIKDPTITNDKCRRCHIQSETIQHITGACTSLTQTDYTHRHNQVANIIHQKLALKHTLIQNTNTPYYKYTPQIILENDTHKLYYDRAILTDRTIHYNRPDITLQDKIKKTTYLIDIAVPNTHNLQKTIAEKISKYAELKEEVTRIWRQDKVYVVPVVLSTTGVIPNHLLRSLKLIDLEESLYINLQKAAILNTCRIVRKFMQLDESTLSP

SEQ ID NO: 21556 - protein, 1294 aa, Epargyreus clarus
MRRSTRIQNKNKNKNKNSAQYGTVAELSSHPSSPMSSTHSLFQSTNSTPLSFENHSNSVSRSTTASPILTNIEHTQETTLPAFAVARGANAFLPASTKAGKTRVRMKWSQDVNIFIMRTYYHITKLETDMTTYRKTLHELFSIPYPDVKVSEQRVSDQRRMIIKNKYLTQEILNKLKEEVSKQLQEDENINLINSDNSQIHIDADRNTLESQTQSQNNLSQSHILSQSYPQSFLPTSHTSTQTEFITLLLENETEIIADLIPLNEDSFQDMYDKLLSALTQYSGMDPTARPKLPRIKYTKHLDELVHLFNQNILHRFITKETQLNDIHTLIYCTALVIAEELNYKIIPNTTHIKSKDYTKPSWQVRLERDIEKLRADIGRLTQYINNNRSDRLVKKVQNIFHRIAIHTKHESNNKKPEEFLDTLKQKLALKTHRLKRYKKTQQRKKDNTQFARNEKLFYRNLYKSKIGVTSVTTKGDNHTEIPTKEELETYWSNIWEENITHNDKADWIAEEQGKWEVIDEMQFQEITEGDISNITARLHNWKSPGIDRIQNYWYKKLTILHKPLAKAITEIILGKQNIPNFITIGITYMLPKTNNSTQPAQYRPITCLPTIYKILTSAIRTKINTHIENNNILAEEQKGCRRAHMGCKEQLVIDSIIHKHASSKHRNLHCTYIDYKKAFDSIPHSWLIKILQIYKISPIIIDFLSNIMTQWKTTLHLNQGNKSVSTRQISIKKGIYQGDSLSPLWFCLALNPLSNLLNKCQTGYRLNNSTEETIISHLIYMDDIKLYAKSHKDMQKLLNKTTQFSSDINMQFGLDKCKTLHIIKGKIQSGDYSLHNNDVISAMEPTDVYKYLGYNQLKGLLHTQIKQTLTIEFKRRIDAICKTHLSGKHLTKAINTYAIPILTYSFGIIKWTKTDIEQLERITRTTLTKHNYLHPKSAVERLNIRRQDGGRGVIDIDYLWQKQISNLRHFFFMKSTTSNIHSAITQNDENLTPLNLADHTKHTVNNINPQIQKIEHWKNKVLHGRHPHDLEHTHVDKIASNKWLKVGNLFPETEGFMLAIQDQVINTKNYRKHIIKDPNVKSDKCRRCHAQPETIQHITGACTNLTQTDYTHRHNQVTNIIHQNLAVKHNLIHNTNTPYYKYTPQTVIENTSHKLYYDRAILTDRTTHYNRPDIILQDKLNKITYLIDIAVPNTHNIQKTIAEKINKYADLKEEVTRIWKQNKVYVVPIVLSTTGVIPYHLHQSLKLIGLTNSIYITLQKAAILNTCRIVRKFMQIDENEVEPHNRIQTIAPP

SEQ ID NO: 21557 - protein, 1295 aa, Pararge aegeria
METRSKRKRIGPLPGGNRRGAPGADAGCLSMRTVSGEELNRRAPTDKNTTAEVIDDDDRLTDRTSTPIEPYSPSTISYTPSSRTSSPSLPSSPPIAILNANPSIQTLNVAREASTFLPASTKAGKARVRMKWSREVNIFIMRNYLYITKLETDLTTYRQRLHELFKEQYPSIIVSEQRISDQRRAIVRNKLLPQDIIDQLKIEIRRQLEEESKSNTDTNTAALTQTRSQNIQQIQPLQPNTQQQTYNQLQPYSQTSHTATQTETIFLTIENDVEHLDNTDRNTISEKYVQEILNKFKTAITQYSGMDPAARPKLPKLKHSPNLFRLVNIFNESILYQFMSIDTQLIDIHTVIYCTALVISEELNFKITEYTENSRSRHNNKPPWQQRLEKDIEKLRADCGRLTQYINNNRSNKVVKRVEAIFKSNFIHTRHENSNTKPEEFLDTFKQKLALKVHRLRRYKKAQQRKKDNAIFATNEKMFYRNLNKPHTDRISDEKIETPTIEHLENFWSGIWEQQVEHNNEAAWITEEDFKWRGIDEMEFKEFTESDITIITARLHNWKSPGIDKIHNFWYKKLTSLHKIIAKVFTDIVLGRQNIPEFIATGITYMLPKTKYTTQPSQYRPITCLPTIYKILTSAITTKINLHVKRHNIIAEEQKGCRRGHMGCKEQLVIDSTIHKHATAKNRNLHCTYIDYQIAFDSIPHSWLIKVLEIYKVNPKIIIFLRSIMSHWKTTLQLSNRLNTLVSRQIYIRKGIYQGDSLSPLWFCLALNPLSDLLHKCRAGYSFKHNSKETIISHLIYMDDIKLYAKSENEMKNLINITTEFSQDINMQFGIDKCKAVHIIKGKIKSGDYIINENDTISSMETTDLYKYLGYKQLKGIDYTAVKQTLNTEYRRRINAICKTQLSGKHLIKALNTFAIPILTYSFGVIKWSKTDIEQIERITRTTLTKHNNHHPKSAVERLTIKRQNGGRGLIDIYHLWQKQISRLRTFFHSKSLTSDIHKAITIMDLNYTPLNLNEKIDTQNTSITDPQKQKLENWKKKVVHGRHRHDLEQPHINTVASNKWLKIGNLFPETEGFIIAIQDQIINTKNYRKYTIKDSTITSDKCRRCHIQSETIQHITGACTTLTQTDYTHRHNQVANIIHQKLAFKHMLTQNTNTPYYKYTPQTYKIYYDRAILTDKTIHYNRPDIILQDKLRITTYLIDIAVPNTHNIQKTVSEKICKYTELKEEITRIWKQAKVYVVPIVISTTGVIPNSLLHSLKIIGLEESLYIGLQKAAILNTCRIVRKFLQVDESIGLT

SEQ ID NO: 21558 - protein, 1263 aa, Thymelicus lineola
MRTVSGEELNRRAPSGYPEYTTANTTDNHSNTNSSMSIEEPYSPSTTSYIPSPVSFADDISREAPTSTLSVAQEVNTFLPASTKAGKPRVRMRWSKEVNLFIMRTYYHITKLETDMTMYRKQLYDLFSQQYPEIKVTEQRISDQRRTIIRNKLLSIDTLNQIKEEVRIKLQENTDSIETMINDQPNAQITQSHDIDIQLVPQTRTQLNTETSHISTQTTHRCVQTECETLVVENEIEILVETNPLTETHVQRLHDRLKSTLIQYSGMDPTVRPKLPKLKYSYKLAQLTNLFNNDILPQYISNDTKLIDVHTLIYCTGAVVAEELNYKIIEHANNVEQKHNNKPPWQQRLEKDIEKLRADCGRLTQYINNIRTKKVVKKVQEIFRRKITHTKHESNNSTPEEFLDTLKQKLALKVHRLRRYKKAQQRKNDNILFNKNEKVFYRNLQKKTENTKIDNLKIPTEIQLEEFWAKIWEENAQHNDRAKWITQEENRWSAIPEMEFVEITETDITNVTTTLHNWKAPGIDKIHNYWYKKLSSLHKSIAKNLTDIILGKQNIPEFIATGITYMLPKTIYTQEPSKYRPITCLPTIYKILTSAIARKINTHIEHNHIMVEEQKGCRRGHMGCKEQLIIDSTIHKHATTKNRNLHCTYIDYQKAFDSVPHSWLIQVLNIYKINPKLVSFMRNVMTFWKTSLQLNFRNSTIKTRQISIRKGIYQGDSFSPLWFCLALNPLSNLLRGCSAGYTLKSTTEKTTISHLIYMDDIKLYSQTQKQMEQLINVTTEFSKDINMEFGLDKCKTLHIIKGNIRPGDHEIDQNHIIRAMEPSDVYKYLGYNQLKGLNHTQIKQTLTVEYKRRINAVCNTQLSGKNIIKALNTYAIPILTYSFGVVKWSNTDIAHIERITRTTLTKHNYLHPKSAIERLTIKRDSGGRGLIDIHHLWEKQIDNLSSFFHTKSLTSNIHKAISQNDHNFTPLNLSENQHIRSEHRDPQSYKIDNWKKKTLHGRHPHDLYQSHIDSVASNKWLTIGSLFPETEGFITAIQDQVINTKNYRKFIIKDSSIISDKCRKCHIQPETIQHITGACTTLTQTDYTYRHNQVVNIIHQKLALKHNLVNDTNTPYYKYTPATVLENATHKLYYDRAILTDRTIHYNRPDITLQDKTNKVTYLIDVAVPNTHNIQKTITEKINKYLELKEEIARIWKQNKVYVVPIVLSTTGVIPKHLRHSLQILDLKDTLYITFQKAVILNICRIVRKFLQIDIYETHTHTV

SEQ ID NO: 21559 - protein, 1188 aa, Urbanus sp.
MTWSQDVNIFIMRTYYHVTKLETDMTTYRKTLHELFSIKYPDIKVSEQRVSDQRRMIIKNKYLTQETLNKLKEEVSSQLREEESINLNSDNTEHVMEPDYNPPESHVQSQNNSFQSYNLSQCHTQTVVPTSHSATQTEFITLLVENETEIIADLAPPNEASFQDMYEKLQTALSKYSGIDPTVRPKLPRIKYTKYLNDLVHLFNKHILHRLISEETQLNDIHTLIYCTAVVIAEELNYKIIHNTTHIKPKEYTKPSWQIRLEKDIENLRVDIGRLTQYINNNRSDKLIKKVQHIFNRITKHTKHESNNRKPEEFLDTLKQKLALKTHRLKRYKKTQQRKKDNIQFATNEKLFYRNLCKPKIDCTTKESNQTGILSKEELETYWSNIWEENISHNDNADWITEEQNRWKIIDEMEFQEITERDITNITGRLHNWKAPGVDKVHNFWFKKLTSLHQPLARSLTQIILGKQNIPKFITIGITYMLPKSNNSTQPSQYRPITCLPTIYKILTSAITSKINTHIERHNILAEEQKGCRRGHMGCKEQLVIDSVIHKHATTKHRNLHCTYIDYKKAFDSIPHSWLIKILQIYRISPIIIDFLHNIMSHWKTTLHLHLGNKSITTRQIHIKKGIYQGDSLSPLWFCLSLNPLSNILHNCQTGYRLNNSAEETTISHLIYMDDIKLYAKTHKDMQKLLDKTTQFSNDINMQFGLDKCKTLHIIKGKIQSGDYRVNDTEVISALEPTDVYKYLGYNQLKGILQTHIKQTLTTEFKRRVDAICKSHLSGKHLTKAINTYSIPILTYSFGIIKWSKTDIEQLERTIRTTLTKHNNLHPKSAVERLNIKRQDGGRGIIDINCLWQKQISSLTHFFLLKSKTSNIHSAITHNDQNLTPLNLSNYTDQNIHINTLINSQQQKIEQWKNKVLHGRHPHDLEQAHVDKIASNKWLKVGNLFPETEGFMLAIQDQVINTKNYRKHIIKDPNVKNDKCRRCHTQPETIQHITGACTNLTQTDYTHRHNQVTNIIHQNLALKHNLIQNTNTPYYKYTPQTVIENTSHKIYYDRAVLTDRTIHYNRPDIILQDKLNKITYLIDIAVPNTHNIQKTIVEKINKYAELKEEVTRIWKQNKVYVVPIVVSTTGVIPYHLHQSLKLIGLKHSMYIPLQKAAILNTCRIVRKFMQIDEKEVGPHNITQTIGSP

SEQ ID NO: 21560 - protein, 1012 aa, Xestia xanthographa
MDPAIRPRLPKLRYSPNLFRLVNLFNENILNQFISDETQLIDIHTLIYCTAVVISEELNFKITQNTGNTRPKQNIKPAWQQRLEKDIEKLRADIGRLTQYINNNRSNKVVRRVEAIFRSHLIHTRHEHNNRKPEEFLDTIKQKLALKVHRLRRYKKAQQRKNDNAIFATNEKIFYRNLNKPNTDTNHDTNTDTPNQPTKEQLETYWSSIWEEQARHNDEATWITEEETKWRAIHEMEFVEITEADITHITGRLHNWKSPGIDKVHNFWFKKLTSLYKPIARNLTQIILGQQNIPEFIATGITYMLPKTKNSPHPSQYRPITCLPTIYKILTSAITAKINTHIEHHNIMAEEQKGCRRGHMGCKEQLIIDSTIHKHATTKSRNLHCTYIDYKKAFDSVPHSWLIQILKIYRVNSKIIDFLSNIMSQWKTTLHMNCNHNNVTTRQIFIRKGIYQGDSLSPLWFCLALNPLSHLLQRCRAGYCLKHTTTQAQLQEKTTISHLIYMDDIKLYAQTEKEMKKLVEATAEFSQDINMQFGLDKCKTLHIIRGKIRPGNYVVNNTDTITAMEPSDLYKYLGYTQLKGLDHVRTKETLTAEYKRRLNAVCKTQLSGKNLIKALNTFAIPILTYSFGVIKWTKTDTEQLERTTRTTLTKNNNLHPKSAVERLTIKRQNGGRGLIDIQHLWRKQVCRLKTFFHTKSHTSNIHKVIAQNDHNYTPLNLYEQSDTSHIDNEDPQTQKIEDWKKKVLHGRHPHDLEQSHVNKIASNKWLKIGNLFPETEGFIIAIQDQIINTKNYRKFIIKDPSVTNDKCRKCHTQPETIQHITGACATLTQTDYTHRHNQVANIIHQRLAVKYTLIQDTNTPYYNYTPQATLENDTHKLYYDRAILTDRTIHYNRPDIILQDKINKVTYLIDIAVPNTHNIQKTITEKISKYADLKQEVTRIWRQEKVYVVPIVLSTTGVIPNHLLHSLKLLSLKETLYITLQKAAILNTCRIVRKFMQIEENEIGPHHNTPST

SEQ ID NO: 21561 - protein, 1284 aa, Tagiades gana
MRLRSANKLPQAGTGANSNGESRPETQRSGCPTYSGGDIVSQFSAQLRTVADSNIHTSNTIHSHSPTQIDDNSSLNTSINEPYSPSTASYIPSPGSSVGQNSRETPKPSLSVAQEGNTFLPASTKAGKQRVRMSWSKDVNIFIMRTYYFITKLEEDMTTYRKRLHEIFTSHYPQINVSEQRISDQRRTIVRNKLLSQDILTQLREEVRKQLLEDNHNEPTTRIHNTPHISSNVEINSHSFLTQPQQCTQKSHAFTQTENEVLMLENDVEILVDHNNVKEKYTQTIYQKLKTALIKYSGMDPSFRPKLPKLNYSPKLSKLVHVFNQNILHQFLSDNTQLTDIHTLIYCTAVVISEELDSRRVTDSTGFIRPKNSQKPSWQVRLEKDIEKLRADCGRLTQYINNNRSNKVIRKVEEIFKNCVRHSKHENNNRKPEEFLDTLKQKLALKVHRLRRYKKAQQRKKDNIMFSTNEKMFYRNLLKVDTNAIIVDTPTSSQLETFWSGIWEEQIHHNDKASWITQEKNRWSMRDEMKFDEITELDIANITARLHNWKSPGIDRIHNYWYKKLTSLHKSIARNLTDIVLGKQKIPDFIATGITYMVPKIKHSQQPSQYRPITCLPTIYKILTSAIANKINTHIEQNQIIAEEQKGCRRGHMGCKEQLVIDSTIHKHANTKNRNLHCTYIDYKKAFDSIPHSWLLKILDIYKININLINFLQNIMNHWKTTLHLNTHEKTIITRQIAIKKGIYQGDSLSPLWFCLALNPLSHLLNSCQSGYRFTTDRTPISHLIYMDDIKLYAKTEYEMKKLINTTTEFSKDINMEFGLDKCKILHVIRGKVKPGDFAIDDSNRIIAMEPTDIYKYLGHNQLKGLDHTSIKVTLSTEYRRRINAICNTQLSGKNLIKALNTYAVPILTYSFGVIKWSNTDIEHLERNVRTSLTKYNYLHPNSAVERLTIKRHNGGRGFIDIHHLWQKQIHSLRTFFYTKSNTSSIHKAIVQNDNNYTPLNLNGNLSFNPSNHDPQKQKIENWKKKTLHGRHPHDLQHNHIDPVASNKWLKVGNLFPETEGFMIAIQDQIINTKNYRKFIIKDPSIINDKCRKCHTQSETIQHITGACTLLTQTDYTHRHNQITNIIHQKLALKHNLIKNTNTPYYKYNPQTVLENACYKLYYDRAILTDKTIHYNRPDVVLKDKNNNITYLIDIAVPNTHNIQKTIAEKINKYEELKAEIIRIWNQDKVYIVPIVISTTGVVPKYLFQSLKLLDLSENTYITLQKAAILNTCRIVRKFLQIEI

SEQ ID NO: 21562 - protein, 1325 aa, Laothoe populi
METRSKKKLRGPLPGGDRRGTPGADAGCFSIRSVSGEELSRRTPTGLPEIVTADIDQHDGLTDSRTNSRIEAYSPSTLSYAPSTRSSPSIPTSSPTNNSRYPTRPALDVAREANAFLPASTKAGKPRVRMSWSKDVNLFIMRTYYYITKLETDMTTYRKQLHECFSRQYPDVKVTEQRVSDQRRAIERNKLLSQNILNKLKEEIRIQLQDEIHYTDNADNATPTDQGRNHPQSLSQFCLTYTNTQSIPQDQISTTQLSQNTQTNRLLYNQQTQTLETSTQTDTITFTLENDIGILMEPNITTNRHIQEIQEKFTTCLTLYSGLDPRTRPKLPKLRYNPKLTALLQIFNQKILNQFLSEDTKLVDIHTLIYCTAVVIAEELGYKITEQTTTDNRHKHNNKPAWQHRLEKDIEQLRADCGRLTQYNNNNRSKKVVKRVEKIFKNMLTHTRHESHNKKPEEYLDTLKQKLALKVHRIKRYKKAQQRKNDNNLFATNEKAFYRNLRKPLENNNNENVESIPNKEELESFWTNIWEKQIQHNDKANWIKEEEERWSTLEEMESIEITETDIKFITHRLNNWKSPGIDKIQNFWFKKLTSLHQAIAKKFTDIILGKQNIPHFITNGITYLLPKNKISPQPSQYRPITCLPTIYKILTAIISFKINTHIEHNNIIAEEQKGCRRGHMGCKEQLVIDSTIHKHATSKHKNLHCTYIDYKKAFDSIPHSWLIHILNIYKVNSNIVEFLKNIMTQWTTTLYLNNQNNRIVTREIKIKKGIFQGDSLSPLWFCLALNPLSYQLQCCRAGYNLKHTTEETTISHLIYMDDIKLYAKTEKDIKKLVVTTSNFSKDINMQFGLDKSKTLHIIKGKIQPGDYVISNSDTITAMEPSDLYKYLGYKQLKGLDHTNIKQALSTEYQRRINITCKTQLSGKHLIKAINTYAIPILTYSFGIIKWTKTDIEKIERTTRTTLTKHNHLHPKSAVERLTIKRQEGGRGLIDIYHLWQKQLFNLKEFFYTKSHTSNIHKSIVHNDQNFTPLNLYEQTNAENPINIDPQKRKIENWKKKVLHGRHPHDLQQTHVDSIASNKWLKIGNLFPETEGFTIAIQDQIINTKNYRKYIIKDPTVTNDKCRRCHTQPETIQHITGACASLTQTDYTHRHNQIVNIIHQTLALKYKLISNTTYIPYYKYSPETVLENSLSKLYYDRAILTDRTIHYNRPDIILQDKAHKITYLIDIAVPNTHNLQKTIIEKINKYAELKEEVTRIWRQEKVYVVPIVLSTTGVIPKHIHKSLDLLDLNKSIYISLQKAAILNTCRIVRKFMQIDENEIAQQSNIP

SEQ ID NO: 21563 - protein, 1048 aa, Laothoe populi
MPLGFRTYDFRLDSPYRNQLGYRCLYRHIQEIQEKFTTCLTLYSGLDPRTRPKLTKLRYNPKLTALLQIFNQKILNQFLSEDTKLVDIHTLIYCTAVVIAEELGYKITEQTTTDNRHKHNNKPAWQHRLEKDIEQLRTDCGRLTQYINNNRSKKVVKRVEKIFKNMLTHTRHESHNKKPEEYLDTLKQKLALKVHRIKRYKKAQQRKNDNNLFATNEKAFYRNLRKPLENNNNENVESIPNKEELESFWTNIWEKQIQHNDKANWIKEEEERWSTLEEMESIEITESDIKFITHRLNNWKSPGIDKIQNFWFKKLTSLHQAIAKNFTDIILGKQNIPHFITNGITYMLPKNKISPQPSQYRPITCLPTIYKILTAIISFKINTHIEHNNIIAEEQKGCRRGHMGCKEQLVIDSTIHKHATSKHKNLHCTYIDYKKAFDSIPHSWLIHILNIYKVNSNIVEFLKNIMTQWTTTLYLNNQNNSIVTRQIKIKKGIFQGDSLSPLWFCLALNPLTYQLQCCRAGYNLKHTTEETTISHLIYMDDIKLYAKTEKDMKKLVVTTSNFSKDINMQFGLDKCKTLHIIKGKIQPGDYVISNSDTITAMEPSDLYKYLGYKQLKGLDHTNIKQALSTEYQRRINITCKTQLSGKHLIKAINTYAIPILTYSFGIIKWTKTDIEKIERTTRTTLTKHNHLHPKSAVERLTIKRQEGGRGLIDIYHLWQKQLFNLKEFFYTKSHTSNIHKSIVHNDQNFTPLNLYEQTNAENPINIDPQKRKIENWKKKVLHGRHPHDLQQTHVDSIASNKWLKIGNLFPETEGFIIAIQDQIINTKNYRKYIIKDHTVTNDKCRRCHTQPETIQHITGACASLTQTDYTHRHNQIVNIIHQTLALKYKLISNTTYIPYYKYSPETVLENSLSKLYYDRAILTDRTIHYNRPDIILQDKAHKITYLIDIAVPNTHNLQKTIIEKINKYAELKEEVTRIWRQEKVYVVPIVLSTTGVIPKHIHKSLDLLDLNKSIYISLQKAAILNTCRIVRKFMQIDENEIAQQSNLP

SEQ ID NO: 21564 - protein, 1325 aa, Laothoe populi
METRSKKKLRGPLPGGDRRGTPGADAGCFSIRSVSGEELSRRTPTGLPEIVTADIDQLDGLTDSRSNSRIEAYSPSTLSYVPSSRSSPSLPTSSPTNNSRYPTIPALDVAREANAFLPTSTKAGKPRVRMSWSKDVNLFIMRTYYYITKLETDMTTYRKQLHECFSRQYPDVKVTEQRVSDQRRAIERNKLLSQNILNELKEEIRIQLQDEIHYTDNADNATPTDQGRNHPQSLSQFCLTYTNTQSIPQDQISTTQLSQNTQTNRLLYNQPTQTSQTSTQTDTITFTLENDIEILMEPNITTNRHIQEIQEKFTTCLTLYSGLDPKTRPKLPKLRYNPKLAALLQIFNQKILNQFLSEDTKLVDIHTLIYCTAVVIAEELGYKITEQITTDNRQKHNNKPAWQLRLEKDIEQLRADCGRLTQYINNNRSKKVVKRVEKIFKNMRTHTRHESHNKKPEEYLDTLKQKLALKVHRIKRYKKAQQRKNDNNLFATNEKAFYRNLPKPQENNNNENVESSPNKEELESFWTNIWEKQIQHNDKANWIKEEEERWSTLEEMEFIEITESDIKFITHRLNNWKSPGIDKIQNFWFKKLTSLHQAIAKNFTDIILGKQNIPHFITNGITYMLPKNKISPQPSQYRPITCLPTIYKILTAIISFKINTHIEHNNIIAEEQKGCRRGHMGCKEQLVIDSTIHKHATSKHKNLHCTYIDYKKAFDSIPHSWLIHILKIYKINSNIVEFLKNIMTQWTTTLYLNNQNNIILTRQINIKKGIFQGDSLSPLWFCLALNPLSYQLQCCRAGYNLKHTTEETTISHLIYMDDIKLYAKTEKDMKKLVITTSNFSKDINMQFGLDKCKTLHIIKGKIQPGDYVISNSDTITAMEPSDLYKYLGYKQLKGLDHTNIKQALLTEYQRRINITCKTQLSGKNLIKALNTYAIPILTYSFGIIKWTKTDIEKIERTTRTTLTKHNHLHPKSAVERLTIKRQEGGRGLIDIYHLWQKQLFNLKEFFYTKSHTSNIHKSIVHNDQNFTPLNLYEQTNGENPINIDPQKRKIENWKKKVLHGRHPHDLQQTHVDSMASNKWLKIGNLFPETEGFIIAIQDQIINTKNYRKYIIKDPTVTNDKCRRCHTQPETIQHITGACVSLTQTDYTHRHNQIVNIIHQTLALKYKLISNTTYIPYYKYSPETVLENSLSKLYYDRAILTDRTIHYNRPDIILQDKAHKITYLIDIAVPNTHNLQKTIIEKINKYAELKEEVTRIWRQEKVYVVPIILSTTGVIPKHIHKSLDLLDLNKSIYITLQKAAILNTCRIVRKFMQIDENEIAQQFNIS

SEQ ID NO: 21565 - protein, 1306 aa, Ochlodes sylvanus
METRSKSKRLGPLPGGNRRGTPGADAGCFSMRTVSGEELNRRAPSGSPENTTAKQTNSNSNSNSPISIDDPYSPSTASYIPSPVSFADDISCEAPTPTLSVAQEVNSFLPASTKAGKPRVRMSWSKEVNTFIMRTYYYITKLETDMTTYRKQLFELFTRKYPEIKVTEQRISDQRRTIIRNKLLPINTINQIKEEVRIKLQENTDLVDDVPSKLTCNQLENIPQLQVHSNAHIDETHDTDMPQTLKHTYTEALHISTQTSHSYAQTDCVTVVVENDIDILVEINPLTHTLKLHDKLKTILIEYSGMDPTVRPKLPKLKYSNELTRLVNLFNNDILPQYISNDTKLVDVHTLIYCTAVVIAEELNYKITEQTINIRPKNNYKPPWQQRLEKDIEKLRADCGRLTQYINNNRSKKVVKKVQEIFKRKVIHTRHENNNSKPEEFLDTLKQKLALKVHRLRRYKKAQQRKNDNILFNKNEKAFYRNSLRQTSNTTTENLELPTEIQLEEFWAKIWEEKAQHNDKAYWITQEENRWNTIQEMYFSEITETDITDVTSTLHNWKASGVDKIHNYWYKKLTSLHKSLAKNLTDIILGKQNIPEFFATGITYMLPKTSHSLEPSKYRPITCLPTIYKILTSTLARKINAHIEHNQIMTEEQKGCRRQHMGCKEQLIIDSTIHKHATKKNRNLHCTYIDYQKAFDSVPHTWLIHVLHLYRINSKIINFMSNLMTYWKTSLQLNYRNNTITTRQITIRKGIFQGDSFSPLWFCLALNPLSNLLRDCRAGYNLKSTTENTTISHLIYMDDIKLYSQTQKQMEQLINTTNEFSKDINMEFGLDKCKTLHIIKGKVRPGDHEIGDNKTIRAMEPSDLYKYLGYKQLKGLKHTQIKQTLTTEYKARMNAICNTQLSGKNLIKALNTYAIPILTYSFGVIKWSNTDIENIERITRTTLTKHNYLHPKSAVERLTVKRYNGGRGLIDIHYLWEKQIDNLKSFFYTKSLTSNIHKAISQNDYNFTPLNLSENVTNIQRIDNRDPQARKIENWKKKTLHGRHPHDLQQTHIDPVASNKWLTLGSLFPETEGFIIAIQDQIINTKNYRRYIIKDASITSDKCRKCHTQPETIQHITGACTTLTQTDYTYRHNQIVNIVHQKLALKHNLIQNTDTPYYKYSPATLLENVTHKMYYDRAILTDRTIHYNRPDITLQDKTNKITYLIDIAVPNTHNLQKTITEKINKYIELKDEITRIWKQNKVYVVPIVLSTTGVIPKHLHHSLKLIDLKETLYITLQKAAILNTCRIVRKFLQIDADETHTHTQYK

SEQ ID NO: 21566 - protein, 1299 aa, Thymelicus sylvestris
METRSKSKRLGPLPGGDRRGTPGADAGCFSMRTVSGEELNRRAPSGYPEYTTANTTDSHSTTNSSMSIEEPYSPSTTSYIPSPVSFADDMSREAPTPTLSVAQEVNTFLPASTKAGKPRMRMRWSKEVNLFIMRTYYHITKLETDMTMYRKQLYELFLQQYPEIKVTEQRISDQRRTIIRNKLLPISTLNEIKEEVRIKLQENTESVENLPTIATTSQPNAQITQSHNTNMQLEPQTRTQLYTETSHTATQITHQFTQTECETVIVENDIEIFGETNPLIETQVQRLHDRLKSTLIQYSGMDPTMRPKLPKLKYSYKLSQLTNVFNNDILPQYISNDTKLIDIHTLIYCTGAVISAELNYKIIEFANNVEQRHNNKPPWQQRLEKDIEKLRADCGRLTQYINNIRTKKVVKKVQEIFKRKITHTRHESNNSTPQEFLDTLKQKLALKVHRLRRYKKAQQRKNDNILFSKNEKVFYRNLQKKTDNTTTDNLKIPPKTQLEDFWAKIWEENAQHNDRAKWITQEESRWNTIPEMDFVEITETDITNITTTLHNWKAPGIDKIHNYWYKKLSSLHKSIAKNLTDIILGKQNIPEFIATGITYMLPKTTHTQEPSKYRPITCLPTIYKILTSAIARKINTHIEHNHIMAEEQKGCRRGHMGCKEQLIIDSTIHKHATTKNRNLHCTYIDYQKAFDSVPHSWLLHVLHIYKINPNIISFMRDIKNLWKTTLQLNYRNSTVRTRQIVIRKGIYQGDSFSPLWFCLALNPLSNLLHSCCAGYTLKSTTGKATISHLIYMDDIKLYSQTQKQMNQLMNATSEFSKDINMEFGLDKCKTLHIIKGNIRPGDHEIDQNCTIRAMEPSDVYKYLGYNQLKGLNHTQIKQTLTVEYKKRINAVCNTQLSGKNTIKALNTYAIPILTYSFGVVKWSKTDIEHIERTTRTTLTKYNYLHPKSAVERITIKRDKGGRGLIDVHHLWEKQIDSLKSFFHTKSLTSNIHKAISQNDNNLTPLNLSEERPIRTDTDNRDPQSYKIDTWKKKTLHGRHPHDLYQSHIDSVASNKWLKIGSLFPETEGFITAIQDQVINTKNYRKFIIKDPSITSDKCRKCHTQPETVQHITGACTTLTQTDYTYRHNQVVNIIHQKLALKYNLVNNTNTPYYKYTPSTVLENATHKLYYDRAILTDRTIHYNRPDITLQDKTNKVTYLIDISIPNTHNIQKTITEKINKYLELKEEVVRIWKQNKVYVVPIVLSTTGVIPKHLRHSLQLLDLKETIYISLQKAVILNTCRIVRKFLQIDDNETHTHTL

SEQ ID NO: 21567 - protein, 1299 aa, Thymelicus sylvestris
METRSKSKRLGPLPGGDRRGTPGADAGCFSMRTVSGEELNRRAPSGYPEYTTANTTDSHSTTNSSMSIEEPYSPSTTSYIPSPVSFADDMSREAPTPTLSVAQEVNTFLPASTKAGKPRMRMRWSKEVNLFIMRTYYHITKLETDMTMYRKQLYEIFSQQYPEIKVTEQRISDQRRTIIRNKLLPISTLNEIKEEVRIKLQENTESVENLPTIATTSQPNAQITQSHNTNIQLEPQTRTQLYTETSHTATQITHQFTQTECETVIVENDIEIFGETNPLIETQVQRLHDRLKSTLIQYSGMDPTMRPKLPKLKYSYKLSQLTNVFNNDILPQYISNDTKLIDVHTLIYCTGAVISAELNYKIIEFANNVEQRHNNKPPWQQRLEKDIEKLRADCGRLTQYINNIRTKKVVKKVQEIFKRKITHTRHESNNSTPQEFLDTLKQKLALKVHRLRRYKKAQQRKNDNILFSKNEKVFYRNLQKKTDNTTTDNLKIPTKTQLEDFWAKIWEENAQHNDRAKWITQEESRWNTIPEMDFVEITETDITNITTTLHNWKAPGIDKIHNYWYKKLSSLHKSIAKNLTDIILGKQNIPEFIATGITYMLPKTTHTQEPSKYRPITCLPTIYKILTSAIARKINTHIEHNHIMAEEQKGCRRGHMGCKEQLIIDSTIHKHATTKNRNLHCTYIDYQKAFDSVPHSWLLHVLHIYKINPNIISFMRDIMNLWKTTLQLNYRNSTVRTRQIVIRKGIYQGDSFSPLWFCLALNPLSNLLHSCCAGYTLKSTTGKATISHLIYMDDIKLYSQTQKQMNQLMNATSEFSKDINMEFGLDKCKTLHIIKGNIRPGDHEIDQNCTIRAMEPSDVYKYLGYNQLKGLNHTQIKQTLTVEYKKRINAVCNTQLSGKNTIKALNTYAIPILTYSFGVVKWSKTDIEHIERTTRTTLTKYNYLHPKSAVERITIKRDKGGRGLIDVHHLWEKQIYSLKSFFHTKSLTSNIHKAISQNDNNLTPLNLSEERPIRTDTDNRDPQSYKIDTWKKKTLHGRHPHDLYQSHIDSVASNKWLTIGSLFPETEGFITAIQDQVINTKNYRKFIIKDPSITSDKCRKCHTQSETVQHITGACTTLTQTDYTYRHNQVVNIIHQKLALKYNLVNNTNTPYYKYTPSTVLENATHKLYYDRAILTDRTIHYNRPDITLQDKTNKVTYLIDISIPNTHNIQKTITEKINKYLELKEEVVRIWKQNKVYVVPIVLSTTGVIPKHLRHSLQLLDLKETIYISLQKAVILNTCRIVRKFLQIDDNETHTHTL

SEQ ID NO: 21568 - protein, 1304 aa, Ochlodes sylvanus
METRSKSKRLGPLPGGNRRGTPGADAGCFSMRTVSGEELNRRAPSGSPENTTAKQTNSNSNSNSPISIDDPYSPSTASYIPSPVSFADDISCEAPTPTLSVAQEVNSFLPASTKAGKPRVRMSWSKEVNTFIMRTYYYITKLETDMTTYRKQLFELFTRKYPEIKVTEQRISDQRRTIIRNKLLPINTINQIKEEVRIKLQENTDLVDDVPSKLTCNQLENIPQLQVHSNAHIDETHDTDMPQTLKHTYTEALHISTQTSHSYAQTDCVTVVVENDIDILVEINPLTHTLKLHDKLKTILIEYSGMDPTVRPKLPKLKYSNELTRLVNLFNNDILPQYISNDTKLVDVHTLIYCTAVVIAEELNYKITEQTINIRPKNNYKPPWQQRLEKDIEKLRADCGRLTQYINNNRSKKVVKKVQEIFKRKVIHTRHENNNSKPEEFLDTLKQKLALKVHRLRRYKKAQQRKNDNILFNKNEKAFYRNSLRQTSNTTTENLELPTEIQLEEFWAKIWEEKAQHNDKAYWITQEENRWNTIQEMYFSEITETDITDVTSTLHNWKASGVDKIHNYWYKKLTSLHKSLAKNLTDIILGKQNIPEFFATGITYMLPKTSHSLEPSKYRPITCLPTIYKILTSTLARKINAHVEHNQIMTEEQKGCRRQHMGCKEQLIIDSTIHKHATKKNRNLHCTYIDYQKAFDSVPHTWLIHVLHLYRINSKIINFMSNLMTYWKTSLQLNYRNNTITTRQITIRKGIFQGDSFSPLWFCLALNPLSNLLRDCRAGYNLKSTTENTTISHLIYMDDIKLYSQTQKQMEQLINTTNEFSKDINMEFGLDKCKTLHIIKGKVRPGDHEIGDNKTIRAMEPSDLYKYLGYKQLKGLKHTQIKQTLTTEYKARMNAICNTQLSGKNLIKALNTYAIPILTYSFGVIKWSNTDIENIERITRTTLTKHNYLHPKSAVERLTVKRYNGGRGLIDIHYLWEKQIDNLKSFFYTKSLTSNIHKAISQNDYNFTPLNLSENVTNIQRIDNRDPQARKIENWKKKTLHGRHPHDLQQTHIDPVASNKWLTLGSLFPETEGFIIAIQDQIINTKNYRRYIIKDASITSDKCRKCHTQPETIQHITGACTTLTQTDYTYRHNQIVNIVHQKLALKHNLIQNTDTPYYKYSPATLLENVTHKMYYDRAILTDRTIHYNRPDITLQDKTNKITYLIDIAVPNTHNLQKTITEKINKYIELKDEITRIWKQNKVYVVPIVLSTTGVIPKHLHHSLKLIDLKETLYITLQKAAILNTCRIVRKFLQIDADETHTHTI

SEQ ID NO: 21569 - protein, 1304 aa, Ochlodes sylvanus
METRSKSKRLGPLPGGNRRGTPGADAGCFSMRTVSGEELNRRAPSGSPENTTAKQTNSNSNSNSPISIDDPYSPSTASYIPSPVSFADDISCEAPTPTLSVAQEVNSFLPASTKAGKPRVRMSWSKEVNTFIMRTYYYITKLETDMTTYRKQLFELFTRKYPEIKVTEQRISDQRRTIIRNKLLPINTINQIKEEVRIKLQENTDLVDDVPSKLTCNQLENIPQLQVHSNAHIDETHDTDMPQTLKHTYTEALHISTQTSHSYAQTDCVTVVVENDIDILVEINPLTHTLKLHDKLKTILIEYSGMDPTVRPKLPKLKYSNELTRLVNLFNNDILPQYISNDTKLVDVHTLIYCTAVVIAEELNYKITEQTINIRPKNNYKPPWQQRLEKDIEKLRADCGRLTQYINNNRSKKVVKKVQEIFKRKVIHTRHENKNSKPEEFLDTLKQKLALKVHRLRRYKKAQQRKNDNILFNKNEKAFYRNSLRQTSNTTTENLELPTEIQLEEFWAKIWEEKAQHNDKAYWITQEENRWNTIQEMYFSEITETDITDVTSTLHNWKASGVDKIHNYWYKKLTSLHKSLAKNLTDIILGKQNIPEFFATGITYMLPKTSHSLEPSKYRPITCLPTIYKILTSTLARKINAHVEHNQIMTEEQKGCRRQHMGCKEQLIIDSTIHKHATKKNRNLHCTYIDYQKAFDSVPHTWLIHVLHLYRINSKIINFMSNLMTYWKTSLQLNYRNNTITTRQITIRKGIFQGDSFSPLWFCLALNPLSNLLRDCRAGYNLKSTTENTTISHLIYMDDIKLYSQTQKQMEQLINTTNEFSKDINMEFGLDKCKTLHIIKGKVRPGDHEIGDNKTIRAMEPSDLYKYLGYKQLKGLKHTQIKQTLTTEYKARMNAICNTQLSGKNLIKALNTYAIPILTYSFGVIKWSNTDIENIERITRTTLTKHNYLHPKSAVERLTVKRYNGGRGLIDIHYLWEKQIDNLKSFFYTKSLTSNIHKAISQNDYNFTPLNLSENVTNIQRIDNRDPQARKIENWKKKTLHGRHPHDLQQTHIDPVASNKWLTLGSLFPETEGFIIAIQDQIINTKNYRRYIIKDASITSDKCRKCHTQPETIQHITGACTTLTQTDYTYRHNQIVNIVHQKLALKHNLIQNTDTPYYKYSPATLLENVTHKIYYDRAILTDRTIHYNRPDITLQDKTNKITYLIDIAVPNTHNLQKTITEKINKYIELKDEITRIWKQNKVYVVPIVLSTTGVIPKHLHHSLKLIDLKETLYITLQKAAILNTCRIVRKFLQIDADETHTHTI

SEQ ID NO: 21570 - protein, 1320 aa, Xestia xanthographa
METRSKSKRIGPLPGGDRRGAPGADARCHSMRSVSGEELNRRAPTDKDTTAEIIDDGDRLTDRTDTPVEPYSPSTVSYTPSRRSSPSIPSSPTHPSPSNISLNTVAPTPTLTATRGVSTFLPASTKAGKARVRMRWSKEVNLFIMRTYFYITKLETDMTTYRQQLHELFTRQFPEITVSEQRISDQRRAIVRNKLLSQEIIDQIKEEIRIELQADDNATTLVQNITDIAQRPQTQPYTQLQPSVQSQLYNQSQANTQTSHTSTQTEYITLTLENDIETLIVENHDLTTDTYIQEIHDKFRTTLAQYSGMDPAIRPRLPKLRYSPNLFRLVNLFNENILNQFISDETQLIDIHTLIYCTAVVISEELNFKITQNTGNTRPKQNIKPAWQQRLEKDIEKLRADIGRLTQYINNNRSNKVVRRVEAIFRSHLIHTRHEHNNRKPEEFLDTIKQKLALKVHRLRRYKKAQQRKNDNAIFATNEKIFYRNLNKPNTDTNHDTNTDTPNQPTKEQLETYWSSIWEEQARHNDEATWITEEETKWRAIHEMEFVEITEADITHITGRLHNWKSPGIDKVHNFWFKKLTSLYKPIARNLTQIILGQQNIPEFIATGITYMLPKTKNSPHPSQYRPITCLPTIYKILTSAITAKINTHIEHHNIMAEEQKGCRRGHMGCKEQLIIHSTIHKHATTKSRNLHCTYIDYKKAFDSVPHSWLIQILKIYRVNSKIIDFLSNIISQWKTTLHMNCNHNNVTTRQIFIRKGIYQGDSLSPLWFCLALNPLSHLLQRCRAGYCLKHTTTQAQLQEQTTISHLIYMDDIKLYAQTEKEMKKLVEVTAEFSQDINMQFGLDKCKTLHIIRGKIRPGNYVVNNTDTITAMEPSDLYKYLGYTQLKGLDHVRTKETLTAEYKRRLNAVCKTQLSGKNLIKALNTFAIPILTYSFGVIKWTKTDTEQLERTTRTTLTKNNNLHPKSAVERLTIKRQNGGRGLIDIQHLWRKQVCRLKTFFHTKSHTSNIHKAIAQNDHNYTRLNLYEQSDTSHIENEETQTQKIEDWKKKVLHGRHPHDLEQSHVNKIASNKWLKIGNLFPETEGFIIAIQDQIINTKNYRKFIIKDPSVTNDKCRKCHTQPETIQHITGACATLTQTDYTHRHNQVANIIHQRLAVKYILIQYTNTPYYNYTPQATLENDTHKLYYDRAILTDRTIHYNRPDIILQDKINKVTYLVDIAVPNTHNIQKTITEKISKYADLKQEVTRIWRQEKVYVVPIVLSTTGVIPNHLLHSLKLLSLKETLYITLQKAAILNTCRIVRKFMQIEENEIGPHHNTPST

SEQ ID NO: 21571 - protein, 897 aa, Favria cribrellum
MKNVEIIFKTKTTHTRHEKDNNKPEEFLDTLKQKLAVKVNRLRRYKKAQRRKKDNIMFSTNEKIFYRNLQNPQTDNTTENNPELPTKEQLETFWSGIWEEQVQHKSDAEWIAEEKVKWSTIKEMQFIAITEPDITSIVNRLHNWKSPGVDKIHNFWYKKLFILHKFIAKNFTEIILGKQEAPEFITTGITYMLPKAQYSPLPSQYRPITCLPTIYKMLTSAITQKINIHIEQHNIIAEEQKGCRRGHMGCKEQLIIDSTIHKHATSKHRNLHCTYIDYKKAFDSIPHSWLIQILEINKINPKIIDFLRNIMPRWKTTLQLCTRQKSIMTRQISIKKGIYQGDSLSPLWFCLALNPLSHMLNRCQIGYRFKQNQTDTIISHLIYMDDIKLYANTETNMKRLIDTTTQFSKDIHMEFGLDKCKLLHIKKGKVHPGDYTVNNTGIISALEPTDVYKYLGYKQLKGLDHTAIKEELTTEYTKRINTLCRTLLSGKYLIKSLNTYAVPILTYSFGIAKWTKTDIERLQRITRTTLTKYNYLHPKSAIERLTIKRQDGGRGLIDINQLWQKQITNLKSFFIKKSQTSDLHKTIVLNDNNYTPLNLKEEISTAHSHSITNSDNSQKQKIEDWRKKILHGRHRHDLEQPHVDTIASNKWLHIGNLHPETEGFIIAIQDQIIKTKNYQKFIIKDTNITSDKCRKCHSQPETIQHITGACITLTQTDYTHRHNQIANIIHQKLALKHKLTQNTTTPYYQYIPQKILENKTHKLYYDRAILTDKTIHFNRPDITLQDKVNKVTYLIDIAVPNTHNLQKTITEKINKYTELQEEVTRIWKQDKVLIVPIVISTTGVIPYHLRNSLRQLHLNENTYIILQKAAILNTCRTVRKFLQIDEKETMPHQPTSK

SEQ ID NO: 21572 - protein, 1259 aa, Lobocla liliana
MLQPKPMTDRTTPIAPYSPSTISYTPSVPTSPSSSINSSKPESPTLTLDVAQVANAFLLAPTKAGKPRLRMSWSKEVNLFIMRTYYYITKLETDLTTYRKQLHEHFSRQYPDIKVTEQRIADQRRTVVKNKRLNEETLYKLKEEVKLQLERDRQNKIHTDTSVSLDYQTIQVQNFSLFQNHSQPQLSTHNSQSLHKPIQNTQSSQMSIQTESIALTLENDINTVESHNPSTDINIQEIYDKFRRTLTQYSGMDPVVRPKLPKLKYSPQLFQLINIFNYDILNQFLSENIQLSDIHTLIYCTALVISETLNYKITDYTENRTPKDRKKPPWQIRLEKDIEKLRADCARVTQYVNGNRSSKIIKHVEIIFKTKITHTKHEKDNRKPEEFLDTLKQKLSLKVNRLRRYKKAQQRKTDNIIFITNEKMFYRNLQNPQTDTTTQNDPDLPTAEQLETFWSGIWEEQVQHNSDAEWIAEEKVKWSTIKEMEFIAITESDIMNITNRLHNWKSPGVDKIHNFWYKKLFSLHKSIAKNFTHIILGKQEVPEFIATGITYMLPKSKYSPQPCQYRPITCLPTIYKILTSAITLEINKHIEQHNIIAEEQKGCRRGHMGCKEQLIIDSTIHKHATSKNRNLHCTYIDYKKAFDSIPHSWLIQILQIYKINSNVINFLCNIMTRWKTTLQLSTRQKSITTRQISIRKGIYQGDSLSPLWFCLALNPLSHMLKRCQVGYSLKRDTTDTIISHLIYMDDIKLYANTETNIKKLLDTTIQFSKDINMEFGLEKCKLLHIKRGKVRPGDYTINNTDTISALEPTDMYKYLGYKQLKGLDHTAIRETLTTEYTKRINALCRTQLSGKHLIKSLNTYAVPILTYSFGIVKWTKTDIERLERITRTTLTKHNYLHPKSAIERLTIKRQDGGRGLIDINQLWQRQITGLKSFFIKKTQTSDLHKAIAFNDHNYTPLNLKEETITSHTQSINNSNNAQRQKIDEWRKKILHGRHRHDLEQSHVDTIASNKWLHIGNLYPETEGFMIAIQDQIINTKNYRKHIIKDPNITSDKCRKCHTQSETIQHITGACITLTQTDYTHRHNQLANIIHQKLALKHKLIQNTKTPYYQYTPQTILENKTHKLYYDRAILTDKTIHYNRPDITLQDKTKKVTYLIDIAVPNTHNLQKTITEKISKYTELQEEVARIWRQDKVLIVPIVVSTTGVIPNHLRHSLKQLHLIENTYITLQKAAILNTCRTVRKFLKIDENEILPHPHHLTIN

SEQ ID NO: 21573 - protein, 1317 aa, Ochropleura plecta
METRSKNKRIGPLPGGDRRGAPGADAGCHSMRTVSGEELNRRAPTDKDTTAEIIDDGDRLTDRTDTPVEPYSPSTVSYTPSTPSSPSISSSPTLSTHPIITLNTVSPTPTLNAARGVSTFLPASTKAGKARVRMRWSKEVNLFIMRTYFYITKLETDMTTYRKQLHELFTQQYPEITVSEQRISDQRRAIVRNKLLSQAIIDQLKEDIRVQLQADDNTTPLLENLTDIAQQPQTQLNTQSQPNIQSQLYNQLQANTQTSHTSTQTEYITFTLENDIETLVVENHNPTTDTYIQEIHDKFRTTLSQYSGMDPAIRPKLPKLRYSPNLFRLVNLFNENILNQFISDETQLIDIHTLIYCTAVVISEELNFKITQNTGNQRPKQNIKPAWQQRLEKDIEQLRADIGRLTQYINNNRSSKVVRRVEAIFRTHLVHTRHENNNRKPEEFLDTIKQKLALKVHRLRRYKKAQQRKNDNAIFATNEKIFYRNLNKPNTDTHYDTNTDTPTQPTKEQLETYWASIWEQQARHNDEAAWITEEETKWKAIDEMEFVEVTEADITHITGRLHNWKSPGIDKVHNFWFKKLTSLYKPIARNLTQIILGQQNAPEFIATGITYMLPKTKNSPQPSQYRPITCLPTIYKILTSAISTKINTHIEQHNIMAEEQKGCRRGHMGCKEQLIIDSTIHKHATTKNRNLHCTYIDYKKAFDSVPHSWLIQILKIYRVNSKIIDFLSNIMSQWKTTLQINCNQNSITTRQILIKNGIYQGDSLSPLWFCLALNPLSHLLQRCQAGYRLKHTTEQTTISHLIYMDDIKLYAQTEKDMKKLVEVTADFSQDINMQFGLDKCKTLHIIRGKIRPGNYVVNNTDTITAMEPSDLYKYLGYTQLKGLDHVRIKETLTAEYKRRLNVVCKTQLSGKNLIKALNTFAIPILTYSFGVIKWSKTDTEQLERNTRTTLTKHNNLHPKSAIERLTIKRQNGGRGLIDIQHLWRKQVCRLKTFFHTKSHTSNIHKAIVQNDHNYTPLNLNEQLDHTSHNTNEDPQTQKIDDWKKKVLHGRHPYDLEQTHVNKDASNKWLKIGNLFPETEGFIIAIQDQIINTKNYRKFIIKDPSVTNDKCRKCHTQPETIQHITGACTTLTQTDYTHRHNQVANVIHQRLAVQYTLIQDTNTPYYNYTPQATLENDTHKLYYDRAILTDRTIHYNRPDIILQDKINKITYLIDIAVPNTHNIQKTITEKISKYAELKEEVTRIWRQEKVYVVPIVLSTTGVIPNHLLHSLKLLSLKETLYITLQKAAILNTCRIVRKFMQIEENEIGPHHNTPHTST

SEQ ID NO: 21574 - protein, 1317 aa, Ochropleura plecta
METRSKNKRIGPLPGGDRRGAPGADAGCHSMRTVSGEELNRRAPTDKDTTAEIIDDGDRLTDRTDTPVEPYSPSTVSYTPSRPSSPSISSSPTLSTHPIITLNTVSPTPTLNAARGVSTFLPASTKAGKARVRMRWSKEVNLFIMRTYFYITKLETDMTTYRKQLHELFTQQYPEITVSEQRISDQRRAIVRNKLLSQAIIDQLKEDIRVQLQADDNTTPLLENLTDIAQQPQTQLNTQSQPNIQSQLYNQLQANTQTSHTSTQTEYITFTLENDIETLVVENHNPTTDTYIQEIHDKFRTTLSQYSGMDPAIRPKLPKLRYSPNLFRLVNLFNENILNQFISDETQLIDIHTLIYCTAVVISEELNFKITQNTGNQRPKQNIKPAWQQRLEKDIEQLRADIGRLTQYINNNRSSKVVRRVEAIFRTHLVHTRHENNNRKPEEFLDTIKQKLALKVHRLRRYKKAQQRKNDNAIFATNEKIFYRNLNKPNTDTHYDTNTDTPTQPTKEQLETYWASIWEQQARHNDEAAWITEEETKWKAIDEMEFVEVTEADITHITGRLHNWKSPGIDKVHNFWFKKLTSLYKPIARNLTQIILGQQNAPEFIATGITYMLPKTKNSPQPSQYRPITCLPTIYKILTSAISTKINTHIEQHNIMAEEQKGCRRGHMGCKEQLIIDSTIHKHATTKNRNLHCTYIDYKKAFDSVPHSWLIQILKIYRVNSKIIDFLSNIMSQWKTTLQINCNQNSITTRQILIKNGIYQGDSLSPLWFCLALNPLSHLLQRCQAGYRLKHTTEQTTISHLIYMDDIKLYAQTEKDMKKLVEVTADFSQDINMQFGLDKCKTLHIIRGKIRPGNYVVNNTDTITAMEPSDLYKYLGYTQLKGLDHVRIKETLTAEYKRRLNVVCKTQLSGKNLIKALNTFAIPILTYSFGVIKWTKTDTEQLERNTRTTLTKHNNLHPKSAIERLTIKRQNGGRGLIDIQHLWRKQVCRLKTFFHTKSHTSNIHKAIVQNDHNYTPLNLNEQLDHTSHNTNEDPQTQKIDDWKKKVLHGRHPYDLEQTHVNKDASNKWLKIGNLFPETEGFIIAIQDQIINTKNYRKFIIKDPSVTNDKCRKCHTQPETIQHITGACTTLTQTDYTHRHNQVANVIHQRLAVQYTLIQDTNTPYYNYTPQATLENDTHKLYYDRAILTDRTIHYNRPDIILQDKINKITYLIDIAVPNTHNIQKTITEKISKYAELKEEVTRIWRQEKVYVVPIVLSTTGVIPNHLLHSLKLLSLKETLYITLQKAAILNTCRIVRKFMQIEENEIGPHHNTPHTST

SEQ ID NO: 21575 - protein, 1320 aa, Xestia xanthographa
METRSKSKRIGPLPGGDRRGAPGADARCHSMRSVSGEELNRRAPTDKDTTAEIIDDGDRLTDRTDTPVEPYSPSTVSYTPSRRSSPSIPSSPTHPSPSNISLNTVAPTPTLTATRGVSTFLPASTKAGKARVRMRWSKEVNLFIMRTYFYITKLETDMTTYRQQLHELFTRQFPEITVSEQRISDQRRAIVRNKLLSQEIIDQIKEEIRIELQADDNATTLVQNITDIAQRPQTQPYTQLQPSVQSQLYNQSQANTQTSHTSTQTEYITLTLENDIETLIVENHDLTTDTYIQEIHDKFRTTLAQYSGMDPAIRPRLPKLRYSPNLFRLVNLFNENILNQFISDETQLIDIHTLIYCTAVVISEELNFKITQNTGNTRPKQNIKPAWQQRLEKDIEKLRADIGRLTQYINNNRSNKVVRRVEAIFRSHLIHTRHEHNNRKPEEFLDTIKQKLALKVHRLRRYKKAQQRKNDNAIFATNEKIFYRNLNKPNTDTNHDTNTDTPNQPTKEQLETYWSSIWEEQARHNDEATWITEEETKWRAIHEMEFVEITEADITHITGRLHNWKSPGIDKVHNFWFKKLTSLYKPIARNLTQIILGQQNIPEFIATGITYMLPKTKNSPHPSQYRPITCLPTIYKILTSAITAKINTHIEHHNIMAEEQKGCRRGHMGCKEQLIIDSTIHKHATTKSRNLHCTYIDYKKAFDSVPHSWLIQILKMYRVNSKIIDFLSNIMSQWKTTLHMNCNHNNVTTRQIFIRKGIYQGDSLSPLWFCLALNPLSHLLQRCRAGYCLKHTTTQAQLQEQTTISHLIYMDDIKLYAQTEKEMKKLVEATAEFSQDINMQFGLDKCKTLHIIRGKIRPGNYVVNNTDTITAMEPSDLYKYLGYTQLKGLDHVRTKETLTAEYKRKLNAVCKTQLSGKNLIKALNTFAIPILTYSFGVIKWTKTDTEQLERTTRTTLTKNNNLHPKSAVERLTIKRQNGGRGLIDIQHLWRKQVCRLKTFFHTKSHTSNIHKAIAQNDHNYTPLNLYEQSDTSHIDNEDPQTQKIEDWKKKVLHGRHPHDLEQSHVNKIASNKWLKIGNLFPETEGFIIAIQDQIINTKNYRKFIIKDPSVTNDKCRKCHTQPETIQHITGACATLTQTDYIHRHNQVANIIHQRLAVKYTLIQDTNTPYYNYTPQATLENDTHKLYYDRAILTDRTIHYNRPDIILQDKINKVTYLVDIAVPNTHNIQKTITEKISKYADLKQEVTRIWRQEKVYVVPIVLSTTGVIPNHLLHSLKLLSLKETLYITLQKAAILNTCRIVRKFMQIEENEIGPHHNTPST

SEQ ID NO: 21576 - protein, 1318 aa, Xestia xanthographa
METRSKSKRIGPLPGGDRRGAPGADARCHSMRSVSGEELNRRAPTDKDTTAEIIDDGDRLTDRTDTPVEPYSPSTVSYTPSRRSSPSIPSSPTHPSPSNISLNTVAPTPTLTAARGVSTFLPASTKAGKARVRMRWSKEVNLFIMRTYFYITKLETDMTTYRQQLHELFTRQFPEITVSEQRISDQRRAIVRNKLLSQEIIDQLKEEIRIELQADDNATTIVQNITDIAQRPQTQPYTQLQPSVQCQLYNQSQANTQTSHISTQTEYVTLTLENDIETLIVENHDLTTDTYIQEIHDKFRTTLAQYSGMDPAIRPRLPKLRYSPNLFRLVNLFNENILNQFISDETQLIDIHTLIYCTAVVISEELNFKITQNTRNTRPKQNIKPAWQQRLEKDIEKLRADIGRLTQYINNNRSNKVVRRVEAIFRSHLIHTRHEHNNRKPEEFLDTIKQKLALKVHRLRRYKKAQKRKNDNAIFATNEKIFYRNLNKPNTDTNHDTNTDTANQPTKEQLETYWSSIWEEQARHNDEATWITEEETKWRAIHEMEFVEITEADITHITGRLHNWKSPGIDKVHNFWFKKLTSLYKPIARNLTQIILGQQNIPEFIATGITYMLPKTKNSPHPSQYRPITCLPTKYKILTSAITAKINTHIEHHNIMAEEQKGCRRGHMGCKEQLIIDSTIHKHATTKSRNLHCTYIDYKKAFDSVPHSWLIQILKIYRVNSKIIDFLSNIMSQWKTTLHMNCNHNNVTTRQIFIRKGIYQGDSLSPLWFCLALNPLSHLLQRCRAGYCLKHTTTQAQLQEQTTISHLIYMDDIELYAQTEKEMKKLVEATAEFSQDINMQFGLDKCKTLHIIRGKIRPGNYVVNNTDTITAMEPFDLYKYLGYTQLKGLDHVRTKETLTAEYKRRLNAVCKTQLSGKNLIKALNTFAIPILTYSFGVIKWTKTDTEQLERTTRTTLTKNNNLHPKSAVERLTIKRQNGGRGLIDIQHLWRKQVCRLKTFFHTKSHTSNIHKAIAQNDHNYTPLNLYEQSDTFDNEDPQTQKIEDWKKKVLHGRHPHDLEQSHVNKIASNKWLKIGNLFPETEGFIIAIQDQIINTKNYRKFIIKDPSVTNDKCRKCHTQPETIQHITGACATLTQTDYTHRHNQVANIIHQRLAVKYTLIQDTNTPYYNYTPQATLENDTHKLYYDRAILTDRTIHYNRPDIILQDKINKVTYLVDIAVPNTHNIQKTITEKISKYADLKQEVTRIWRQEKVYVVPIVLSTTGVIPNHLLHSLKLLSLKETLYITLQKAAILNTCRIVRKFMQIEENEIGPHHNTPST

SEQ ID NO: 21577 - protein, 1280 aa, Autographa gamma
METRSKKKRIGPLPGGYRRGTPGADAGCLSMRSVSGEELSRRAPTDKDTTAETSDEIDRLTDRTSSPVEPFSPSTISYTPSLASSPLTVSNSDILPTPTLDVAREVNTFLPASTKAGKQRVRMKWSKEANLFIMRTYYYITKLETDMTIYRKVLHELFSQKYPEISVSEQRVSDQRRTIVRNKLLSQAELDTLKNEVRAQLEERANEIPLAQENTEDLSISIPNSTQLNLNTQTLTQNYLTSHIGTQTESLTLTIENDINTFVEPDPLPDPCTEDILEKLKTALVLYSGMDPVSRPKLPKLKYSPKLMQLVVLFNNSILSNFVSEDTQLVDLNTLIYCTALVISEELNYKVTEYAGNTRPKHNNKPAWQIRLERDIEKLRADCGRLTQYINNNRSNKVIKRVEAIFKSRVTHTRHENDNRKPEEFVDTLKQKLALKVHRLKRYTKAQQRKNDNIVFSTNEKMFYRNLSKPQSESIAQDDNAELPTKESLENFWSGIWEQQVQYNDNAEWIRQEETKWIAIEEMGFADITETDILNVTVRLHNWKSPGVDKIHNYWYKKLVTLHKILAKNLTDVILGRQIIPDYLATGVTYMLPKGKHSAEPSQYRPITCLPTVYKILTSVITSKINKHIDHHNIIAEEQKGCRRNHMGCKEQLIIDSTIHKHASTKNRNLHCTYIDYQKAFDSIPHAWLVKILEIYKINFKIIRFLSSIMTRWKTTLQLNYNRNTIISRQISIRKGIYQGDSLSPLWFCLALNPLSSMLNRNRVGYCLKHSTQDVIISHLIYMDDIKLYSKTEQNMKKLLDTTTLFSNDIKMQFGLDKCKTVHIIRGKIKPGDYPVNVTDCITAMEPTDLYKYLGYKQLKGLDHTSIKGTLDTEYRRRVNALCKSHLAGKHLIKAINTYAIPILTYSFGVIKWTKTDIEQIERTTRTTLTKHNNLHPKSAIERLTLKRQDGGRGLIDIHHLWQKQVSRLKTFFLTKSNTSEIHKAIAQNDDNYTPLNLNDQTEILNICDPQKQKMETWKKKVLHGRHPHDLEQPHVDTIASNKWLKVGNLFPETEGFILAIQDQIINTKNYRKYIIKDPKVVNDKCRKCHTQPETIQHITGACTSLTQTDYTHRHNQVVNIIHQQLALKYKLIENNKTPYYKYTPQTVLENGTHKLYYDRAILTDKTIHYNRPDITLQDKESKTTYLIDIAVPNTHNLQKTIAEKVSKYSELKDEVARIWRQDKVVVVPIVLSSTGVIPNNLHNSLNIIGLNKSTYITLQKAAILNTCRIVRKFLSLEDN

SEQ ID NO: 21578 - protein, 1301 aa, Mythimna ferrago
METRSKSKRIGPLPGGDRRGAPGADAGCRSMRTVSGEELSRRAPTDKDATAEITDDGDRLTDRTNTPEEPYSPSTVSYTPSSRSSPSIPSSPSNSIFSTVRPTPILDVAREVSTFLPASTKAGKARVRMKWSKEVNLFIMRTYLHITKLETDMTTYRQQLHAIFTRQYPEINVSEQRISDQRRTIVRNKLLSQEVIDQLKEEVRTQLLQEESENYVGMSYVTQNTHENNLPEPQQSLTLTHLNVESQQYNQPQTLDTSTQTETLTLTLENDIEIVAADQNPKTDNKYVQEIHNKLRMTITQYSGMDPAARPKLPKLKYTPNLFRLVNLFNENILKQFLADDTQLIDIHTLIYCTAVVIAEELNFKITDRASITRSRENAKPPWQLRLEKDIEKLRADCGRLTHYIKGCRSQKVVRRVGVIFNNNSVHTRHENSNKKPEEYLDTLKQKLALKVHRLRRYIKAQQRKNDNAIFATNEKVFYRNLQKPHTDSTTGTHHIDMPSKELLETFWSSIWEEQVHHNDKATWITEEEERWKEINEMEFQEITESDIANITARLHNWKSPGIDKIQNFWFKKLTILHKLIAKNFTDIVLGKQNIPDFMATGVTYMLPKSKHTSEPSQYRPITCLPTIYKILTSVITNKINSHIEYNKIIAEEQKGCRRGHMGCKEQLIIDSTIHKHATAKNRNLHCTYIDYQKAFDSIPHSWLIHILEIYKINPKIIEFLRTVMTRWKTTLQLNNHLSTLVTRQINIKKGIYQGDSLSPLWFCLALNPLSHLLNRCQAGYNFKYNSEETTVSHLIYMDDIKLYSKNEKEMKILIEATTTFSHDIKMQFGLDKCRTLHIIRGKVKPGNYVVNDTDTITAMESTDLYKYLGYKQLKGLDHTSIKQTLITEYRRRINAICKTQLSGKHLTKALNTFAIPVLTYSFGVIKWSKTDMEQLERITRTTLTKYNNLHPRSAIERLTIKRQNGGRGLIDIHYLWQKQISSLKTFFYTKSRTSGIHRAITYNDFNYTPLNLSDQNLQDVNDTNPQNQKIENWKKKVLHGRHPHDLEQSHINIAASNKWLKIGNLFPETEGFMIAIQDQIINTKNYKKYIIKDPTITNDKCRRCHTQSETIQHITGACTTLTQTDYTHRHNQVANIIHQKLAIKHSLVQNSSTPYYKYKPETILENDAYKLYYDRAILTDRTIHYNRPDITLQDKIKKVTYLIDIAVPNTHNLQKTISEKISKYAELKDEITRLWRQDKVYVIPIVLSTTGVIPNHLLHSLKLIDLDESIYINLQKAVILNTCRTVRKFMQLEDDNTPLL

SEQ ID NO: 21579 - protein, 1274 aa, Mythimna ferrago
METRSKSKRIGPLPGGDRRGAPGADAGCHSMRTVSGEELSRRAPTDKDATAEITDDGDRLTDRTNTPEEPYSPSTVSYTPSSRSSPSIPSSPSNSIFSTVRPTPILDVAREVSTFLPASTKAGKARVRMKWSKEVNLFIMRTYLHITKLETDMTTYRQQLHAIFTRQYPEINVSEQRISDQRRTIVRNKLLSQEVIDQLKEEVRTQLLQEESENYVGMSYVTQNTHENNLPEPQQSLTLTHLNVESQQYNQPQTLDTSTQTETLTLTLENDIEIVAADQNPKTDNKYVQEIHNKLRMTITQYSGMDPAARPKLPKLKYTPNLFRLVNLFNENILKQFLADDTQLIDIHTLIYCTAVVIAEELNFKITDRASITRSRENAKPPWQLRLEKDIEKLRADCGRLTHYIKGCRSQKVVRRVGVIFNNNSVHTRHENSNKKPEEYLDTLKQKLALKVHRLRRYIKAQQRKNDNAIFATNEKVFYRNLQKPHTDSTTGTHHIDMPSKELLETFWSSIWEEQVHHNDKATWITEEEERWKEINEMEFQEITESDIANITARLHNWKSPGIDKIQNFWFKKLTILHKLIAKNFTDIVLGKQNIPDFMATGVTYMLPKSKHTSEPSQYRPITCLPTIYKILTSVITNKINSHIEYNKIIAEEQKGCRRGHMGCKEQLIIDSTIHKHATAKNRNLHCTYIDYQKAFDSIPHSWLIHILEIYKINPKIIEFLRTVMTRWKTTLQLNNHLSTLVTRQINIKKGIYQGDSLSPLWFCLALNPLSHLLNRCQAGYNFKYNSEETTVSHLIYMDDIKLYSKNEKEMKILIEATTTFSHDINMQFGLDKCRTLHIIRGKVKPGNYVVNDTDTITAMESTDLYKYLGYKQLKGLDHTSIKQTLITEYRRRINAICKTQLSGKHLTKALNTFAIPVLTYSFGIIKWSKTDMEQLERITRTTLTKYNNLHPRSAIERLTIKRQNGGRGLIDIHYLWQKQISSLKTFFYTKSRTSGIHRAITYNDFNYTPLNLSDQNLQDVNDTNPQNQKIENWKKKVLHGRHPHDLEQSHINIAASNKWLKIGNLFPETEGFMIAIQDQIINTKNYKKYIIKDPTITNDKCRRCHTQSETIQHITGACTTLTQTDYTHRHNQVANIIHQKLAIKHSLVQNSSTPYYKYKPETILENDAYKLYYDHAILTDRTIHYNRPDITLQDKIKKVTYLIDIAVPNTHNLQKTISEKISKYAELKDEITRLWRQDKVYVIPIVLSTTGVIPNHLLHSLKLIDLDESIYIM

SEQ ID NO: 21580 - protein, 1171 aa, Mythimna ferrago
MKWSKEVNLFIMRTYLHITKLETDMTTYRQQLHAIFTRQYPEINVSEQRISDQRRTIVRNKLLSQEVIDQLKEEVRTQLLQEESENYVGMSYVTQNTQENSLPEPQQSLTLTHLNVESQQYNQPQTLDTSTQTETLTLTLENDIEIVTADQNPKTDNKYVQEIHNKLRMTITQYSGMDPAARPKLPKLKYTPNLFRLVNLFNENILKQFLADDTQLIDIHTLIYCTAVVIAEELNFKITDRASITRSRENAKPPWQLRLEKDIEKLRADCGRLTHYIKGCRSQKVVRRVGVIFNNNSVHTRHENSNKKPEEYLDTLKQKLALKVHRLRRYIKAQQRKNDNAIFATNEKVFYRNLQKPHTDSTTGTHHMPSKELLETFWSSIWEEQVHHNDKATWITEEEERWKEINEMEFQEITESDIANITARLHNWKSPGIDKIQNFWFKKLTILHKLIAKNFTDIVLGKQNIPDFMATGVTYMLPKSKHTSEPSQYRPITCLPTIYKILTSVITNKINSHIEYNKIIAEEQKGCRRGHMGCKEQLIIDSTIHKHATAKNRNLHCTYIDYQKAFDSIPHSWLIHILEIYKINPKIIEFLRTVMTRWKTTLQLNNHLSTLVTRQINIKKGIYQGDSLSPLWFCLALNPLSHLLNRCQAGYNFKYNSEETTVSHLIYMDDIKLYSKNEKEMKILIEATTTFSHDINMQFGLDKCRTLHIIRGKVKPGNYVVNDTDTITAMESTDLYKYLGYKQLKGLDHTSIKQTLITEYRRRINAICKTQLSGKHLTKALNTFAIPVLTYSFGVIKWSKTDMEQLERITRTTLTKYNNLHPRSAIERLTIKRQNGGRGLIDIHYLWQKQISSLKTFFYTKSRTSDIHRAITYNDFNYTPLNLSDQNLQDVNDTNPQNQKIENWKKKVLHGRHPHDLEQSHINIAASNKWLKIGNLFPETEDFMKAIQDQIINTKNYKKYIIKDPTITNDKCRRCHTQSETIQHITGACTTLTQTDYTHRHNQVANIIHQKLAIKHSLVQNSSTPYYKYKPETILENDAYKLYYDRAILTDRTIHYNRPDITLQDKVKKVTYLIDIAVPNTHNLKKTISEKISKYAELKDEITRLWRQDKVYVIPIVLSTTGVIPNHLLHSLKLIDLDESIYINLQKAVILNTCRIVRKFMQLEDDNTPLL

SEQ ID NO: 21581 - protein, 1301 aa, Mythimna ferrago
METRSKSKRIGPLPGGDRRGAPGADAGCHSMRTVSGEELSRRAPTDKDATAEITDDGDRLTDRTNTPEEPYSPSTVSYTPSSRSSPSIPSSPSNIIFSTVRPTPILDVAREVSTFLPASTKAGKARVRMKWSKEVNLFIMRTYLHITKLETDMTTYRQQLHAIFTRQYPEINVSEQRISDQRRTIVRNKLLSQEVIDQLKEEVRTQLLQEESENYVGMSYVTQNTHENNLPEPQQSLTLTHLNVESQQYNQPQTLDTSTQTETLTLTLENDIEIVAADQNPKTDNKYVQEIHNKLRMTITQYSGMDPAARPKLPKLKYTPNLFRLVNLFNENILKQFLADDTQLIDIHTLIYCTAVVIAEELNFKITDRASITRSRENAKPPWQLRLEKDIEKLRADCGRLTHYIKGCRSQKVVRRVGVIFNNNSVHTRHENSNKKPEEYLDTLKQKLALKVHRLRRYIKAQQRKNDNAIFATNEKVFYRNLQKPHTDSTTGTHHIDMPSKELLETFWSSIWEEQVHHNDKATWITEEEERWKEINKMEFQEITESDIANITARLHNWKSPGIDKIQNFWFKKLTILHKLIAKNFTDIVLGKQNIPDFMATGVTYMLPKSKHTSEPSQYRPITCLPTIYKILTSVITNKINSHIEYNKIIAEEQKGCRRGHMGCKEQLIIDSTIHKHATAKNRNLHCTYIDYQKAFDSIPHSWLIHILEIYKINPKIIEFLRTVMTRWKTTLQLNNHLSTLVTRQINIKKGIYQGDSLSPLWFCLALNPLSHLLNRCQAGYNFKYNSEETTVSHLIYMDDIKLYSKNEKEMKILIEATTTFSHDINMQFGLDKCRTLHIIRGKVKPGNYVVNDTDTITAMESTDLYKYLGYKQLKGLDHTSIKQTLITEYRRRINAICKTQLSGKHLTKALNTFAIPVLTYSFGVIKWSKTDMEQLARITRTTLTKYNNLHPRSAIERLTIKRQNGGRGLIDIHYLWQKQISSLKTFFYTKSRTSGIHRAITYNDFNYTPLNLSDQNLQDVNDTNPQNQKIENWKKKVLHGRHPHDLEQSHINIAASNKWLKIGNLFPETEGFMIAIQDQIINTKNYKKYIIKDPTITNDKCRRCHTQSETIQHITGACTTLTQTDYTHRHNQVANIIHQKLAIKHSLVQNSSTPYYKYKPETILENDAYKLYYDRAILTDRTIHYNRPDITLQDKIKKVTYLIDIAVPNTHNLQKTISEKISKYAELKDEITRLWRQDKVYVIPIVLSTTGVIPNHLLHSLKLIDLDESIYINLQKAVILNTCRIVRKFMQLEDDNTPLL

SEQ ID NO: 21582 - protein, 1221 aa, Mythimna ferrago
MPKNRFFGFRVNRFAFPSTVRPTPILDVAREVSTFLPASTKAGKARVRMKWSKEVNLFIMRTYLHITKLETDMTTYRQQLHATFTRQYPEINVSEQRISDQRRAIVRNKLLSQEVIDQLKEEVRTQLLQEESENYVGMSYVTQNTHENSLPEPQQSLTLTHLNVESQQYNQPQTLDTSTQTETLTLTLENDIEIVAADQNPKTDNKYVQEIHNKLRMTITQYSGMDPAARPKLPKLKYTPNLFRLVNLFNENILKQFLADDTQLIDIHTLIYCTAVVIAEELNFKITDRASITRSRENAKPPWQLRLEKDIEKLRADCGRLTHYIKGCRSQKVVRRVGVIFNNNSVHTRHENSNKKPEEYLDTLKQKLALKVHRLRRYIKAQQRKNDNAIFATNEKVFYRNLQKPHTDSTTGTHHIDMPSKELLETFWSSIWEEQVHHNDKATWITEEEERWKEINEMEFQEITESDIANITARLHNWKSPGIDKIQNFWFKKLTILHKLIAKNFTDIVLGKQNIPDFMATGVTYMLPKSKHTSEPSQYRPITCLPTIYKILTSVITNKINSHIEYNKIIAEEQKGCRRGHMGCKEQLIIDSTIHKHATAKNRNLHCTYIDYQKAFDSIPHSWLIHILEIYKINPKIIEFLRTVMTRWKTTLQLNNHLSTLVTRQINIKKGIYQGDSLSPLWFCLALNPLSHLLNRCQAGYNFKYNSEETTVSHLIYMDDIKLYSKNEKEMKILIEATTTFSHDINMQFGLDKCRTLHIIRGKIKPGNYVVNDTDTITAMESTDLYKYLGYKQLKGLDHTSIKQTLITEYRRRINAICKTQLSGKHLTKALNTFAIPVLTYSFGVIKWSKTDMEQLERITRTTLTKYNNLHPRSAIERLTIKRQNGGRGLIDIHYLWQKQISSLKTFFYTKSRTSGIHRAITYNDFNYTPLNLSDQNLQDVNDTNPQNQKIENWKKKVLHGRHPHDLEQSHINIAASNKWLKIGNLFPETEGFMIAIQDQIINTKNYKKYIIKDPTITNDKCRRCHTQSETIQHITGACTTLTQTDYTHRHNQVANIIHQKLAIKHSLVQNSSTPYYKYKPETILENDAYKLYYDRAILTDRTIHYNRPDITLQDKIKKVTYLIDIAVPNTHNLQKTISEKISKYAELKDEITRLWRQDKVYVIPIVLSTTGVIPNHLLHSLKLIDLDESIYINLQKAVILNTCRIVRKFMQLEDDNTPLL

SEQ ID NO: 21583 - protein, 1009 aa, Ochropleura plecta
MDPAIRPKLPKLRYSPNLFRLVNLFNENILNQFISDETQLIDIHTLIYCTAVVISEELNFKITQNTGTPRPKQNIKPAWQQRLEKDIEQLRADIGRLTQYINNNRSSKVVRRVEAIFRTHLVHTRHENNNRKPEEFLDTIKQKLALKVHRLRRYKKAQQRKNDNAIFATNEKIFYRNLNKPNTDTHYDTNTDTPTQPTKEQLETYWASIWEQQARHNDEAAWITEEETKWKAIDEMEFVEVTETDITHITGRLHNWKSPGIDKVHNFWFKKLTSLYKPIARNLTQIILGQQNAPEFIATGITYMLPKTKNSQQPSQYRPITCLPTIYKILTSAISTKINTHIEQHNIMAEEQKGCRRGHMGCKEQLIIDSTIHKHATTKNRNLHCTYIDYKKAFDSVPHSWLIQILKIYRVNSKIIDFLSNIMSQWKTTLQINCNQNSITTRQILIKNGIYQGDSLSPLWFCLALNPLSHLLQRCQAGYRLKHTTEQTTISHLIYMDDIKLYAQTEKDMKKLVEVTADFSQDINMQFGLDKCKTLHIIRGKIRPGNYVVNNTDTITAMEPSDLYKYLGYTQLKGLDHVRIKETLTAEYKRRLNVVCKTQLSGKNLIKALNTFAIPILTYSFGVIKWTKTDTEQLERNTRTTLTKHNNLHPKSAIERLTIKRQNGGRGLIDIQHLWRKQVCRLKTFFHTKSHTSNIHKAIVQNDHNYTPLNLNEQLDHTSHNTNEDPQTQKIDDWKKKVLHGRHPYDLEQTHVNKDASNKWLKIGNLFPETEGFIIAIQDQIINTKNYRKFIIKDPSVTNDKCRKCHTQPETIQHITGACTTLTQADYTHRHNQVANVIHQRLAVQYTLIQDTNTPYYNYTPQATLENDTHKLYYDRAILTDRTIHYNRPDIILQDKINKITYLIDIAVPNTHNIQKTITEKISKYAELKEEVTRIWRQEKVYVVPIVLSTTGVIPNHLLHSLKLLSLKETLYITLQKAAILNTCRIVRKFMQIEENEIGPHHNTPHTST

SEQ ID NO: 21584 - protein, 1308 aa, Cosmia trapezina
METRSKRKRIGPLPGGDRRGTPGADAGCLSMRTVSGEELNRRAPTDKVATAEVIDDGDRLTNRTDTPVEPYSPSTVSYAPSGTSSPSIPSSPIPSSPPITSVNIVSPTPALNVAREVSTFLPASTKAGKARVRMRWSKEVNLFIMRTYLHITKLETDMTTYRQQLHERFSRQYPEISVSEQRISDQRRTIVRNKLLSQVELDQLKEEVRTQLREESENYADTNTIILTQNTNENILQELPQSLTHLHPNSQSLTYNQSQAYTQTTHTSTQTQTESLTLTLENDIETLVVADQNLTRDTYIQEINDKFRTTITQYSGMDPAVRPKLPKLKYTPNLFRLVNLFNENILMQFISDDTQLIDIHLLIYCTAVVISEELNFKITDHTGTTRTSRTVKPAWQQRLEKDIEKLRADCGRLTQYINGCRSHKVVKRVEVIFKNNFTHTRHESNNRKPEEFLDTLKQKLSLKVHRLRRYLRAQQRKKDNAIFATNEKIFYRNIQKPHTDSTIENDRDTPSKEHLETFWSNIWEEQVHHNDKATWITEEATKWIAIDEMEFNEITESDITYITARLHNWKSPGIDKIQNFWYKKLTILHKSIAKNLTDIVLGEQNIPEFIATGITYMLPKTECTSEPSQYRPITCLPTIYKILTSAITNKINSHIEHHNIIAEEQKGCRRGHMGCKEQLVIDSTIHKHATTKNRNLHCTYIDYQKAFDSIPHSWLLQILEIYKINSKIIEFLRNIMTCWKTTLQINNRLSTLITRQIHIRKGIYQGDSLSPLWFCLALNPLSHLLNRCRAGYNFKNNTEETIISHLIYMDDIKLYAKTEKEMKSLIEVTTTFSQDINMQFGLDKCRTLHIIKGKVKPGNYAVSDTDTIAAMEPTDLYKKQLKGLDHTSIKQTLNTEYRRRINAICNTQLSGKHLIKALNTFAIPILTYSFGVIKWSKTDIEQLERTTRTTLTKHHNLHPKSAIERLTIKRQNGGRGLIDIYHLWQKQITRLKTFFYTKSRTSNIHKAITLNDLNYTPLNLNEQNIQDINIIDPQNQKIENWKKKVLHGRHPHDLEQSHIDKLASNKWLKIGNLFPETEGFIIAIQDQIINTKNYRKFIIKDPTITNDKCRRCHIQSETIQHITGACTTLTQTDYTHRHNQVANIIHQKLALKHSLIENSNTPYYKYTPQTILENDRHKMYYDRAILTDRTIHYNRPDITLQDKIRKITYLIDIAVPNTHNLQKTISEKISKYAELKEEVTRIWRQEKVYVIPIVLSTTGVIPNHLLRSLKLIDLEESIYINLQKAAILNTCRIVRKFMQLEEENTSSS

SEQ ID NO: 21585 - protein, 1185 aa, Mesoligia furuncula
MRWSKEVNQFIMRTYFYITKLETDMTTYRQQLHELFTRQYPEITVSEQRISDQRRAIVRNKLLSREIIEQLKEETRIQLQEAENNTDGNAISLSQNTTEIAEQSHAQPCSQVQPYTQSQSYNQSQAYTQTSHTSTQTESINLTLENDIETLTFADQNLTTDVYIQGIHDKFRTTLAQYSGMDPAARPKLPKLRYSPCLFRLVNLFNENILTQFISDDTQLIDIHTLIYCTAVVVSEELNFKITQHTGNTRSKQNIKPAWQQRLEKDIEKLRADCGRLTQYINNIRSNKVIRRVEAIFRSSVTHTRHENNNRKPEEFLDTLKQKLALKVHRLRRYKKAQQRKNDNAIFATNEKMFYRNLNKAKTDTNDENNTVAPDQPTKEQLETYWSSIWEEQEQHNDKATWITEEEIKWRAIEEMEFVEITEADITHLTGRLHNWKSPGIDKIHNFWYKKLTSLHKPIAKNLTEIILGRQNIPDFIATGITYMLPKTINSPQPSQYRPITCLPTIYKILTSAITTKINSHIEHHNIMAEEQKGCRRGHMGCKEQLIIDSTIHKHATTKNRNLHCTYIDYKKAFDSVPHSWLIKTLVYRINSKIIDFLRNIMPLWKTTLQINSNHNNVTTRQISIKKGIYQGDSLSPLWFCLALNPLSHLLQRCQVGYCLKHTAEQTTVSHLIYMDDIKLYAQTEKDMKKLVEVTAEFSLDINMQFGLDKCKTLHIIRGKIRPGDYVVNNTDTITAMEPTDLYKYLGYTQLKGLDHVRIKETLTAEYKRRLNTICKTQLSSKNLIKALNTFAIPILTYSFGVIKWTKTDTEQLERTTRTTLTKHNNLHPKSATERLTIKRQHGGRGLIDIQHLWQKQVFRLKTFFHSKSRTSNIHKAIVQNDFNYTPLNLSEQLDTLQITSDDPQIQKIENWKKKVLHGRHPHDLEQSHVNKVASNKFLKIGNLFPETEGFIIAIQDQIINTKNYRKFIIKDPSVTNDKCRKCHSQPETIQHITGACTTLTQTDYTQRHNQVVNVIHQKLALKYTLIQNTNTPYYNYTPQTILENDTHKLYYDRAILTDRTIHYNRPDITLQDKINKVTYLIDIAVPNTHNIQKTISEKISKYAELKDEVTRIWRQQKVYVVPIVLSTTGVIPNYLLHCLKLLNLKETLYITLQKAAILNTCRIVRKFMQIDENEIGPHHNTSLT

SEQ ID NO: 21586 - protein, 1317 aa, Spodoptera frugiperda
METRSKRKRIGPLPGGDRRGTPGADAGCFSMRSVSGVELSRRAPINKDTTAEIIDDGSTLTDRTNTPVEPYSPSTASYVPSRSSSPSLPSSPILSSSSLPIATLSTGDRNPTLNVAREVSTFLPASTKAGKTRVRMKWSKEVNLFIMRTYLHITKLETDMTTYRQQLHQLFSQQYPDVIVSEQRIADQRRVIVRNKLLSQSEIDQLKEDVRTQLELENIESLNNHNIYTDNTAEEILQEQPNSLTHTTQSESNTQTLSVYQSHTHSQATHTSTQTENLTITIENDVEIQADIQQNVLTDTYTQQLNDKFKTALNLYSGMNPAARPKLPKLRYSPKLQQLVNLFNKNILTQYTTDDTKLTDVHTLIYCTALVISEELNYKITNYTGNTRTKTNNKPAWQIRLERDIDKLRADCSRLTQYINNNRSNRVIKRVEAIFRNQRYTTHTRHEADNRRPEEYLDTLKQKLALKSHRLKRYKKAQERKNHNSTFVMNEKIFYRNLRTKTQTTETPHDTNIELPTTEQLEAFWSGIWEDEVQHNETADWISDEAARWSSLEEMDFVEVTESDITNTTAKLHNWKCPGIDKIHNYWFKKLDCLHKILAKNITEIILGKQNIPEFIATGITYMLPKKQYTAQPSQYRPITCLPTIYKIITSTITTKINKHIEQHHIIAEEQKGCRRGHMGCKEQLVIDSVIHKHAAAKNKNLHCTYIDYKKAFDSIPHSWLLEILQIYKINPEIIKFLKNIMSQWKTTLQLNYRNNTITTRQITIKKGIYQGDSLSPMWFCLALNPLSHLLHRSQAGYCLTHTAEVTTISHLIYMDDIKLYSKSEKEMKTLIDITSKFSRDINMQFGLDKCKTIHIIRGKIKPGDYEINNIDVITAMEPEDFYKYLGYKQLKGLDHTAIKNTLKNEYKNRVSAVCKTQLSSKHLIKALNTYAIPILTYSFGVIKWSKTEICQLERTTRTTLTKHNNLHPKSAIERLTIKRQHGGRGLIDIHHLWQKQIAKLKLFFHTKSNTSNIHKAIVTHDTNYTPLNLHEPNLSYDINNDPQKQKLEDWKKKVLHGRHPHDLEQAHIDTIASNKWLKIGNLFPETEGFIIAIQDQIINTKNYRKFIIKDPTITNDKCRKCHTQPETIQHITGACITLTQTDYTHRHNQLANIIHQNLAIKHKLIPDTNTPYYKYTPQNVLENTTHKLYYDRAILTDRTVHYNRPDITLRDKIKNITYLIDIAVPNTHNLQKTIGEKISKYAELKEEVARIWRQDKVYIVPIVVSTTGVIPNHLHNSLKLIDLKDTIYITLQKAAILNTCRIVRKFMELDENTTST

SEQ ID NO: 21587 - protein, 1308 aa, Spialia spio
METRSRKKRSGPLPEGDRRGTPGADAGCHSMRTVSGEELSRRTPTGSSENATAELDILTDRPEPYSPSTISYTPSIQTSPSLSSSSRYSPTPTLDVAQGQHALLPASTKAGKPRVRMRWSKEINLFIMRTYYLITKLETDLTTYRKQLHEKFLQQYPEIKVTEQRIADQRRTIVKNKLLDQETLNKLKEDIKLQLDEDSENHTNIDASTPLEHLIVQANSSQSTNITHIHTQNTQLSHTLTQNTQSFHNTSTQTDSVTITLENDINTTVDYNIATNIHTQEIHDKFRTALTQYSGMNPAVRPKLPKIRYSPHLFDLVNIFNHDILNNFITEDTQLMDIHTIVYCTAFVISQELNYKISYNIPNTTPKYCHKPSWQIRLEKDIEKLRVDCGRLTQYINGNRSKKIMKYVQIIFKSTLTHTTHENNNRKPEEFLDTLKQKLALKANRLKRYKKAQQRKNDNIIFSTNEKIFYKQLHKPQTQQNTMNQTDLPTEEHLETFWANIWEDEIEHNKTADWIEEEEKKWSAIEEMEFREITETDITYITHRLHNWKSPGVDKIHNFWYKKLISLHKSIAKNISDIILGKQCIPEFMATGITYMLPKSEYTPHPAEYRPITCLPTIYKIMTSAITLKINKHIERHNILAEEQKGCRRGHMGCKEQLIIDSTIHKHASSKNRNLHCTYIDYKKAFDSIPHSWLLKILQIYRINPKIINFLQNIMTQWKTTLHLCTQQKSIKTRQIFIKKGIYQGDSLSPLWFCLALNPLSHLLQRCQVGYPLKNDITDTIISHLVYMDDIKLYAKTEIEMRKLLDTTTQFSKDINMEFGLDKCKALHIKRGKIQPGDYTLSNIGTIKAMEPNDLYKYLGYKQLKGLDHTAIKETITTEYRNRINVLCKTQLSGKNLIKSINTYAIPILTYSFGIVKWTTTDIERLERMARTTLTKHNNLHPKSAIERLTIKRQDGGRGLVDIYKLWKSQISGLKTFFYTKSQTSHIHKAIVQNDHNYTPLNLSAPDLASTQYTQHDNSTQPNNNNTDKDKIAAWKKKVLHGRHPHDLEQPHVDAIASNKWLQIGNLFPETEGFMIAIQDQIINTRNYRKYIVKDPKVVDDKCRKCHTQPETIQHITGACITLTQTDYTHRHNQVANIIHQKLALKYKLIQNSNTPYYNYTPQTILENKSHKLYYDRAILTDKTIHYNRPDITLQDKINKITYLIDIAVPNTHNLQKTITEKITKYTELKEEIIRIWRQDKVFIVPIVLSSTGIIPKHLRHSLKLLDLKDSTYITLQKAAILNTCRIVRKFMQIDENELTTNHIPPPI

SEQ ID NO: 21588 - protein, 1275 aa, Hesperia comma
METRSKSKRLGPLPGGYRRGTPGADAGCFSMRTVSGEELNRRAPSGSPEYTTANQTDSNSNTNSPISIQNPYSPSTASYIPSPVSFADDISRVAPTPTLSVAQEGNTFLPASTKAGKPRVRMSWSKEVNIFIMRTYYYVTKLETDMTMYRKQLFELFSRKYPEIKVTEQRISDQRRTIIRNKLLPISTLNQIKEEVRIELQEKTDLVDDLPDDMPQTLQQTNTETPHTLTQTSQSYTQTECETVVIENDIDILVESEPLTHVQKLNDRLKTILIQYSGMDPTVRPKLPKLKYSNQLNQIVHVFNTNILPQYISNDTKLVDVHTLIYCTAIVTAEELNYKITEHIDIIGSKHNYKPPWQQRLEKDIEKLRADCGRLTQYINNNRSNKVVKKVQEIFKRKITHTRHENNNSKPEEFLDTLKQKLALKVHRLRRYKKAQQRKNDNILFNKNEKGFYRNLLKQTCKPTTENLELPTAVQLEEFWAKIWEERAEHNDKAYWITQEENRWNTIEEMEFIEITETDITGVTAKLHNWKAPGVDKIHNFWYKKLTSLHKPIAKNLTDIILGRQNIPEFIATGITYMLPKTHSVEPSKYRPITCLPTIYKILTSTIARKVNAHIEGNQIMAEEQKGCRRGHMGCKEQLIIDSTIHKHAITKNRNLHCTFIDYQKAFDSVPHSWLIHVLQIYKINPKIINFMRNVMTHWKTSLQLNYKIKTITTRQLTIRKGIFQGDSFSPLWFCLALNPLSNLLHDCHAGYNLKSTTENTTISHLIYMDDIKLYSQTQKQMEQLIDTTREFSKDINMEFGLDKCKMLHIIKGKVRPGDYEIDDNMTIRAMEPSDLYKYLGYNQLKGLKHTEIKQTLTIEYKSRMNAICNSQLSGKNLIKALNTYAIPILTYSFGVIKWTRTDVENIERITRTTLTRHNYLHPKSAVERLTIKRYNGGRGLIDVNHLWQKQIENIKSFFFNKSLTSNIHRAICQNDHNLTPLNLSEKNIPDCTDNRDPQSQKIENWKKKTLHGRHPHDLQQMHIDPVASNKWLTLGSLFPETEGFIMAIQDQIVNTKNYRRYIIKDSSIKDDKCRKCHTQPETIQHITGGCTTLTQTDYTYRHNQIVNIVHQKLALKHNLIQKTDTPYYKYSPATILENATHKLYYDRAILTDRTIHYNRPDITLQDKTNKITYLIDIAVPNTHNIQKTISEKINKYLDLKEEIARIWKQNKVYVVPIVLSTTGVIPKHIHHSLKLIDLKETLYITLQKAAILNTCRIVRKFLQIDADAIDTNTT

SEQ ID NO: 21589 - protein, 1276 aa, Hesperia comma
METRSKSKRLGPLPGGYRRGTPGADAGCFSMQTVSGEELNRRAPSGSPEYTTANQTDSNSNTNSPISIQNPYSPSTASYIPSPVSFADDISRVAPTPTLSVAQEGNTFLPASTKAGKPRVRMSWSKEVNIFIMRTYYYVTKLETDMTMYRKQLFELFSRKYPEIKVTEQRISDQRRTIIRNKLLPISTLNQIKEEVRIELQEKTDLVDDLPDDMPQTLQQTNTETPHTLTQTSQSYTQTECETVVIENDIDILVESEPLTHVQKLNDRLKTILIQYSGMDPTVRPKLPKLKYSNQLNQIVHVFNTNILPQYISNDTKLVDVHTLIYCTAIVTAEELNYKITEHIDIIGSKHNYKPPWQQRLEKDIEKLRADCGRLTQYINNNRSNKVVKKVQEIFKRKITHTRHENNNSKPEEFLDTLKQKLALKVHRLRRYKKAQQRKNDNILFNKNEKGFYRNLLKQTCKPTTENLELPTAVQLEEFWAKIWEERAEHNDKAYWITQEENRWNTIEEMEFIEITETDITGVTAKLHNWKAPGVDKIHNFWYKKLTSLHKPIAKNLTDIILGRQNIPEFIATGITYMLPKTSHSVEPSKYRPITCLPTIYKILTSTIARKVNAHIEGNQIMAEEQKGCRRGHMGCKEQLIIDSTIHKHAITKNRNLHCTFIDYQKAFDSVPHSWLIHVLQIYKINPKIINFMRNVMTHWKTSLQLNYKIKTITTRQLTIRKGIFQGDSFSPLWFCLALNPLSNLLHDCHAGYNLKSTTENTTISHLIYMDDIKLYSQTQKQMEQLIDTTREFSKDINMEFGLDKCKMLHIIKGKVRPGDYEIDDNMTIRAMEPSDLYKYLGYNQLKGLKHTEIKQTLTIEYKSRMNAICNSQLSGKNLIKALNTYAIPILTYSFGVIKWTRTDVENIERITRTTLTRHNYLHPKSAVERLTIKRYNGGRGLIDVNHLWQKQIENIKSFFFNKSLTSNIHRAICQNDHNLTPLNLSEKNIPDCTDNRDPQSQKIENWKKKTLHGRHPHDLQQMHIDPVASNKWLTLGSLFPETEGFIMAIQDQIVNTKNYRRYIIKDSSIKDDKCRKCHTQPETIQHITGGCTTLTQTDYTYRHNQIVNIVHQKLALKHNLIQKTDTPYYKYSPATILENATHKLYYDRAILTDRTIHYNRPDITLQDKTNKITYLIDIAVPNTHNIQKTISEKINKYLDLKEEIARIWKQNKVYVVPIVLSTTGVIPKHIHHSLKLIDLKETLYITLQKAAILNTCRIVRKFLQIDADAIDTNTT

SEQ ID NO: 21590 - protein, 957 aa, Pararge aegeria
MSIDTQLIDIHTVIYCTALVISEELNFKITEYTENSRSRHNNKPPWQQRLEKDIEKLRADCGRLTQYINNNRSNKVVKRVEAIFKSNFIHTRHENSNTKPEEFLDTFKQKLALKVHRLRRYKKAQQRKKDNAIFATNEKMFYRNLNKPHTDRISDEKIETPTIEHLENFWSGIWEQQVEHNNEAAWITEEDFKWRGIDEMEFKEFTESDITIITARLHNWKSPGIDKIHNFWYKKLTSLHKIKAKVFTDIVLGRQNIPEFIATGITYMLPKTKYTTQPSQYRPITCLPTIYKILTSAITTKINLHVERHNIIAEEQKGCRRGHMGCKEQLVIDSTIHKHATAKNRNLHCTYIDYQKAFDSIPHSWLIKVLEIYKVNPKIIIFLRSIMSHWKTTLQLSNRLNTLVSRQIYIRKGIYQGDSLSPLWFCLALNPLSDLLRKCRAGYSFKHNSKETIISHLIYMDDIKLYAKSENEMKHLINITTEFSQDINMQFGIDKCKAVHIIKGKIKSGDYIINENDTIFSMVTTDLYKYLGYKQLKGIDYTAVKQTLNTEYRRRINAICKTQLSGKHLIKALNTFAIPILTYSFGVIKWSKTDIEQIERITRTTLTKHNNHHPKSAVERLTIKRQNGGRGLIDIYHLWQKQISRLRTFFHSKSLTSDIHKAITIMDLNYTPLNLNEKIDTQNTSITVPQKQKLENWKKKVVHGRHRHDLEQPHINTVASNKWLKIGNLFPETEGFIIAIQDQIINTKNYRKYIIKDSTITSDKCRRCHIQSETIQHITGACTTLTQTDYTHRHNQVANIIHQKLAFKHMLTQNTNTPYYKYTPQTYKIYYDRAILTDKTIHYNRPDIILQDKLRKTTYLIDIAVPNTHNIQKTVSEKICKYTELKEEITRIWKQAKVYVVPIVISTTGVIPNSLLHSLKIIGLEESLYIGLQKAAILNTCRIVRKFLQVDESIGLT

SEQ ID NO: 21591 - protein, 1301 aa, Pararge aegeria
METRSKRKRIGPLPGGNRRGAPGADAGCLSMRTVSGEELNRRAPTDKNTTAEVIDDDDRLTDRTNTPIEPYSPSTISYTPSSRTSSPSLPSSPPIAILNANPSIQTLNVAREASTFLPASTKAGKARVRMKWSREVNIFIMRNYLYITKLETDLTTYRQRLHELFKEQYPSIIVSEQRISDQRRAIVRNKLLPQDIIDQLKIEIRRQLEEESKSNTDTNTAALTQTRSQNIQQIQPLQPNTQQQTYNQLQPYSQTSHTATQTETIILTIENDVEHLDNTDRNTISEKYVQEILNKFKTAITQYSGMDPAARPKLPKLKHSPNLFRLVNIFNESILYQFMSIDTQLIDIHTVIYCTALVISEELNFKITEYTENSRSRHNNKPPWQQRLEKDIEKLRADCGRLTQYINNNRSNKVVKRVEAIFKSNFIHTRHENSNTKPEEFLDTFKQKLALKVHRLRGYKKAQQRKKDNAIFATNEKMFYRNLNKPHTDRISDEKIETPTIEHLENFWSGIWEQQVEHNNEAAWITEEDFKWRGIDEMEFKEFTESDITIITARLHNWKSPGIDKIHNFWYKKLTSLHKIIAKVFTDIVLGRQNIPEFIATGITYMLPKTKYTTQPSQYRPITCLPTIYKILTSAITTKINLHVERHNIIAEEQKGCRRGHMGCKEQLVIDSTIHKHATAKNRNLHCTYIDYQKAFDSIPHSWLIKVLEIYKVNPKIIIFLRSIMSHWKTTLQLSNRLNTLVSRQIYIRKGIYQGDSLSPLWFCLALNPLSDLLRKCRAGYSFKHNSKETIISHLIYMDDIKLYAKSENEMKNLINITTEFSQDINMQFGIDKCKAVHIIKGKIKSGDYIINENDTISSMVTTDLYKYLGYKQLKGIDYTAVKQTLNTEYRRRINAICKTQLSGKHLIKALNTFAIPILTYSFGVIKWSKTDIEQIERITRTTLTKHNNHHPKSAVERLTIKRQNGGRGLIDIYHLWQKQISRLRTFFHSKSLTSDIHKAITIMDLNYTPLNLNEKIDTQNTSITDPQKQKLENWKKKVVHGRHRHDLEQPHINTVASNKWLKIGNLFPETEGFIIAIQDQIINTKNYRKYIIKDSTITSDKCRRCHIQSETIQHITGACTTLTQTDYTHRHNQVANIIHQKLAFKHMLTQNTNTPYYKYTPQTILENTTYKLYYDRAILTDKTIHYNRPDIILQDKLRKTTYLIDIAVPNTHNIQKTVSEKICKYTELKEEITRIWKQAKVYVVPIVISTTGVIPNSLLHSLKIIGLEESLYIGLQKAAILNTCRIVRKFLQVDESIGLT

SEQ ID NO: 21592 - protein, 1321 aa, Xestia c-nigrum
METRSKRKRIGPLSGGDRRGAPGADAGCHSMRTVSGEELSRRAPTDKDTTAEIIDDGDRLTDRTDTPVEPYSPSTVSYTPSRRSSPSIPSSPKLSSSPTISVNSVTPTPTLNAARGVSTFLPASTKAGKARVRMKWSKEVNTFIMRTFLHITKLETDMTTYRQQLHELFTRRYPEIAVSEQRISDQRRAIVRNKLLSLEDIDKLKAEVRLQLESENNIDTNNITITQNTFENNQQEQPQPYNQSEPYTLSLPCYQPQTYSQTTHTSTQTSETITIMLENDVQVLADAHQTQLTDMRTREIHDKFKTALTQYSGMDPVARPKLPKLRYSPKLVQLVNIFNQNILTQYISEETQLIDLHTLIYCTALVISEELNFKITEYTGNTRQSNVNKPAWQQRLETNIEKLRADCGRLTQYINNNRSNKVVKRVEIIFKNMAVHTRHENHNKKPEEFLDTLKQKLALKVHRLRRYKKAQERRNDNCLFATNEKNFYRKLQKPQTNTDTPTIENNIELPTTEQLETFWAGIWEEQVHHKETSEWIKGEETKWSSLVEMEFIELSESDIASVTARLHNWKSPGIDKVHNYWYKKLESLHQILAKNLTEIILGKQNIPEFIATGITYMLPKAQYSPQPSQYRPITCLPTIYKILTSAITSKINKHIEHHNIIAEEQKGCRRGHMGCKEQLVIDSVIHKHTKNRNLHCTYIDYKKAFDSIPHSWLIQILQIYKINPKIIHFLQKIMSHWKTTLQLNYRQTAITTRQITIKKGIYQGDSLSPLWFCLALNPLSDLLRRCQAGYSFKHATEETVISHLIYMDDIKQYARSEKEMEKLIETTTEFSKDINMQFGLDKCKTVHIKRGKIKPGDYPINNTDTIAALEPTDLYKYLGYKQLKGIDHTAIKHTLNTEFKRRVIAVCKTQLSGKHLIKALNTYAIPILTYSFGVIKWSKTDIQQIERTTRTALTKHNNLHPKSAIERLTIKRQNGGRGLIDIHHLWQKQITRLRTFFHSKSHTSTIHKAIVKNDINYTPLNLHEPTDTQHTSNDDPHKQKLEDWKKKVLHGRHPHDLEQPHVDTKASNKWLKIVSLFPETEGFIIAIQDQIINTKNYRKFIIKDPTITNDKCRKCHSQPETIQHITGACTTLTQTDYTHRHNQVANIIHQNLALKYKLIQDTNTPYYKYVPESFLENTTHKLFYDRAILTDRTIHYNRPDIILQDKTNKVTYLIDIAVPNTHNLQKTIGEKICKYAELKEEVTRIWRQEKVYVVPIVLSTTGVIPNHLHHSLKLLDLKDSIYISLQKAAILNTCRIVRKFMQIEDNASHNTQISSHTHTLH

SEQ ID NO: 21593 - protein, 1314 aa, Griposia aprilina
METRSKRKRLGPLPGGDRRGALGADAGCLSMRPVSGEELNRRAPTDKDATADIIDDGDRLTDRTNTPVEPYSPSTVSYTPSRPSSPSIPSSPSISSSPPITSISSAQPTPSLNVAREVSTFLPASTKAGKVRVRMRWSKEVNLFIMRTYLYITKLETDLTTYRKQLHELFTRQYPEITVTEQRISDQRRIIVRNKLLSEDVIAQLKEEVRTQLQTESENTVGVITTALTQNTTAYNQQEQQCSQSEPIIQFQTITQSQPYSQSQANSQTTRTSTQTESITIMLENEIETLVDININQSTDTRIQEIHDKFKTALTQYSGMDPAARPKLPKLRYTPKLSQLVYLFNQNILQQYINEEIHLIDVHTLIYCTALVISEELNFKITEYTGNPRPRNIRKPAWQQRLEKDIEKLRADCSRLTHYINNNRSNKVVKRVEAIFKNMATHTRHENDNRKPEEFLDTLKQKLALKVHRLRRYKKAQERIKDNSLFATNEKNFYRNLQKPQTATTTQTTENNVELPTAEQLETFWSGIWEEQLQHNEKSDWIADEETKWSSLEEMEFIELTESDITSITARLHSWKSPGIDKIHNYWYKKLESLHKVLAKNLTQIIIRKQNIPEFIATGITYMLPKTQYSPQPSQYRPITCLPTIYKILTSAITTKINKHIENHNIIAEEQKGCRRGHMGCKEQLVIDSIIHKHAATKNRSLHCTYIDYKKAFDSIPHSWLIQILQIYKINSKIIDFLQDIMPHWRTTLQLNYLNNTITTRQIYIKKGIYQGDSLSPLWFCLALNPLSNLLHRSQAGYSLKHTTEETVISHLIYMDDIKLYAKSEKEMKKLIDTTTEFSKDINMQFGLDKCKTVHIVRGKIKPGDYPINNTDSITAMETTDLYKYLGYRQLKGIDHTAIKHTLNTEYKRRVIAVCKTQLSGKHLIKALNTYAIPILTYSFGVIKWSKTDIQQIERTTRTTLTKHNNLHPKSAIERLTIKRQHGGRGLIDIHHLWQKQIARLRTFFHSKSHTSNIHKAVVLNDISYTPLNLHEHVGTQQTSNDDPHKQKLEDWKKKVLHGRHPHDLEQSHIDTIASNKWLKIGNLFPETEGFIIAIQDQIINTKNYRKFIIKDPTITNDKCRKCHNQPETIQHITGACTTLTQTDYTHRHNQVANVIHQKLAVKYKLIQDTNTPYYKYVPQTVLENTTHKLYYDRAILTDRTVHYNRPDITLQDKVNKVTYLIDIAVPNTHNLQKTIGEKISKYAELKEEVSRIWRQEKVFVVPIVVSTTGVIPNHLHHSLKLIDLNDSIYITLQKAAILNTCRIVRKFMQMEEN

SEQ ID NO: 21594 - protein, 1314 aa, Griposia aprilina
METRSKRKRLGPLPGGDRRGALGADAGCLSMRPVSGEELNRRAPTDKDATADIIDDGDRLTDRTNTPVEPYSPSTVSYTPSRPSSLSIPSSPSISSSPPITSISSAQPTPSLNVAREVSTVLPASTKAGKVRVRMRWSKEVNLFIMRTYLYITKLETDLTTYRKQLHELFTRQYPEITVTEQRISDQRRIIVRNKLLSEDVIAQLKEEVRTQLQTESENTVGVITTALTQNTTAYNQQEQQCSQSEPIIQFQTITQSQPYSQSQANSQTTRTSTQTESITIMLENEIETLVDININQSTDTRIQEIHDKFKTALTQYSGMDPAARPKLPKLRYTPKLSQLVYLFNQNILQQYINEEIHLIDVHTLIYCTALVISEELNFKITEYTGNPRPRNIRKPAWQQRLEKDIEKLRAECSRLTHYINNNRSNKVVKRVEAIFKNMATHTRHENDNRKPEEFLDTLKQKLALKVHRLRRYKKAQERIKDNSLFATNEKNFYRNLQTPQTATTTQTTENNVELPTAEQLETFWSGIWEEQLQHNEKSDWIADEETKWSSLEEMEFIELTESDITSIAARLHSWKSPGIDKIHNYWYKKLESLHKVLAKNLTQIIIRKQNIPEFIATGITYMLPKTQYSPQPSQYRPITCLPTIYKILTSTITTKINKHIENHNIIAEEQKGCRRGHMGCKEQLVIDSIIHKHAATKNRSLHCTYIDYKKAFDSIPHSWLIQILQIYKINSKIIDFLQDIMPHWRTTLQLNCLNNTITTRQIYIKKGIYQGDSLSPLWFCLALNPLSNLLHRSQAGYSLKHTTEETVISHLIYMDDIKLYAKSEKEMKKLIDTTTEFSKDINMQFGLDKCKTVHIVRGKIKPGDYPINNTDSITAMETTDLYKYLGYRQLKGIDHTAIKHTLNTEYKRRVIAVCKTQLSGKHLIKALNTYAIPILTYSFGVIKWSKTDIQQIERTTRTTLTKHNNLHPKSAIERLTIKRQHGGRGLIDIHHLWQKQIARLRTFFHSKSHTSNIHKAVVLNDISYTPLNLHEHVGTQQTSNDDPHKQKLEDWKKKVLHGRHPHDLEQSHIDTIASNKWLKIGNLFPETEGFIIAIQDQIINTKNYRKFIIKDPTITNDKCRKCHNQPETIQHITGACTTLTQTDYTHRHNQVAKVIHQKLAVKYKLIQDTNTPYYKYVPQTVLENTTHKLYYDRAILTDRTVHYNRPDITLQDKVNKVTYLIDIAVPNTHNLQKTIGEKNSKYAELKEEVSRIWRQEKVFVVPIVVSTTGVIPNHLHHSLKLIDLNDSIYITLQKAAILNTCRIVRKFMQMEEN

SEQ ID NO: 21595 - protein, 1314 aa, Griposia aprilina
METRSKRKRLGPLPGGDRRGALGADAGCLSMRPVSGEELNRRAPTDKDATADIIDDGDRLTDRTNTPVEPYSPSTVSYTPSRPSSPSIPSSPSISSSPPITSISSAQPTPSLNVAREVSTFLPASTKAGKVRVRMRWSKEVNLFIMRTYLYITKLETDLTTYRKQLHELFTRQYPEITVTEQRISDQRRIIVRNKLLSEDVIAQLKEEVRTQLQTESENTVGVITTALTQNTTAYNQQEQQCSQSEPIIQFQTITQSQPYSQSQANSQTTRTSTQTESITIMLENEIETLVDININQSTDTRIQEIHDKFKTALTKYSGMDPAARPKLPKLRYTPKLSQLVYLFNQNILQQYINEEIHLIDVHTLIYCTALVISEELNFKITEYTGNPRPRNIRKPAWQQRLEKDIEKLRADCSRLTYYINNNRSNKVVKRVEAIFKNMATHTRHENENRKPEEFLDTLKQKLALKVHRLRRYKKAQERIKDNSLFATNEKNFYRNLQKPQTATTTQTTENNVELPTAEQLETFWSGIWEEQLQHNEKSDWIADEETKWSSLEEMEFIELTESDITSITARLHSWKSPGIDKIHNYWYKKLESLHKVLAKNLTQIIIRKQNIPEFIATGITYMLPKTQYSPQPSQYRPITCLPTIYKILTSAITTKINKHIENHNIIAEEQKGCRRGHMGCKEQLVIDSIIHKHAATKNRSLHCTYIDYKKAFDSIPHSWLIQILQIYKINSKIIDFLQDIMPHWRTTLQLNYLNNTITTRQIYIKKGIYQGDSLSPLWFCLALNPLSNLLHRSQAGYSLKHTTEETVISHLIYMDDIKLYAKSEKEMKKLIDTTTEFSKDINMQFGLDKCKTVHIVRGKIKPGNYPINNTDSITAMETTDLYKYLGYRQLKGIDHTAIKHTLNTEYKRRVIAVCKTQLSGKHLIKALNTYAIPILTYSFGVIKWSKTDIQQIERTTRTTLTKHNNLHPKSAIERLTIKRQHGGRGLIDIHHLWQKQIARLRTFFHSKSHTSNIHKAVVLNDISYTPLNLHEHVGTQQTSNDDPHKQKLEDWKKKVLHGRHPHDLEQSHINTIASNKWLKIGNLFPETEGFIIAIQDQIINTKNYRKFIIKDPTITNDKCRKCHNQPETIQHITGACTTLTQTDYTHRHNQVANVIHQKLASKYKLIQDTNTPYYKYVPQTVLENTTHKLYYDRAILTDRTVHYNRPDITLQDKVNKVTYLIDIAVPNTHNLQKTIGEKISKYAELKEEVSRIWRQEKVFVVPIVVSTTGVIPNHLHHSLKLIDLNDSIYITLQKAAILNTCRIVRKFMQMEEN

SEQ ID NO: 21596 - protein, 1314 aa, Griposia aprilina
METRSKRKRLGPLPGGDRRGALGADAGCLSMRPVSGEELNRRAPTDKDVTADIIDDGDRLTDRTNTPVEPYSPSTVSYTPSRPSSPSIPSSPSISSSPPITSISSAQPTPSLNVAREVSTFLPASTKAGKVRVRMRWSKEVNLFIMRTYLYITKLETDLTTYRKQLHELFTRQYPEITVTEQRISDQRRIIVRNKLLSQDVIAQLKEEVRTQLQTESENTAGVITTALTQNTTAYNQQEQQCSQSEPIIQFQSITQSQPYSQSQANSQTTRTSTQTESITIMLENEIEILVDININQSTDTRIQEIHDKFKTALTQYSGMDPAARPKLPKLRYTPKLSQLVYLFNQNILQQYINEEIHLIDVHTLIYCTALVISEELNFKITEYTGNPRPRNIKKPAWQQRLEKDIEKLRADCSRLTHYINNNRSNKVVKRVEAIFKNMATHTRHENDNRKPEEFLDTLKQKLALKVHRLRRYKKAQERIKDNSLFATNEKNFYRNLQKPETATTTQTTENNVELPTAEQLETFWSGIWEEQLQHNEKSDWIADEETKWSSLEEMEFIELTESDITSITARLHSWKSPGIDKIHNYWYKKLESLHKALAKNLTQIIIRKQNIPEFIATGITYMLPKTQYSPQPSQYRPITCLPTIYKILTSAITTKINKHIENHNIIAEEQKGCRRGHMGCKEQLVIDSIIHKHAATKIRSLHCTYIDYKKAFDSIPHSWLIQILQIYKINSKIIDFLQDIMPHWRTTLQLNYLNNTITTRQISIKKGIYQGDSLSPLWFCLALNPLSNLLHRSQAGYSLKHTTEETVISHLIYMDDIKLYAKSEKEMKKLIDTTTEFSKDINMQFGLDKCKTVHIVRGKIKPGDYPINNTDSITAMETTDLYKYLGYRQLKGIDHTAIKHTLNTEYKRRVIAVCKTQLSGKHLIKALNTYAIPILTYSFGVIKWSKTDIQQMERTTRTTLTKHNNLHPKSAIERLTIKRQHGGRGLIDIHHLWQKQIARLRTFFHSKSHTSNIHKAVVLNDISYTPLNLHEHVGTQQTSNDDPHKQKLEDWKKKVLHGRHPHDLEQSHIDTIASNKWLKIGNLFPETEGFIIAIQDQIINTKNYRKFIIKDPTITNDKCRKCHNQPETIQHITGACTTLTQTDYTHRHNQVANVIHQKLAVKYKLIQDTNTPYYKYVPQTVLENTTHKLYYDRAILTDRTVHYNRPDITLQDKVNKVTYLIDIAVPNTHNLQKTIGEKISKYAELKEEVSRIWRQEKVFVVPIVVSTTGVIPNHLHHSLKLIDLNDSIYITLQKAAILNTCRIVRKFMQIEEN

SEQ ID NO: 21597 - protein, 912 aa, Griposia aprilina
MDPAARPKLPKLRYTPKLSQLVYLFNQNILQQYINEEIHLIDVHTLIYCTALVISEELNFKITEYTGNPRPRNIKKPAWQQRLEKDIEKLRADCSRLTHYINNNRSNKVVKRVEAIFKNMATHTRHENDNRKPEEFLDTLKQKLALKVHRLRRYKKAQERIKDNSLFAINEKNFYRNLQKPQTATTTQTTENNVELPTAEQLETFWSGIWEEQLQHNEKSDWIADEETKWSSLEEMEFIELTESDITSITARLHSWKSPGINKIQNYWYKKLESLHKVLAKNLTQIIIRKQNIPEFIATGITYMLPKTQYSPQPSQYRPITCLPTIYKILTSAITTKINKHIENHNIIAEEQKGCRRGHIGCKEQLVIDSIIHKHAATKNRSLRCTYMDYKKAFDSIPHSWLIQILQIYKINSKIIDFLQDIMPHWRTTLQLNYLNNTITTRQISIKKGIYQGDSLSPLWFCLALNPLSNLLHRSQVGYSLKHTTEETVISHLIYMDDIKLYAKSEKEMKKLIDTTTEFSKDINMQFGLDKCKTVHIVRGKIKPGDYPINNTDSITAMKTTDLYKYLGYRQLKGIDHTAIKHTLNTEYKRRVIAVCKTQLSGKHLIKALNTYAIPILTYSFGVIKSSKTDIQQIERTTRTTLTKHNNLHPKSAIERLTIKRQHGGRGLIDIHHLWQKQIARLRTFFHSKSHTSNIHKAVVLNDISYTPLNLHEHVGTQQTSNDDPHKQKLEDWEKKVLHGRHPHDLEQSHMDTIASNKWLKIGNLFPETEGFIIAIQDQIINTKNYRKFIIKDPTITNDKCRKCHNQPETIQHITGACTTLTQTDYTHRHNQVANVIHQKLAVKHKLIQDTNTPYYKYVPQTVLENTTHKLYYDRAILTDRTVHYNRPDITLQDKVNKVTYLIDIAVAAKNQ

SEQ ID NO: 21598 - protein, 1323 aa, Xestia c-nigrum
METRSKRKRIGPLPGGDRRGAPGADAGCHSMRTVSGEELSRRAPTDKDTTAEIIDDGDRLTDRTDTPVEPYSPSTVSYTPSRRSSPSIPSSPKLSSSPTISVNSVTPTPTLNAARGVSTFLPASTKAGKARVRMKWSKEVNTFIMRTFLHITKLETDMTTYRQQLHELFTRRYPEIAVSEQRISDQRRAIVRNKLLSLEDIDKLKAEVRLQLESENNIDTNNITITQNTFENNQQEQPQPYNQSEPYTLSLPCYQPQIYSQTTHTSTQTSETITIMLENDVQVLADAHQTQLTDMRTREIHDKFKTALTQYSGMDPVARPKLPKLRYSPKLVQLVNIFNQNILTQYISEETQLIDLHTLIYCTALVISEELNFKITEYTGNTRQSNVNKPAWQQRLETDIEKLRADCGRLTQYINNNRSNKVVKRVEIIFKNMAVHTRHENHNKKPEEFLDTLKQKLALKVHRLRRYKKAQERRNDNCLFATNEKNFYRKLQKPQTNTDTPTIENNIELPTTEQLETFWAGIWEEQVHHKETSEWIKGEETKWSSLVEMEFIELSESDIASVTARLHNWKSPGIDKVHNYWYKKLESLHQILAKNLTEIILGKQNIPEFIATGITYMLPKAQYSPQPSQYRPITCLPTIYKILTSAITSKINKHIEHHNIIAEEQKGCRRGHMGCKEQLVIDSVIHKHAATKNRNLHCTYIDYKKAFDSIPHSWLIQILQIYKINPKIIHFLQNIMSHWKTTLQLNYRQTAITTRQITIKKAIYQGDSLSPLWFCLALNPLSDLLRRCQAGYSFKHATEETVISHLIYMDDIKLYARSEKEMEKLIETTTEFSKDINMQFGLDKCKTVHIKRGKIKPGDYPINNTDTIAALEPTDLYKYLGYKQLKGIDHTAIKHTLNTEFKRRVIAVCKTQLSGKHLIKALNTYAIPILTYSFGVIKWSKTDIQQIERTTRTALTKHNNLHPKSAIERLTIKRQNGGRGLIDIHHLWQKQITRLRTFFHSKSHTSTIHKAIVKNDINYTPLNLHEPTDTQHTSNDDPHKQKLEDWKKKVLHGRHPHDLEQPHVDTKASNKWLKIGSLFPETEGFIIAIQDQIINTKNYRKFIIKDPTITNDKCRKCHSQPETIQHITGACTTLTQTDYTHRHNQVANIIHQNLALKYKLIQDTNTPYYKYVPERFLENTTHKLFYDRAILTDRTIHYNRPDIILQDKTNKVTYLIDIAVPNTHNLQKTIGEKICKYAELKEEVTRIWRQEKVYVVPIVLSTTGVIPNHLHHSLKLLDLKDSIYISLQKAAILNTCRIVRKFMQIEDNASHNTQISSHTHTLH

SEQ ID NO: 21599 - protein, 1314 aa, Griposia aprilina
METRSKRKRLGPLPGGDRRGALGADAGCLSMRPVSGEELNRRAPTDKDATADIIDDGDRLTDRTNTPVEPYSPSTVSYTPSRPSSPSIPSSPSISSSPPITSIISVQPTPSLNVAREVSTFLPASTKAGKVRVRMRWSKEVNLFIMRTYLYITKLETDLTTYRKQLHELFTRQYPEITVTEQRISDQRRIIVRNKLLSQDVIAQLKEEVRTQLQTESENTAGVITTALTQNTTAYNQQEQQCSQSEPIIQFQTITQSQPYSQSQANSQTTHTSTQTESITIMLENEIETLVDININQSTDTRIQEIHDKFKTALTQYSGMDPAARPKLPELRYTPKLSQLVYLFNQNILQQYINEEIHLIDVHTLIYCTALVISEQLNFKITEYTGNPRPRNIKKPAWQQRLEKDIEKLRADCSRLTHYINNNRSNKVVKRVEAIFKNMATHTRHENDNRKPEEFLDTLKQKLALKVHRLRRYKKAQERIKDNSLFATNEKNFYRNLQKPQTATTTQTTENNVELPTAEQLETFWSGIWEEQLQHNEKSDWIADEETKWSSLEEMEFIELTESDITSITARLHSWKSPGIDKIHNYWYKKLESLHKVLAKNLTQIIIRKQNIPEFIATGITYMLPKTQYSPQPSQYRPITCLPTIYKILTSAITTKINKHIENHNIIAEEQKGCRRGHMGCKEQLVIDSIIHKHAATKNRSLHCTYIDYKKAFDSIPHSWLIQILQIYKINSKIIDFLQDIMPHWRTTLQLNYLNNTITTRQISIKKGIYQGDSLSPLWFCLALNPLSNLLHRSQAGYSLKHTTEKTVISHLIYMDDIKLYAKSEKEMKKLIDTTTEFSKDINMQFGLDKCKTVHIVRGKIKPGDYPINNTDSITAMETTDLYKYLGYRQLKGIDHTAIKHTLNTEYKRRVIAVCKTQLSGKHLIKALNTYAIPILTYSFGVIKWSKTDIQQIERTTRTTLTKHNNLHPKSAIERLTIKRQHGGRGLIDIHHLWQKQIARLRTFFHSKSHTSNIHKAVVLNDISYTPLNLHEHVGTQQTSNDDPHKQKLEDWKKKVLHGRHPHDLEQSHIDTIASNKWLKIGNLFPETEGFIIAIQDQIINTKNYRKFIIKDPTITNDKCRKCHNQPETIQHITGACTTLTQTDYTHRHNQVANVIHQKLAVKYKLIQDTNTPYYKYVPQTVLENTTHKLYYDRAILTDRTVHYNRPDITLQDKVNKVTYLIDIAVPNTHNLQKTIGEKISKYAELKEEVSRIWRQEKVFVVPIVVSTTGVIPNHLHHSLKLIDLNDSIYITLQKAAILNTCRIVRKFMQMEEN

SEQ ID NO: 21600 - protein, 1343 aa, Dyscophellus porcius
MRLRSRCIPQAGTRKGESRPGPSGSGSPSYSGGGNVSHMATQSHTAVVKKSTPPRITSSESSPTSSSHSLFQSPSSSPHSFQFQQSSSRSTTITPLSCDVAQEAYAKSPVPTTDIISSTRANQNNLDKRVDSNSLPCSFNTSSRGVLKDMLPATTLAGKSRQRMKWTDDINKELLRWYYIVTHNETNLTAWRKQLHNKISETIPELSHLTEQRLADQIRVIHRNNRIPAPQREQIKQLVGSFISSSNTPYEQIIVQNVGNTCTMNSTSTINCHEVNIDMQVQSTHNKQTTHNTQTTHNTQLTLNTHASAQIETINILMTNDIKIIHSAPTSDPIVEKIKVDLQTVIVEYAGTDPTLRPKLPKLKQTVQLNQFIDLFNNKILHQFFSNDSQLTDIHPLIYCSAFIISRELGYKIGEPTRPNYKSQKNKPDWQTRMEKAIAQLRSDIGRLTQYINNNRSRKVVDKVEIIFRNTKIHSIHENNNKKPEEYLDTLKQKLALKANRLSRYKKALKRKNDNKLFYTNQKLFYRKLMLGTNPSVTSKNNEIPHVQDLEQFWAGIWEVNEEHNEQAAWISEEENRWKTLEEMKFEEITELDIQNITARLNNWKSPGIDKIHNFWYKKLHTLHNIIAKNLTQIIFKQQNTPQFIAQGITYMLPKGKYTTQPSQYRPITCLPTIYKILTSAITQKITVHIEECNILSEEQKGCRRGHMGCKEQLIIDSVIHRHATTNKRNLHCTFIDYKKAFDSIPHSWLLHILKIYKINPTLIEFLKNTMNLWKTKLQIDNITTREIAIKKGIFQGDSLSPLWFCLALNPISHMLHKCKAGYSLERQNSACISHLIYMDDIKLYSKTEKEMQYLINTTVEFSKDIKMKFGLDKCKTIHIKRGKIQPGDYLVSEDERITAMEPNELYKYLGYYQSKGLDHTHLKNTLIQEYNHRVHVICKTLLAGKSLIKAINTYAIPILTYSFGIIKWTKTDINNIEIKTRTSLTKHNYLHPKSAIERMTIKRQNGGRGLINITKLWQNQILSLRNFFYQKSNNSDIHKEIVRNDTNYTPLNLVNQSELNREGDQEHARIEQWKAKKLHGRHPFDLEQPHVDATASNKWLTKGTLFPETEGFILAIQDQVINTRNYRKHIIKDPSMTNDKCRKCHTHPENIQHITGACPNLTQTDYTHRHNQIVNIIHQNLAHKHHLIPNTYTPYYKYNPSPVLENKTHKMYYDRAILTDKTIHYNRPDITLQDKRHKITYLIDIAVPNTHNLQKTIAEKIHKYTDLKEEITRIWKQEKVYIVPIVLSTTGVIPNYLHHSLKLIDLPNCYILAQKSAILNTCRIVRKFLQIDDDTTPTDRQT

SEQ ID NO: 21601 - protein, 1201 aa, Quadrus cerialis
MSWSKEVNIFIMRTYYYITKLETDFTTYRKQLHELFSQQYPEINVTEQRIADQRRTIVKNKRINQDTLNQLKEEVRIQLEGENQILSPDIRPTEYQTENALHSQSATVHQSLLQSQSSNQNSQTPHSNVQHTQLSHTTTPNIQSSLTSTQTEAVTLILENDTNYLQNDNDTTNIHKINDKFKTVIMQYSGINPAVRPKLPKLRYTPQLFKLINIFNQVILKQHISEETQLTDIHTIIYCTALVISQELNYKIYDDPENIKPKDHNKPSWQIRLEKDIEKLRASCGRLTQYIKGNKSKKILRHIETLFKNMNTHTRYEKENRKPEEFLDTLKQKLALKVSRLKRYNKALQRKTDNTLFTTNEKIFYRNLQKSTTDSTTDIKPDLPTEEKLETFWSGIWEKQVQHNEKADWIAEEKTTWSALEEMTFVEITEIDITNTTNRLHNWKSAGVDKIHNFWYKKLFTLHKSLAKNLTEVILGKQDIPEFITIGITYMLPKTRHSQEPSQYRPITCLPTIYKILTSTIALKISKHIEQNNIIAEEQKGCRRGHMGCKEQLIIDSTIHRHATSKNRNLHCTYIDYKKAFDSIPHSWLIEILQIYKISPKIINFLRKTMTKWKTTLQLSTNQTSITTRQIHIRRGIYQGDALSPLWFCLALNPLSQLLHRCRVGYCLKHDTLDTIISHLIYMDDIKLYAKTKKDMTQLLDTTTQFSSDINMEFGLDKCKTLHIIRGKVQPGNYEINNTDTITALEPTDVYKYLGYKQLKRLDHAAIKTTLTTEYRKRINTLCKTQLSGKHLIKSFNTYAIPILTYSFGIIKWTKTDIEQLERTTRTTLTKHNNLHPKSAVERLTIKRQDGGRGLVNIFELWQKQISRLKQFFHTKSQSSDIHKAVVYNDQNYTPLNLKEELNILCTQNNYNIYNNNTQKQKIEDWKKKVLHGRHPHDLEQPHIDTTASNKWLQIGNLFPETEGFMIAIQDQIINTKNYRKYIIKDPTILNDKCRKCHNQPETIQHITGACITLTQTDYTHRHNQVANIIHQKLAHKHNLIHNTSTPYYNYIPQTILENETHKLYYDRAILTDKTIHYNRPDITLRDKINKITYLIDIAVPNTHNIQKTITEKISKYSDLKEEVTRIWKQEKVFIVPIVLSTTGVIPKHLQHSLKQIDLHENTYISLQKAAILNTCRIVRKFMQLDESNIVPQHSSSNTIY

SEQ ID NO: 21602 - protein, 911 aa, Muschampia orientalis
MDPAIRPKLPKLKYTQKLSQLVNIFNNNILNQYISENTKLIDVHTLIYCTALVISEELNYKITEHSGTLRSRNTSKPSWQQRLERDIEKLRADCGRLTQYINNNRTRRVVKRVEAIFKSMNTHTRHENHNKKPEEFLDTLKQKLALKVHRLRRYNKAQQRKNDNAVFANNERNFYRNLHTPQIDTTTDTNTELPTTEQLETFWSNIWEEQVQHNDRAAWITEEETKWNTIDEMEFTEIFESDINNVTAKLHNWKSPGIDKIHNYWYKKLDSLHNIIAKNLTNIILGKQSIPEFIATGITYMLPKSQHSTQPSQYRPITCLPTIYKILTSAITHKINKHIEHHNIIAEEQKGCRRGHMGCKEQLVIDSIVHKHATTKNRNLHCTYIDYKKAFDSIPHSWLIQILRIYKINSKVIDFLHHIMARWKTTLQLHHNNNTITTRQIFIRKGIYQGDSLSPLWFCLALNPLSNLLNNCHAGYTLKHNTTDETTISHLIYMDDIKLYSKTTKEMKHLIDTTAKFSQDINMQFGLDKCKTLHIIRGKIQPGDYNINTTDTITAMEPTDLYKYLGYKQLKGIDHTAIKNTLHTEYKRRVIAVCKTQLNGKHLIKALNTYAIPILTYSFGVVKWSKTDIQQIERTTRTTLTKHNNLHPKSAIERLTIKRQDGGRGLIDIHHLWQKQISRLKSFFHTKSQTSNIHKAVSLHDDNYTPLNLHEQTDTQLNITTDPQIQKIDDWKKKVLHGRHPHDLEQPHIDAIASNKFLKIGYLFPETEGSIIAIQDQIINTKNYRKHIIKDPTITNDKCRKCHTQPETIQHITGACTTLTQTDYTHRHNQVANIIHQKLALKHKLIQDTNTPYYKYKPQTVLENTTHKLYYDRAILTDRTVHYNRPDITLQDKVNKITYFIDIAVPNTHNL

SEQ ID NO: 21603 - protein, 1004 aa, Muschampia floccifera
MDPAVRPKLPKLKYTQKLSQLVNIFNNNILNQYISENTKLIDVHTLIYCTALVISEELNYKITEHTGTLRSRTTSKPSWQQRLERDIEKLRADCGRLTQYINNNRTRRVVKRVEAIFKSMNTHTRHENHNKKPEEFLDTLKQKLALKVHRLRRYNKAQQRKNDNAVFANNERNFYRNLHTPQIDTTTDTNTELPTTEQLETFWSNIWEEQVQHNDRAGWITEEETKWNTIDEMEFTEIFESDINNVTAKLHNWKSPGIDKIHNYWYKKLDSLHNIIAKNLTNIILGKQSIPEFIATGITYMLPKSQHSTQPSQYRPITCLPTIYKILTSAITHKINKHIEHHNIIAEEQKGCRRGHMGCKEQLVIDSIVHKHATTKNRNLHCTYIDYKKAFDSIPHSWLIQILRIYKINSKVIDFLHHIMARWKTTLQLHHNNNTITTRQIFIRKGIYQGDSLSPLWFCLALNPLSNLLNNCHAGYTLKHNTTDETTISHLIYMDDIKLYSKTKKEMKHLIDTTAKFSQDINMQFGLDKCKTLHIIRGKIQPGDYNINTTDTITAMEPTDLYKYLGYKQLKGIDHTAIKNTLHTEYKRRVIAVCKTQLNGKHLIKALNTYAIPILTYSFGVVKWSKTDIQQIERTTRTTLTKHNNLHPKSAIERLTIKRQDGGRGLIDIHHLWQKQISRLKSFFHTKSQTSNIHKAVSLHDDNYTPLNLHEQTDTQLNITTDPQIQKIDDWKKKVLHGRHPHDLEQPHIDAIASNKFLKIGYLFPETEGSIIAIQDQIINTKNYRKHIIKDPTITNDKCRKCHTQPETIQHITGACTTLTQTDYTHRHNQVANIIHQKLALKHKLIQDTNTPYYKYKPQTVLENTTHKLYYDRAILTDRTVHYNRPDITLQDKVNKITYFIDIAVPNTHNLQKTIGEKINKYADLKEEVTRIWRQNKIYVVPIVLSTTGVIPKHLHHSLKLIDLKDSTYILLQKAAILNTCRIVRKFLELDENETAPHNTHFTK

SEQ ID NO: 21604 - protein, 1311 aa, Junonia evarete
METRSKKKRIGPLPGGDRRGTPGAGAGCDSMRAVSGEELSRRASPDKFHTTADRRELNRRAYGVNATAATDDEINRLTDRTSSPIEPYNSPSTSSYTPSIQSSPSTISLNTEPHLPALNVAREANAFLPASTKAGKPRVRMRWSKEVNSFIMRTYYFITNLETDMTTYRQKLHELFTQEYPGIIVTEQRISDQRRTIIRNKLLTEEELNRLKEEARIQLQQYAITTPLPQNPHSDSPQSHSESHSQTEYYTLAITQNTHTSDTSTQTESVTIMIENEADTLNVQNPITETYIQEIYDKFSTTLIQYSGMDPVLRPKLSKLKYSPQLSNLIQIFNENILNKFISEDTQLIDIHTLIYCTALVITEELNLKKIENSRRTENRRNNKPPWQHRLEKDIEKLRADCGRLTQYIYNNNRSNKVVKTVEEIFRNSIIHTKHDRNNRKPEEYLDTLKQKLALKVNRLRRYKKAQQRRNDNVTFTTNEKLFYRNLQNPQTPTGTVTDSNTNVPAKEDLEVFWSGIWEEQVEHNSEAHWINEEKTEYSIIEEMEFAEVTETDITNITARLHNWKSPGIDKIHNFWYKKLTSLHKFIAKNLTRIILGQQRIPEFMTVGITYMLPKTKHSPQPSQYRPITCLPTIYKILTSAITTKINSHIQQYNIIAEEQKGCRQAHMGCKEQLVIDSTIHKHATTKNRNLHCTYIDYKKAFDSIPHSWLIQVLEIYKINSKIIDFLRKIMSYWKTTLHLNYGQNSIVTRQIKIQKGIYQGDSLSPLWFCLALNPLSRLLHNCRVGYSFKGTDKTVISHLIYMDDIKLYAKTDKDMKKLIEITKEFSSDINMQFGLEKCKTIHIIKGKIKPGDYTINNSDTITAMEPTDLYKYLGYKQLKGLDHTSIKQTLTIEYKRRLNAICKTQLSGKHLIKAINTYAVPILTYSFGIIKWTKTDIEQIERNTRTTLAKHNNLHPKSAIERLTLKRQDGGRGLIDINNLWQKQITTLKTFFHTKSRTSDIHKAIVVNDVNYTPLNLNEQECTRNHSNVDPQKQKLENWKKKVLHGRHPHDLEQPHINTIASNKWLKIGNLFPETEGFIIAIQDQVINTKNYKKYIIKDPNITNDKCRKCHIQPETIQHITGACVTLTQTDYTHRHNQVSNIIHQKLALKHKLIENTKTPYYKYTPQTILENSTHKIYYDRAILTDKTIHYNRPDITLQDKINKVTYLIDIAVPNTHNIQKTITEKINKYNELKEEVIRIWKQEKVYIIPIVISTTGVVPNQLLRSLRLLDLSESLYIPIQKAAILNTCRIVRKFMQLEENNITTYIMSQ

SEQ ID NO: 21605 - protein, 1306 aa, Junonia zonalis
METRSKKKRIGPLPGGDRRGTPGAGAGCDSMRAVSGEELSRRASPDKFHTTADRRELNRRAYGVNATAATDDEINRLTDRTSSPIEPYNSPSTSSYTPSIQSSPSTISLNTEPHLPALNVAREANAFLPASTKAGKPRVRMRWSKEVNSFIMRTYYFITNLETDMTTYRQKLHELFTQEYPGIIVTEQRISDQRRTIIRNKLLTEEELNRLKEEARIQLQQYAITTPLPQNPHSDSPQSHSESHSQTEYYTLAITQNTHTSDTSTQTESVTIMIENEADTLNVQNPITETYIQEIYDKFSTTLIQYSGMDPVLRPKLSKLKYSPQLSNLIQIFNENILNKFISEDTQLIDIHTLIYCTALIITEELNLKKIENSRCTKNRRNNKPPWQHRLEKDIEKLRADCGRLTQYIYNNNRSNKVVKTVEEIFRNSIIHTKHDRNNRKPEEYLDTLKQKLALKVNRLRRYKKAQQRRNDNVTFTTNEKLFYRNLQNPQTPTGTVTDSNTNVPAKEDLEVFWSGIWEEQVEHNSEAHWINEEKTEYSIIEEMEFAEVTETDITNITARLHNWKSPGIDKIHNFWYKKLTSLHKFIAKNLTRIILGQQRIPEFMTVGITYMLPKTKHSPQPSQYRPITCLPTIYKILTSAITTKINSHIQQYNIIAEEQKGCRQAHMGCKEQLVIDSTIHKHATTKNRNLHCTYIDYKKAFDSIPHSWLIQVLEIYKINSKIIDFLRKIMSYWKTTLHLNYGQNTIVTRQIKIQKGIYQGDSLSPLWFCLALNPLSRLLHNCRVGYSFKGTDKTVISHLIYMDDIKLYAKTDKDMKKLIEVTKEFSSDINMQFGLEKCKTIHIIKGKIKPGDYTINNSDTITAMEPTDLYKYLGYKQLKGLDHTSIKQTLTIEYKRRLNAICKTQLSGKHLIKAINTYAVPILTYSFGIIKWTKTDIEQIERNTRTTLAKHNNLHPKSAIERLTLKRQDGGRGLIDINNLWQKQITTLKTFFHTKSRTSDIHKAIVVNDVNYTPLNLNEQECTRNHSNVDPQKQKLENWKKKVLHGRHPHDLEQPHINTIASNKWLKIGNLFPETEGFIIAIQDQVINTKNYKKYIIKDPNITNDKCRKCHIQPETIQHITGACVTLTQTDYTHRHNQVSNIIHQKLALKHKLIENTKTPYYKYTPQTILENSTHKIYYDRAILTDKTIHYNRPDITLQDKINKVTYLIDIAVPNTHNIQKTITEKINKYNELKEEVIRIWKQEKVYIIPIVISTTGVVPNHLLRSLRLLDLSESLYIPIQKAAILNTCRIVRKFMQLEENNITT

SEQ ID NO: 21606 - protein, 1355 aa, Junonia pacoma
MNKDNNNNNNNKPPETQPHVLIDHLITWGADTRYLNYWRGKRGNGNPFSMETRSKKKRIGPLPGGDRRGTPGAGAGCDSMRAVSGEELSRRASPDKFHTTADRRELNRRAYGVNATAATDDEINRLTDRTSSPIEPYNSPSTSSYTPSIQSSPSTISLNTEPHLPALNVAREANAFLPASTKAGKPRVRMRWSKEVNSFIMRTYYFITNLETDMTTYRQKLHELFTQEYPGIIVTEQRISDQRRTIIRNKLLTEEELNRLKEEARIQLQQYAITTPLPQNPHSDSPQSHSESHSQTEYYTLAITQNTHTSDTSTQTESVTIMIENEADTLNVQNPITETYIQEIYDKFSTTLIQYSGMDPVLRPKLSKLKYSPQLSNLIQIFNENILNKFISEDTQLIDIHTLIYCTALVITEELNLKKIENSRRTENRRNNKPPWQHRLEKDIEKLRADCGRLTQYIYNNNRSNKVVKTVEEIFRNSIIHTKHDRNNTKPEEYLDTLKQKLALKVNRLRRYKKAQQRRNDNVTFTTNEKLFYRNLQNPQTPTGTVTDSNTKVPAKEDLEVFWSGIWEEQVEHNSEAHWINEEKTEYSIIEEMEFAEVTETDITNITARLHNWKSPGIDKIHNFWYKKLTSLHKFIAKNLTRIILGQQRIPEFMTVGITYMLPKTKHSPQPSQYRPITCLPTIYKILTSAITTKINSHIQQYNIIAEEQKGCRQAHMGCKEQLVIDSTIHKHATTKNRNLHCTYIDYKKAFDSIPHSWLIQVLEIYKINSKIIDFLRKIMSYWKTTLHLNYGQNSIVTRQIKIQKGIYQGDSLSPLWFCLALNPLSRLLHNCRVGYSFKGTDKTVISHLIYMDDIKLYAKTDKDMKKLIEITKEFSSDINMQFGLEKCKTIHIIKGKIKPGDYTINNSDTITAMEPTDLYKYLGYKQLKGLDHTSIKQTLTIEYKRRLNAICKTQLSGKHLIKAINTYAVPILTYSFGIIKWTKTDIEQIERNTRTTLAKHNNLHPKSAIERLTLKRQDGGRGLIDINNLWQKQITTLKTFFHTKSRTSDIHKAIVVNDVNYTPLNLNEQECTRNHSNVDPQKQKLENWKKKVLHGRHPHDLEQPHINTIASNKWLKIGNLFPETEGFIIAIQDQVINTKNYKKYIIKDPNITNDKCRKCHIQPETIQHITGACVTLTQTDYTHRHNQVSNIIHQKLALKHKLIENTKTPYYKYTPQTILENSTHKIYYDRAILTDKTIHYNRPDITLQDKINKVTYLIDIAVPNTHNIQKTITEKINKYNELKEEVIRIWKQEKVYIIPIVISTTGVVPNHLLRSLRLLDLSESLYIPIQKAAILNTCRIVRKFMQLEENNITT

SEQ ID NO: 21607 - protein, 1299 aa, Vanessa atalanta
METRSKKKRIGPLPGGDRRGTPGAGAGCDSMRTVSGEELSRRASPDKFHTTAGRRELNRRAHGVNATAATDDETNRLTDRTSSPIEPYNSPSTSSYTPSVQSSPSTISLNTEPHLPALNVAREANAFLPASTKAGKPRVRMRWSKEVNSFIMRTYYYITNLETDMTTYRQKMHELFTQEYPGITVTEQRISDQRRTIVKNKLLTEDELNRLKEEARIQLQQHDVTTPLPRNPSHSEFHSQTESFTIPNTQNTHTSDMSTQTESVTIILENEVNTLNAKNPITETYIQEIYDKFSTTLLQYSGTDPLIRPRLPKIKYSPQLYNLIQIFNQNILNRFISEDTQLIDIHTLIYCTALVITEEVNPKQIENMQRTKTKRTNKPPWQQRLEKDIEKLRADCGRLTQYIYNNNRSNKVVKRVEEIFQNCIIHTKHNKNNRKPEEYLDTLKQKLALKVNRLRRYKKAQQRRNDNAIFTTNEKLFYRNLQKPHTPTNTVTDRNTDVPTKQDLEVFWSGIWEEQVSHNSKALWINDEKIEFSIIKEMEFVEVTETDIKNITAKLHNWKSPGIDKIHNFWYKKLTSLHKCIAKNLTHVVLGQQKIPEFMTIGITYMLPKTKHSPQPSQYRPITCLPTIYKILTSAITNKINTHIEQHNIIAEEQKGCRRAHMGCKEQLVIDSTIHKHAATKNRNLHCTYIDYQKAFDSIPHSWLIQILEIYKINPKIIDFLRKIMSYWKTTLHLNYGQNTIVTRQIQIKKGIYQGDSLSPLWFCLALNPLSHLLHRCRVGYPLKSIEETIISHLIYMDDIKLYAKSDKDMKKLIEVTKEFSTDINMQFGLDKCKTIHLIKGKIKPGNYAITSSDTITAMEPTDLYKNLGYNQLKGLDHTSIKHTLTIEYKRRINVICKTQLSGKNLIKAINTYAIPILTYSFGIIKWTKTDIEQIERNTRTILTKHNNLHPKSAIERLTLKRQNGGRGLIDIYNLWQKQINTLKTFFHLKSRTSDIHKAIVVNDINYTPLNLNEQGYHMNDCIDDPQKQKLENWKKKVLHGRHPHDLEQPHINTIASNKWLKIGNLFPETEGFIIAIQDQIINTKNYRKYIIKDPSITNDKCRKCHIQPETIQHITGACITLTQTDYTHRHNQVSNIVHQKLALKHKLIQNTKTPYYKYIPQTILENATHKMYYDRGILTDKTIHYNRPDITLQDKINKVTYLIDIAVPNTHNLQKTIAEKINKYNELKEEVTRIWKQEKVYIIPIVISTTGVVPNHLLHSLKLLDLNESLYIPIQKAAILNTCRIVRKFMQLEETDTT

SEQ ID NO: 21608 - protein, 1299 aa, Vanessa atalanta
METRSKKKRIGPLPGGDRRGTPGAGAGCDSMRTVSGEELSRRASPDKFHTTAGRRELNRRAHGVNATTATDDETNRLTDRTSSPIEPYNSPSTSSYTPSVQSSPSTISLNTESHLPALNVAREANAFLPASTKAGKPRVRMRWSKEVNSFIMRTYYYITNLETDMTTYRQKMHELFTQEYPGITVTEQRISDQRRTIVKNKLLTEDELNRLKEEARIQLQQHDVTTPLPRNPSHSEFHSQTESFTIPNTQNTHTSDMSTQTESVTIILENEVNTLNAQNPITETYIQEIYDKFSTTLLQYSGTDPLIRPRLPKIKYSPQLYNLIQIFNQNILNRFISEDTQLIDIHTLIYCTALVITEEVNPKQIENMQRTKTKQTNKPPWQQRLEKDIEKLRADCGRLTQYIYNNNRSNKVVKRVEEIFQNCIIHTKHDKNNRKPEEYLDTLKQKLALKVNRLRRYKKAQQRRNDNAIFTTNEKLFYRNLQKPHTPTNTVTDRNTDVPTKQDLEVFWSGIWEEQVSHNSKALWINDEKIEFSIIKEMEFVEVTETDIKNITAKLHNWKSPGIDKIHNFWYKKLTSLHKCIAKNLTHVVLGQQKIPEFMTIGITYMLPKTKHSPQPSQYRPITCLPTIYKILTSAITNKINTHIEQHNIIAEEQKGCRRAHMGCKEQLVIDSTIHKHAATKNRNLHCTYIDYQKAFDSIPHSWLIQILEIYKINPKIIDFLRKIMSYWKTTLHLNYGQNTIVTRQIQIKKGIYQGDSLSPLWFCLALNPLSHLLHRCRVGYPLKSIEETIISHLIYMNDIKLYAKSDKDMKKLIEVTKEFSTDINMQFGLDKCKTIHIIKGKIKPGNYAITSSDTITAMEPTDLYKYLGYNQLKGLDHTSIKHTLTIEYKRRINVICKTQLSGKNLIKAINTYAIPILTYSFGIIKWTKTDIEQIERNTRTILTKHNNLHPKSAIERLTLKRQNGGRGLMDIYNLWQKQINTLKTFFHLKSRTSVIHKAIVVNDINYTPLNLNEQGYHMNDCIDDPQKQKLENWKKKVLHGRHPHDLEQPHINTIASNKWLKIGNLFPETEGFIIAIQDQIINTKNYRKYIIKDPSITNDKCRKCHIQPETIQHITGACITLTQTDYTHRHNQVSNIVHQKLALKHKLIQNTKTPYYKYTPQTILENATHKMYYDRGILTDKTIHYNRPDITLQDKINKVTYLIDIAVPNTHNLQKTIAEKINKYNELKEEVTRIWKQEKVYIIPIVISTTGVVPNHLLHSLKLLDLNESLYIPIQKAAILNTCRIVRKFMQLEETDTT

SEQ ID NO: 21609 - protein, 1299 aa, Vanessa cardui
METRSKKKRIGPLPGGDRRGTPGAGAGCDSMRTVSGEELSRRASPDKFHTTAGRRELNRRAHGVDATAATDDEINRLTDRTSSPIEPYNSPSTSSYTPSVQSSPSTISLNTEPHLPALNVAREANAFLPASTKAGKPRVRMRWSKEVNSFIMRTYYYITNLETDMTTYRQKMHELFTQKYPGITVTEQRISDQRRTIVKNKLLTEDELNRLKEEARIQLQQHDVTTPLPRNPSHSEFHSQIEYFTLPNTQNTHTSDMSTQTESVTIILENEVNTLNAQNPITETYIQEIYNKFSTTLLQYSGTDPLIRPRLPKIKYSKQLYNLIQIFNENILNRFISEDTQLIDIHTIIYCTALVITEEVNPKQIKNMQRTKTKQTNKPPWQQRLERDIEKLRADCGRLTQYIYNNNRSNKVVKRVEEIFQNCNIHTKHDRNNKKPEEYLDTLKQKLALKVNRLRRYKKAEQRRNDNAIFTTNEKLFYRNLQKPHTPTNTVTDRNTNVPTKQDLEVFWSGIWEEQVSHNSKASWINDEKIEFSIIEEMEFVEVTETDITNITAKLHNWKSPGIDKIHNFWYKKLTSLHKCIAKNLTHIVLGQQKIPEFMTIGITYMLPKTKHSPQPSQYRPITCLPTIYKILTSVITNKISTHIEQHNIIAEEQKGCRRAHMGCKEQLVIDSTIHKHAATKNRNLHCTYIDYQKAFDSIPHSWLIEILEIYKINPKIIDFLRKIMSYWKTTLHLNYGQNTIVTRQIQIKKGIYQGDSLSPLWFCLALNPLSHLLHRCRVGYSLKSIEETIISHLIYMDDIKLYAKSDKDMKKLIEVTKEFSTDINMQFGLDKCKTIHIIKGKIKPGNYAITSSDTITAMEPTDLYKYLGYNQLKGLDHTSIKHTLTIEYKRRINVICKTQLSGKNLIKAINTYAIPILTYSFGIIKWTKTDIEQIERNTRTILTKHNNLHPKSAIERLTLKRQNGGRGLIDIYNLWQKQINTLKTFFHLKSRTSDIHKAIVVNDNNYTPLNLSEQGYHMNDCIDDPQKQKLENWKKKVLHGRHPHDLEQPHINTIASNKWLKIGNLFPETEGFIIAIQDQIINTKNYKKYIIKDPTITNDKCRKCHIQPETIQHITGACITLTQTDYTHRHNQVSNIVHQKLALKHKLIQNTKTPYYKYTPQTILENATHKIYYDRGILTDKTIHYNRPDITLQDKINKVTYLIDIAVPNTHNLQKTIAEKINKYNELKEEVTRIWKQEKVYIIPIVISTTGVVPNHLLHSLKLLDLNESLYIPIQKAAILNTCRIVRKFMQLEESDTT

SEQ ID NO: 21610 - protein, 1299 aa, Vanessa atalanta
METRSKKKRIGPLPGGDRRGTPGAGAGCDSMRTVSGEELSRRASPDKIHTTAGRRELNRRAHGVNATAATDDETNRLTDRTSSPIEPYNSPSTSSYTPSVQSSPSTISLNTEPHLPALNVAREANAFLPASTKAGKPRVRMRWSKEVNSFIMRTYYYITNLETDMTTYRQKMHELFTQEHPGITVTEQRISDQRRTIVKNKLLTEDELNRLKEEARIQLQQHDVTTPLPRNPSHSEFHSQTESFTIPNTQNTHTSDMSTQTESVTIILENEVNTLNAKNPITETYIQEIYDKFSTTLLQYSGTDPLIRPRLPKIKYSPQLYNLIQIFNQNILNRFISEDTQLIDIHTLIYCTALVITEEVNPKQIENMQRTKTKQTNKPPWQQRLEKDIEKLRADCGRLTQYIYNNNRSNKVVKRVEEIFQNCIIHTKHDKNNRKPEQYLDTLKQKLALKVNRLRRYKKAQQRRNDNAIFTTNEKLFYRNLQKPHTPTNTVTDRNTDVPTKQDLEVFWSGIWEEQVSHNSKALWINDEKIEFSIIKEMEFVEVTETDIKNITAKLHNWKSPGIDKIHNFWYKKLTSLHKCIAKNLTHVVLGQQKIPEFMTIGITYMLPKTKHSPQPSQYRPITCLPTIYKILTSAITNKINTHIEQHNIIAEEQKGCRRAHMGCKEQLVIDSTIHKHAATKNRNLHCTYIDYQKAFDSIPHSWLIQILEIYKINPKIIDFLRKIMSYWKTTLHLNYGQNTIVTRQIQIKKGIYQGDSLSPLWFCLALNPLSHLLHRCRVGYPLKSIEETIISHLIYMDDIKLYAKSDKDMKKLIEVTKEFSTDINMQFGLDKCKTIHLIKGKIKPGNYAITSSDTITAMEPTDLYKNLGYNQLKGLDHTSIKHTLTIEYKRRINVICKTQLSGKNLIKAINTYAIPILTYSFGIIKWTKTDIEQIERNTRTILTKHNNLHPKSAIERLTLKRQNGGRGLIDIYNLWQKQINTLKTFFHLKSRTSDIHKAIVVNDINYTPLNLNEQGYQMNDCIDDPQKQKLENWKKKVLHGRHPHDLEQPHINTIASNKWLKIGNLFPETEGFIIAIQDQIINTKNYRKYIIKDPSITNDKCRKCHIQPETIQHITGACITLTQTDYTHRHNQVSNIVHQKLALKHKLIQNTKTPYYKYIPQTILENATHKMYYDRGILTDKTIHYNRPDITLQDKINKVTYLIDIAVPNTHNLQKTIAEKINKYNELKEEVTRIWKQEKVYIIPIVISTTGVPPIHLLHSLKLLDLNESLYIPIQKAAILNTCRIVRKFMQLEETDTT

SEQ ID NO: 21611 - protein, 1299 aa, Vanessa atalanta
METRSKKKRIGPLPGGDRRGTPGAGAGCDSMRTVSGEELSRRASPDKFHTTAGRRELNRRAHGVNATAATDDETNRLTDRTSSPIEPYNSPSTSSYTPSVQSSPSTISLNTEPHLPALNVAREANAFLPASTKAGKPRVRMRWSKEVNSFIMRTYYYITNLETDMTTYRQKMHELFTQEYPGITVTEQRISDQRRTIVKNKLLTEDELNRLKEEARIQLQQHDVTTPLPRNPSHSEFHSQTESFTIPNTQNTHTSDMSTQTESVTIILENEVNTLNAKNPITETYIQEIYDKFSTTLLQYSGTDPLIRPRLPKIKYSPQLYNLIQIFNQNILNRFISEDTQLIDIHTLIYCTALVITEEVNPKQIENMQRTKTKRTNKPPWQQRLEKDIEKLRADCGRLTQYIYNNNRSNKVVKRVEEIFQNCIIHTKHNKNNRKPEEYLDTLKQKLALKVNRLRRYKKAQQRRNDNAIFTTNEKLFYRNLQKPHTPTNTVTDRNTDVPTKQDLEVFWSGIWEEQVSHNSKALWINDEKIEFSIIKEMEFVEVTETDIKNITAKLHNWKSPGIDKIHNFWYKKLTSLHKCIAKNLTHVVLGQQKIPEFMTIGITYMLPKTKHSPQPSQYRPITCLPTIYKILTSAITNKINTHIEQHNIIAEEQKGCRRAHMGCKEQLVIDSTIHKHAATKNRNLHCTYIDYQKAFDSIPHSWLIQILEIYKINPKIIDFLRKIMSYWKTTLHLNYGQNTIVTRQIQIKKGIYQGDSLSPLWFCLALNPLSHLLHRCRVGYPLKSIEETIISHLIYMDDIKLYAKSDKDMKKLIEVTKEFSTDINMQFGLDKCKTIHLIKGKIKPGNYAITSSDTITAMEPTDLYKYLGYNQLKGLDHTSIKHTLTIEYKRRINVICKTQLSGKNLIKAINTYAIPILTYSFGIIKWTKTDIEQIERNTRTILTKHNNLHPKSAIERLTLKRQNGGRGLIDIYNLWQKQINTLKTFFHLKSRTSDIHKAIVVNDINYTPLNLNEQGYHMNDCIDDPQKQKLENWKKKVLHGRHPHDLEQPHINTIASNKWLKIGNLFPETEGFIIAIQDQIINTKNYRKYIIKDPSITNDKCRKCHIQPETIQHITGACITLTQTDYTHRHNQVSNIVHQKLALKHKLIQNTKTPYYKYIPQTILENATHKMYYDRGILTDKTIHYNRPDITLQDKINKVTYLIDIAVPNTHNLQKTIAEKINKYNELKEEVTRIWKQEKVYIIPIVISTTGVVPNHLLHSLKLLDLNESLYIPIQKAAILNTCRIVRKFMQLEETDTT

SEQ ID NO: 21612 - protein, 1299 aa, Vanessa atalanta
METRSKKKRIGPLPGGDRRGTPGAGAGCDSMRTVSGEELSRRASPDKFHTTAGRRELNRRAHGVNATAATDDETNRLTDRTSSPIEPYYSPSTSSYTPSVQSSPSTISLNTESHLPALNVAREANAFLPASTKAGKPRVRMRWSKEVNSFIMRTYYYITNLETDMTTYRQKMHELFTQEYPGITVTEQRISDQRRTIVKNKLLTEDELNRLKEEARIQLQQHDVTTPLPRNPSHSEFYSQTESFTIPNTQNTHTSDMSTQTESVTIILENEVNTLNAQNPITETYIQEIYDKFSTTLLQYSGTDPLIRPRLHKIKYSPQLYNLIQIFNQNILNRFISEDTQLIDIHTLIYCTALVITEEVNPKQIENMQRTKTKQTNKPPWQQRLEKDIEKLRADCGRLTQYIYNNNRSNKVVKRVEEIFQNCIIHTKHDKNNRKPEEYLDTLKQKLALKVNRLRRYKKAQQRRNDNTIFTTNEKLFYRNLQKPHTPTNTVTDRNTDVPTKQDLEVFWSGIWEEQVSHNSKALWINDEKIEFSIIKEMEFVEVTETDIKNITAKLHNWKSPGIDKIHNFWYKKLTSLHKCIAKNLTHIVLGQQKIPEFMTIGITYMLPKTKHSPQPSQYRPITCLPTIYKILTSAITNKINTHIEQHNIIAEEQKGCRRAHMGCKEQLVIDSTIHKHAATKNRNLHCTYIDYQKAFDSIPHSWLIQILEIYKINPKIIDFLRKIMSYWKTTLHLNYGQNTIVTRQIQIKKGIYQGDSLSPLWFCLALNPLSHLLHRCRVGYPLKSIEETIISHLIYMDDIKLYAKSDKDMKKLIEVTKEFSTDINMQFGLDKCKTIHIIKGKIKPGNYAITSSDTITAMEPTDLYKYLGYNQLKGLDHTSIKHTLTIEYKRRINVICKTQLSGKNVIKAINTYAIPILTYSFGIIKWTKTDIEQIERNTRTILTKHNNLHPKSAIERLTLKRQNGGRGLIDIYNLWQKQINTLKTFFHLKSRTSDIHKAIVVNDINYTPLNLNEQGYHMNDCIDDPQKQKLENWKKKVLHGRHPHDLEQPHINTIASNKWLKIGNLFPETEGFIIAIQDQIINTKNYRKYIIKDPTITNDKCRKCHIQPETIQHITGACITLTQTDYTHRHNQVSNIVHQKLALKHKLIQNTKTPYYKYTPQTILENATHKMYYDRGILTDKTIHYNRPDITLQDKINKVTYLIDIAVPNTHNLQKTIAEKINKYNELKEEVTRIWKQEKVYIIPIVISTTGVVPNHLLHSLKLLDLNESLYIPIQKAAILNTCRIVRKFMQLEETDIT

SEQ ID NO: 21613 - protein, 763 aa, Junonia oenone
MEFAEVTETDITNITARLHNWKSPGIDKIHNFWYKKLTSLHKSIAKNLTHIILGQQRIPEFMTIGITYMLPKTKHSPQPSQYRPITCLPTIYKILTSAITTKINSHIQQHNIIAEEQKGCRRAHMGCKEQLIIDSTIHKHAATKNRNLHCTYIDYKKAFDSIPHSWLIQVLEIYKINSKIIDFLRKIMPYWKTTLHLNYGPNTIATRQIQIKKGIYQGDSLSPLWFCLALNPLSRLLHNCRVGYSFKGTDETVISHLIYMDDIKLYAKTDKDMKKLIEVTKEFSSDINMQFGLDKCKTIHIIKGKIKPGDYTINNSDAITAMEPTDLYKYLGYKQLKGLDHTSIKQTLTIEYKRRLNAICKTQLSGKHLIKAINTYAVPILTYSFGIIKWTRTDIEQIERSTRTTLAKHNNLHPKSAIERLTLKRQDGGRGLIDINNLWQKQITTLKTFFHTKSCTSDIHKAIAVNDVNYTPLNLNEQECTRNECNVDPQKQKLENWKKKVLHGRHPHDLEQPHINTIASNKWLKIGNLFPETEGFIIAIQDQVINTKNYKKYIIKDPTISNDKCRKCHIQPETIQHITGACVTLTQTDYTYRHNQVSNIIHQKLALKHKLIENTKTPYYKYTPQTILENSTHKIYYDRAILTDKTIHYNRPDITLQDKINKVTYLIDVAVPNTHNIQKTITEKINKYNELKEEVMRIWKQEKVYIIPIVISTTGVVPNHLLRSLRLLDLSESLYIPIQKAAILNTCRIVRKFMQLEENNTGT

SEQ ID NO: 21614 - protein, 1365 aa, Junonia neildi
MVLISLGIRNSNNNNNSSNNNNNNNNNKPPETQPHVLIDHLITWGADTRYLNYWRGKRGNGNPFSMETRSKKKRIGPLPGGDRRGTPGAGAGCDSMRAVSGEELSRRASPDKFHTTADRRELNRRAHGVNATAANDDEINRLTDRTSSPTEPYNSPSTSSYTPSVQSSPSTISLNTEPHLPALNVAREANAFLPASTKAGKPRVRMRWSKEVNSFIMRTYYYITNLETDMTTYRRKLHELFTHEYPEITVTEQRISDQRRTIVRNKLLTEEELNRLKEEARIQLEQHDITTPSPQNPSHSEFHSQTESFSLPNTQNTHTSDMSTQTESVTIILENEVNTLNVQNPITETYIQEIYDKFSTTLIHYSGTDPIIRPKLPKIKYSPQLSNLIQIFNQNILNRFISEDTQLIDIHTLIYCTALIITEEVKPKKIENIQRTKTKQTNKPPWQQRLEKDIEKLRADCDRLTQYIYNNNRSNKVVKRVEEIFRNSIIHTKHDRNNTKPEEYLDTFKQKLALKVNRLRRYKKAQQRRNDNTTFTTNEKLFYRNLQKPHTPTNTITVSNTNVPTKQDLEVFWSGIWEEQVSHNSKASWINDEKLEFSILEEMEFVEVTETDITNITAKLHNWKSPGIDKIHNFWYKKLTSLHKCIAKNLTHIILGQQNIPEFMTIGITYMLPKTKHSPQPSQYRPITCLPTIYKILTSAITKKINTHIEQHNIIVEEQKGCRRAHMGCKEQLVIDSTIHKHAATKNRNLHCTYIDYQKAFDSIPHSWLIQILEIYKINSKIIYFLRKIMTYWKTTLHLNYGQNTIVTRQIQIKKGIYQGDSLSPLWFCLALNPLSHLLHRCRVGYPLKSTEETIISHLIYMDDIKLYAKSDKDMKKLIEVTKEFSSDINMQFGLDKCKTIHIIKGKIKPGNYAITSSDTITAMEPTDLYKYLGYNQLKGLDRTSIKHTLTIEYKRRINVICKTQLSGKNLIKAINTYAIPILTYSFGIIKWTKTDIEQIERNTRTILTKHNNLHPKSAIERLTLKRQNGGRGLIDIHNLWQKQINTLKTFFHLKSHTSKIHKAIVVNDINYTPLNLSEQGYTGNDSIDDPQKQKLENWKKKVLHGRHPHDLEQPHINTIASNKWLKIGNLFPETEGFIIAIQDQIINTKNYKKYIIKDPTITNDKCRKCHIQPETIQHITGACVTLTQTDYTHRHNQVSNIIHQKLALKHKLIQNTKTPYYKYTPQTILENATHKMYYDRGILTDKTIHYNRPDITLQDKINKVTYLIDIAVPNTHNLQKTIAEKINKYNELKEEVTRIWKQEKVYIIPIVISTTGVVPNHLLHSLRLLDLNESLYIPIQKAAILNTCRIVRKFMQLEENDTTT

SEQ ID NO: 21615 - protein, 927 aa, Junonia coenia
MQTNKPPWQQRLEKDVEKLRADCGRLTQYIYNNNRSNKVVKRVEEIFRNSIIHTKHDRNNTKPEEYLDTFKQKLALKVHRLRRYKKAQQRRNDNTTFTTNEKLFYRNLQKPHTPTNTITDSNTNVPTKQDLEEFWSGIWEEQVSHNSKASWINDEKLEFSLLEEMEFVEVTETDITNITAKLHNWKSPGIDKIHNFWYKKLTSLHKCIAKNLTHIILGQQNIPEFMTIGITYMLPKTEHSPQPSQYRPITCLPTIYKILTSAITKKINTHIEQHNTIVEEQKGCRRAHMGCKEQLVIDSTIHKHAATKNRNLHCTYIDYQKAFDSIPHSWLIQILEIYKINSKIIDFLRKIMTYWKTTLHLNYGQNTIVTRQIQIKKGIYQGDSLSPLWFCLALNPLSHLLHRCRVGYPLKSTEETIISHLIYMDDIKLYAKSDKDMKTLIEVTKEFSSDINMQFGLDKCKTIHIIKGKIKPGNYAITSSDTITAMEPTDFYKYLGYNQLKGLDHKSIKHTLTIEYKRRINVICKTQLSGKNLIKAINTYAIPVLTYSFGIIKWTKTDIEQIERNTRTILTKHNNLHPKSAIERLTLKRQNGGRGLIDIHNLWQKQINTLKTFFHLKSHTSNIHKAIVVNDINYTPLNLSEQGYTKNDCIDDPQKQKLENWKKKVLHGRHPHDLEQPHINTIASNTWLKIGNLFPETEGFIIAIQDQIINTKNYKKYIIKDPTITNDKCRKCHIQPETIQHITGACITLTQTDYTHRHNQVSNIIHQKLALKHKLIQNTKTPYYKYTPQTILENATHKMYYDRGILTDKTIHYNRPDITLQDKINKVTYLIDIAVPNTHNLQKTIAEKINKYNELKEEVTRIWKQEKVYIIPIVISTTGVVPNHLLHSLRLLDLNESLYIPIQKAAILNTCRIVRKFMQLEENDTTT

SEQ ID NO: 21616 - protein, 1147 aa, Junonia stemosa
MRWSKEVNSFIMRTYYYITNLETDMTTYRQKLHELFTLEYPEITVTEQRISDQRRTIVRNKLLTEEELNRLKEEARIQLEQHDITPLSQNPSHSEFHSQTESFSLPNTQNTHTSDMSTQTESVTIMLENEVNTLNVQNPITETYIQEIYDKFSTTLIQYAGTDPLIRPKLPKIKYSPQLSNLIQIFNQNILNRFISEDTQLIDIHTLIYCTALIITEEVKPKKIENIQRTKSMQTNKPPWQQRLEKDVEKLRADCGRLTQYIYNNNRSNKVVKRVEEIFRNSIIHTKHDRNNTKPEEYLDTFKQKLALKVHRLRRYKKAQQRRNDNTTFTTNEKLFYRNLQKPHTPTNTITDSNTNVPTKQDLEEFWSGIWEEQVSHNSKASWINDEKLEFSLLEEMEFVEVTETDITNITAKLHNWKSPGIDKIHNFWYKKLTSLHKCIAKNLTHIILGQQNIPEFMTIGITYMLPKTEHSPQPSQYRPITCLPTIYKILTSAITKKINTHIEQHNIIVEEQKGCRRAHMGCKEQLVIDSTIHKHAATKNRNLHCTYIDYQKAFDSIPHSWLIQILEIYKINSKIIDFLRKIMTYWKTTLHLNYGQNTIVTRQIQIKKGIYQGDSLSPLWFCLALNPLSHLLHRCRVGYPLKSTEETIISHLIYMDDIKLYAKSDKDMKTLIEVTKEFSSDINMQFGLDKCKTIHIIKGKIKPGNYAITSSDTITAMEPTDFYKYLGYNQLKGLDHKSIKHTLTIEYKRRINVICKTQLSGKNLIKAINTYAIPVLTYSFGIIKWTKTDIEQIERNTRTILTKHNNLHPKSAIERLTLKRQNGGRGLIDIHNLWQKQINTLKTFFHLKSHTSNIHKAIVVNDINYTPLNLSEQGYTKNDCIDDPQKQKLENWKKKVLHGRHPHDLEQPHINTIASNTWLKIGNLFPETEGFIIAIQDQIINTKNYKKYIIKDPTITNDKCRKCHIQPETIQHITGACITLTQTDYTHRHNQVSNIIHQKLALKHKLIQNTKTPYYKYTPQTILENATHKMYYDRGILTDKTIHYNRPDITLQDKINKVTYLIDIAVPNTHNLQKTIAEKINKYNELKEEVTRIWKQEKVYIIPIVISTTGVVPNHLLHSLRLLDLNESLYIPIQKAAILNTSILIL

SEQ ID NO: 21617 - protein, 1299 aa, Vanessa atalanta
METRSKKKRIGPLPGGDRRGTLGAGAGCDSMRTVSGEELSRRASPDKFHTTAGRRELNRRAHGVNATAATDDETNRLTDRTSSPIEPYNSPSTSSYTPSVQSSPSTISLNTESHLPALNVAREANAFLPASTKAGKPRVRMRWSKEVNSFIMRTYYYITNLETDMTTYRQKMHELFTQEYPGITVTEQRISDQRRTIVKNKLLTEDELNRLKEEARIQLQQHDVTTPLPRNPSHSEFHSQTESFTIPNTQNTHTSDMSTQTESVTIILENEVNTLNAQNPITETYIQEIYDKFSTTLLQYSGTDPLIRPRLRKIKYSPQLYNLIQIFNQNILNRFISEDTQLIDIHTLIYCTALVITEEVNPKQIENMQRTKTKQTNKPPWQQRLEKDIEKLRADCGRLTQYIYNNNRSNKVVKRVEEIFQNCIIHTKHDKNNRKPEEYLDTLKQKLALKVNRLRRYKKAQQRRNDNAIFTTNEKLFYRNLQKPHTPTNTVTDRNTDVPTKQDLEVFWSGIWEEQVSHNSKALWINDEKIEFSIIKEMEFVEVTETDIKNITAKLHNWKSPGIDKIHNFWYKKLTSLHKCIAKNLTHVVLGQQKIPEFMTIGITYMLPKTKHSPQPSQYRPITCLPTIYKILTSAITNKINTHIEQHNIIAEEQKGCRRAHMGCKEQLVIDSTIHKHAATKNRNLHCTYIDYQKAFDSIPHSWLIQILEIYKINPKIIDFLRKIMSYWKTTLHLNYGQNTIVTRQIQIKKGIYQGDSLSPLWFCLALNPLSHLLHRCRVGYPLKSIEETIISHLIYMDDIKLYAKSDKDMKKLIEVTKEFSTDINMQFGLDKCKTIHIIKGKIKPGNYAITSSDTITAMEPTDLYKYLGYNQLKGLDHTSIKHTLTIEYKRRINVICKTQLSGKNLIKAINTYAIPILTYSFGIIKWTKTDIEQIERNTRTILTKHNNLHPKSAIERLTLKRQNGGRGLIDIYNLWQKQINTLKTFFHLKSRTSDIHKAIVVNDINYTPLNLNEQGYHMNDCIDDPQKQKLENWKKKVLHGRHPHDLEQPHINTIASNKWLKIGNLFPETEGFIIAIQDQIINTKNYRKYIIKDPSITNDKCRKCHIQPETIQHITGACITLTQRDYTHRHNQVSNIVHQKLALKHKLIQNTKTPYYKYTPQTILENATHKMYYDRGILTDKTIHYNRPDITLQDKINKVTYLIDIAVPNTHNLQKTIAEKINKYNELKEEVTRIWKQEKVYIIPIVISTTGVVPNHLLHSLKLLDLNESLYIPIQKAAILNTCRIVRKFMQLEETDTT

SEQ ID NO: 21618 - protein, 1305 aa, Vanessa atalanta
METRSKKKRIGPLPGGDRRGTPGAGAGCDSMWTVSGEELSRRASPDKFHTTAGRRELNRRAHGVNATAATDDEINRLTDRTSSPIEPYNSPSTSSYTPSVQSSPSTISLNTEPHLPALNVAREANAFLPASTKAGKPRVRMRWSKEVNSFIMRTYYYITNLETDMTTYRQKMHELFTQEYPGITVTEQRISDQRRTIVKNKLLTEDELNRLKEEARIQLQQHDVTTPLPRNPSHSEFHSQTESFTIPNTQNTHTSDMSTQTESVTIILENEVNTLNAQNPITETYIQEIYDKFSTTLLQYSGTDPLIRPRLPKIKYSPQLYNLIQIFNQNILNRFISEDTQLIDIHTLIYCTALVITEEVNPKQIENMQRTKTKQTNKPPWQQRLEKDIEKLRADCGRLTQYIYNNNRSNKVVKRKEKKKRVEEILQNCIIHTKHDKNNRKPEEYLDTLKQKLALKVNRLRRYKKAQQRRNDNAIFTTNEKLFYRNLQKPHTPTNTVTDRNTDVPTKQDLEVFWSGIWEEQVSHNSKALWINDEKIEFSIIKEMEFVEVTETDIKNITAKLHNWKSPGIDKIHNFWYKKLTSLHKCIAKNLTHVVLGQQKIPEFMTIGITYMLPKTKHSPQPSQYRPITCLPTIYKILTSAITNKINTHIEQHNIIAEEQKGCRRAHMGCKEQLVIDSTIHKHAATKNRNLHCTYIDYQKAFDSIPHSWLIQILEIYKINPKIIDFLRKIMSYWKTTLHLNYGQNTIVTRQIQIKKGIYQGDSLSPLWFCLALNPLSHLLHRCRVGYPLKSIEETIISHLIYMDDIKLYAKSDKDMKKLIEVTKEFSTDINMQFGLDKCKTIHIIKGKIKPGNYAITSSDTITAMEPTDLYKYLGYNQLKGLDHTSIKHTLTIEYKRRINVICKTQLSGKNLIKAINTYAIPILTYSFGIIKWTKTDIEQIERNTRTILTKHNNLHPKSAIERLTLKRQNGGRGLIDIYNLWQKQINTLKTFFHLKSRTSDIHKAIVVNDINYPPLNLNEQGYHMNDCIDDPQKQKLENWKKKVLHGRHPHDLEQPHINTIASNKWLKIGNLFPETEGFIIAIQDQIINTKNYRKYIIKDPTITNDKCRKCHIQPETIQHITGACITLTQTDYTHRHNQVSNIVHQKLALKHKLIQNTKTPYYKYTPQTILENATHKMYYDRGILTDKTIHYNRPDITLQDKINKVTYLIDIAVPNTHNLQKTIAEKINKYNELKEEVTRIWKQEKVYIIPIVISTTGVVPNHLLHSLKLLDLNESLYIPIQKAAILNTCRIVRKFMQLEETDTT

SEQ ID NO: 21619 - protein, 1159 aa, Junonia neildi
MRWSKEVNSFIMRTYYYITNLETDMTTYRQKLHELFTHEYPEITVTEQRISDQRRTIVRNKLLTEEELNRLKEEARIQLEQHDITPLSQNPSHSEFHSQTESFSLPNTQNTHTSDMSTQTESVTIMLENEVNTLNVQNPITETYIQEIYDKFSTTLIQYAGTDPLIRPKLPKIKYSPQLSNLIQIFNQNILNRFISEDTQLIDIHTLIYCTALIITEEVKPKKIENIQRTKSMQTNKPPWQQRLEKDVEKLRADCGRLTQYIYNNNRSNKVVKRVEEIFRNSIIHTKHDRNNTKPEEYLDTFKQKLALKVHRLRRYKKAQQRRNDNTTFTTNEKLFYRNLQKPHTPTNTITDSNTNVPTKQDLEEFWSGIWEEQVSHNSKASWINDEKLEFSLLEEMEFVEVTETDITNITAKLHNWKSPGIDKIHNFWYKKLTSLHKCIAKNLTHIILGQQNIPEFMTIGITYMLPKTEHSPQPSQYRPITCLPTIYKILTSAITKKINTHIEQHNIIVEEQKGCRRAHMGCKEQLVIDSTIHKHAATKNRNLHCTYIDYQKAFDSIPHSWLIQILEIYKINSKIIDFLRKIMTYWKTTLHLNYGQNTIVTRQIQIKKGIYQGDSLSPLWFCLALNPLSHLLHRCRVGYPLKSTEETIISHLIYMDDIKLYAKSDKDMKTLIEVTKEFSSDINMQFGLDKCKTIHIIKGKIKPGNYAITSSDTITAMEPTDFYKYLGYNQLKGLDHKSIKHTLTIEYKRRINVICKTQLSGKNLIKAINTYAIPVLTYSFGIIKWTKTDIEQIERNTRTILTKHNNLHPKSAIERLTLKRQNGGRGLIDIHNLWQKQINTLKTFFHLKSHTSNIHKAIVVNDINYTPLNLSEQGYTKNDCIDDPQKQKLENWKKKVLHGRHPHDLEQPHINTIASNTWLKIGNLFPETEGFIIAIQDQIINTKNYKKYIIKDPTITNDKCRKCHIQPKTIQHITGACITLTQTDYTHRHNQVSNIIHQKLALKHKLIQNTKTPYYKYTPQTILENATHKMYYDRGILTDKTIHYNRPDITLQDKINKVTYLIDIAVPNTHNLQKTIAEKINKYNELKEEVTRIWKQEKVYIIPIVISTTGVVPNHLLHSLRLLDLNESLYIPIQKAAILNTCRIVRKFMQLEENDTTT

SEQ ID NO: 21620 - protein, 1166 aa, Junonia neildi
MRWSKEVNSFIMRTYYFITNLETDMTTYRQKLHELFTQEYPGIIVTEQRISDQRRTIIRNKLLTEEELNRLKEEARIQLQQYAITTPLPQNPHSDSPQSHLESHSQTEYYTLAITQNTHTSDTSTQTEAVTIMIENEADTLNVQNPITETYIQEIYDKFSTTLIQYSGMDPVLRPKLSKLKYSPQLSNLIQIFNENILNKFISEDTQLIDIHTLIYCTALVITEELNLKKIENSRRTENRRNNKPPWQHRLEKDIEKLRADCGRLTQYIYNNNRSNKVVKTVEEIFRNSIIHTKHDRNNTKPEEYLDTLKQKLALKVNRLRRYKKAQQRRNDNVTFTTNEKLFYRNLQNPQTPTGTVTDSNTNVPAKEDLEVFWSGIWEEQVEHNSEAHWINEEKTEYSIIEEMEFAEVTETDITNITARLHNWKSPGIDKIHNFWYKKLTSLHKFIAKNLTRIILGQQRIPEFMTVGITYMLPKTKHSPQPSQYRPITCLPTIYKILTSAITTKINSHIQQYNIIAEEQKGCRQAHMGCKEQLVIDSTIHKHATTKNRNLHCTYIDYKKAFDSIPHSWLIQVLEIYKINSKIIDFLRKIMSYWKTTLHLNYGQNSIVTRQIKIQKGIYQGDSLSPLWFCLALNPLSRLLHNCRVGYSFKGTDKTVISHLIYMDDIKLYAKTDKDMKKLIEITKEFSSDINMQFGLEKCKTIHIIKGKIKPGDYTINNSDTITAMEPTDLYKYLGYKQLKGLDHTSIKQTLTTEYKRRLNAICKTQLSGKHLIKAINTYAVPILTYSFGIIKWTKTDIEQIERNTRTTLAKHNNLHPKSAIERLTLKRQDGGRGLIDINNLWQKQITTLKTFFHTKSRTSDIHKAIVVNDVNYTPLNLNEQECTRNHSNVDPQKQKLENWKKKVLHGRHPHDLEQPHINTIASNKWLKIGNLFPETEGFIIAIQDQVINTKNYKKYIIKDPNITNDKCRKCHIQPETIQHITGACVTLTQTDYTHRHNQVSNIIHQKLALKHKLIENTKTPYYKYTPQTILENSTHKIYYDRAILTDKTIHYNRPDITLQDKINKVTYLIDIAVPNTHNIQKTITEKINKYNELKEEVIRIWKQEKVYIIPIVISTTGVVPNQLLRSLRLLDLSESLYIPIQKAAILNTCRIVRKFMQLEENNITT

SEQ ID NO: 21621 - protein, 1299 aa, Vanessa atalanta
METRSKKKRIGPLPGGDRRGTPGAGAGCDSMRTVSGEELSRRASPDKFHTTAGRRELNRRAHGVNATAATDDETNRLTDRTSSPIEPYYSPSTSSYTPSVQSSPSTISLNTESHLPALNVVREANAFLPASTKAGKPRVRMRWSKEVNSFIMRTYYYITNLETDMTTYRQKMHELFTQEYPGITVTEQRISDQRRTIVKNKLLTEDELNRLKEEARIQLQQHDVTTPLPRNPSHSEFYSQTESFTIPNTQNTHTSDMSTQTESVTIILENEVNTLNAQNPITETYIQEIYDKFSTTLLQYSGTDPLIRPRLHKIKYSPQLYNLIQIFNQNILNRFISEDTQLIDIHTLIYCTALVITEEVNPKQIENMQRTKTKQTNKPPWQQRLEKDIEKLRANCGRLTQYIYNNNRSNKVVKRVEEIFQNCIIHTKHDKNNRKPEEYLDTLKQKLALKVNRLRRYKKAQQRRNDNAIFTTNEKLFYRNLQKPHTPTNTVTDRNTDVPTKQDLEVFWSGIWEEQVSHNSKALWINDEKIEFSIIKEMEFVEVTETDIKNITAKLHNWKSPGIDKIHNFWYKKLTSLHKCIAKNLTHIVLGQQKIPEFMTIGITYMLPKTKHSPQPSQYRPITCLPTIYKILTSAITNKINTHIEQHNIIAEEQKGCRRAHMGCKEQLVIDSTIHKHAATKNRNLHCTYIDYQKAFDSIPHSWLIQILEIYKINPKIIDFLRKIMSYWKTTLHLNYGQNTIVTRQIQIKKGIYQGDSLSPLWFCLALNPLSHLLHRCRVGYPLKSIEETIISHLIYMDDIKLYAKSDKDMKKLIEVTKEFSTDINMQFGLDKCKTIHIIKGKIKPGNYAITSSDTITAMEPTDLYKYLGYNQLKGLDHTSIKHTLTIEYKRRINVICKTQLSGKNVIKAINTYAIPILTYSFGIIKWTKTDIEQIERNTRTILTKHNNLHPKSAIERLTLKRQNGGRGLIDIYNLWQKQINTLKTFFHLKSRTSDIHKAIVVNDINYTPLNLNEQGYHMNDCIDDPQKQKLENWKKKVLHGRHPHDLEQPHINTIASNKWLKIGNLFPETEGFIIAIQDQIINTKNYRKYIIKDPTITNDKCRKCHIQPETIQHITGACITLTQTDYTHRHNQVSNIVHQKLALKHKLIQNTKTPYYKYTPQTILENATHKMYYDRGILTDKTIHYNRPDITLQDKINKVTYLIDIAVPNTHNLQKTIAEKINKYNELKEEVTRIWKQEKVYIIPIVISTTGVVPNHLLHSLKLLDLNESLYIPIQKAAILNTCRIVRKFMQLEETDTT

SEQ ID NO: 21622 - protein, 1306 aa, Junonia evarete
METRSKKKRIGPLPGGDRRGTPGAGAGCDSMRAVSGEELSRRASPDKFHTTADRRELNRRAYGVNATAATDDEINRLTDRTSRPIEPYNSPSTSSYTPSIQSSPSTISLNTEPHLPALNVAREANAFLPASTKAGKPRVRMRWSKEVNSFIMRTYYFITNLETDMTTYRQKLHELFTQEYPGIIVTEQRISDQRRTIIRNKLLTEEELNRLKEEARIQLQQYAITTPLPQNPHSDSPQSHSESHSQTEYYTLAITQNTHTSDTSTQTESVTIMIENEADTLNVQNPITETYIQEIYDKFSTTLIQYSGMDPVLRPKLSKLKYSPQLSNLIQIFNENILNKFISEDTQLIDIHTLIYCTALVITEELNLKKIENSRRTENRRNNKPPWQHRLEKDIEKLRADCGRLTQYIYNNNRSNKVVKTVEEIFRNSIIHTKHDRNNRKPEEYLDTLKQKLALKVNRLRRYKKAQQRRNDNVTFTTNEKLFYRNLQNPQTPTGTVTDSNTNVPTKEDLEVFWSGIWEEQVEHNSEAHWINEEKTEYSIIEEMEFAEVTETDITNITARLHNWKSPGIDKIHNFWYKKLTSLHKFIAKNLTRIILGQQRIPEFMTVGITYMLPKTKHSPQPSQYRPITCLPTIYKILTSAITTKINSHIQQYNIIAEEQKGCRQAHMGCKEQLVIDSTIHKHATTKNRNLHCTYIDYKKAFDSIPHSWLIQVLEIYKINSKIIDFLRKVMSYWKTTLHLNYGQNTIVTRQIKIQKGIYQGDSLSPLWFCLALNPLSRLLHNCRVGYSFKGTDKTVISHLIYMDDIKLYAKTDKDMKKLIEITKEFSSDINMQFGLEKCKTIHIIKGKIKPGDYTINNSDTITAMEPTDLYKYLGYKQLKGLDHTSIKQTLTIEYKRRLNAICKTQLSGKHLIKAINTYAVPILTYSFGIIKWTKTDIEQIERNTRTTLAKHNNLHPKSAIERLTLKRQDGGRGLIDINNLWQKQITTLKTFFHTKSRTSDIHKAIVVNDVNYTPLNLNEQECTRNHSNVDPQKQKLENWKKKVLHGRHPHDLEQPHINTIASNKWLKIGNLFPETEGFIIAIQDQVINTKNYKKYIIKDPNITNDKCRKCHIQPETIQHITGACVTLTQTDYTHRHNQVSNIIHQKLALKHKLIENTKTPYYKYTPQTILENSTHKIYYDRAILTDKTIHYNRPDITLQDKINKVTYLIDIAVPNTHNIQKTITEKINKYNELKEEVIRIWKQEKVYIIPIVISTTGVVPNHLLRSLRLLDLSESLYIPIQKAAILNTCRIVRKFMQLEENNITT

SEQ ID NO: 21623 - protein, 1306 aa, Junonia vestina
METRSKKKRIGPLPGGDRRGTPGAGAGCDSMRAVSGEELSRRASPDKFHTTADRRELNRRAHGVNATAATDDEINRLTDRTSSPIEPYNSPSTSSYTPSIQSSPSTISLNTEPHLPALNVAREANAFLPASTKAGKPRVRMRWSKEVNSFIMRTYYFITNLETDMTTYRQKLHELFTQEYPGIIVTEQRISDQRRTIIRNKLLTEEELNRLKEDARIQLQQYAITTPLPQNPHSNSPQSHSESHSQTEYYSLAITQNTHTSDTSTQTESVTIMIENEADTLNVQNPITETYIQEIYDKFSTTLIQYSGMDPVLRPKLSKLKYSPQLSNLIQIFNENILNKFISEDTQLIDIHTLIYCTALIITEELNLKKIENSRRTKNRRNNKPQWQQRLKKDIEKLRADCGRLTQYIYNNNRSNKVVKTVEEIFRNSIIHTKHDRNNRKPEEYLDTLKQKLALKVNRLRRYKKAQQRRNDNVTFTTNEKLFYRNLQNPQTPTGTVNDSNTNVPAKEDLEVFWSGIWEEQVEHNSEAHWINEEKTEFSIIEEMEFAEVTETDITNITARLHNWKSPGIDKIHNFWYKKLTSLHKSIAKNLTRIILGQQRIPEFMTVGITYMLPKTQHSPQPSQYRPITCLPTIYKILTSAITKKINSHIQQYNIIAEEQKGCRQAHMGCKEQLVIDSTIHKHATTKNRNLHCTYIDYKKAFDSIPHSWLIQVLEIYKINSKIIDFLRKIMSYWKTTLHLNYGQNTIVTRQIQIKKGIYQGDSLSPLWFCLALNPLSRLLHNCRVGYSFKGTDKTVISHLIYMDDIKLYAKTDKDMKKLIEVTKEFSSDINMQFGLEKCKTIHIIKGKIKPGNYTINNSDTITAMEPTDLYKYLGYKQLKGLDHTSIKQTLTIEYKRRLNTICKTQLSGKHLIKAINTYAVPILTYSFGIIKWTKTDIEQIERNTRTTLAKHNNLHPKSAIERLTLKRQDGGRGLIDINNLWQKQITTLKTFFHTKSRTSDIHKAIVVNDVNYTPLNLNEQECTRNHCNVDPQKQKLENWKKKVLHGRHPHDLEQPHINTIASNKWLKIGNLFPETEGFIIAIQDQVINTKNYKKYIIKDPNITNDKCRKCHIQPETIQHITGACVTLTQTDYTYRHNQVSNIIHQKLALKHKLIENTKTPYYKYTPQTILENSTHKIYYDRAILTDKTIHYNRPDITLQDKINKVTYLIDVAVPNTHNIQKTITEKINKYNELKEEVIRIWKQEKVYIIPIVISTTGVVPNHLLRSLRLLDLSESLYIPIQKAAILNTCRIVRKFMQLEENNITT

SEQ ID NO: 21624 - protein, 1299 aa, Vanessa atalanta
METRSKKKRIGPLPGGDRRGTPGAGAGCDSMRTVSGEELSRRASPDKFHTTAGRRELNRRAHGVNATAATDDETNRLTDRTSSPIEPYYSPSTSSYTPSVQSSPSTISLNTESHLPALNVAREANAFLPASTKAGKPRVRMRWSKEVNSFIMRTYYYITNLETDMTTYRQKMHELFTREYPGITVTEQRISDQRRTIVKNKLLTEDELNRLKEEARIQLQQHDVTTPLPRNPSHSEFHSQTESFTIPNTQNTHTSDMSTQTESVTIILENEVNTLNAQNPITETYIQEIYDKFSTTLLQYSGTDPLIRPRLHKIKYSPQLYNLIQIFNQNILNRFISEDTQLIDIHTLIYCTALVITEEVNPKQIENMQRTKTKQTNKPPWQQRLEKDIEKLRADCGRLTQYIYNNNRSNKVVKRVEEIFQNCIIHTKHDKNNRKPEEYLDTLKQKLALKVNRLRRYKKAQQRRNDNAIFTTNEKLFYRNLQKPHTPTNTVTDRNTDVPTKQDLEVFWSGIWEEQVSHNSKALWINDEKIEFSIIKEMEFVEVTETDIKNITAKLHNWKSPGIDKIHNFWYKKLTSLHKCIAKNLTHIVLGQQKIPEFMTIGITYMLPKTKHSPQPSQYRPITCLPTIYKILTSAITNKINTHIEQHNIIAEEQKGCRRAHMGCKEQLVIDSTIHKHAATKNRNLHCTYIDYQKAFDSIPHSWLIQILEIYKINPKIIDFLRKIMSYWKTTLHLNYGQNTIVTRQIQIKKGIYQGDSLSPLWFCLALNPLSHLLHRCRVGYPLKSIEETIISHLIYMDDIKLYAKSDKDMKKLIEVTKEFSTDINMQFGLDKCKTIHIIKGKIKPGNYAITSSDTITAMEPTDLYKYLGYNQLKGLDHTSIKHTLTIEYKRRINVICKTQLSGKNLIKAINTYAIPILTYSFGIIKWTKTDIEQIERNTRTILTKHNNLHPKSAIERLTLKRQNGGRGLIDIYNLWQKQINTLKTFFHLKSRTSDIHKAIVVNDINYTPLNLNEQGYHMNDCIDDPQKQKLENWKKKVLHGRHPHDLEQPHINTIASNKWLKIGNLFPETEGFIIAIQDQIINTKNYRKYIIKDPSITNDKCRKCHIQPETIQHITGACITLTQTDYTHRHNQVSNIVHQKLALKHKLIQNTKTPYYKYTPQTILENATHKMYYDRGILTDKTIHYNRPDITLQDKINKVTYLIDIAIPNTHNLQKTIAEKINKYNELKEEVTRIWKQEKVYIIPIVISTTGVVPNHLLHSLKLLDLNESLYIPIQKAAILNTCRIVRKFMQLEETDTT

SEQ ID NO: 21625 - protein, 763 aa, Junonia genoveva
MEFAEVTETDITNITARLHNWKSPGIDKIHNFWYKKLTSLHKFIAKNLTRIILGQQRIPEFMTVGITYMLPKTKHSPQPSQYRPITCLPTIYKILTSAITTKINSHIQQYNIIAEEQKGCRQAHMGCKEQLVIDSTIHKHATTKNRNLHCTYIDYKKAFDSIPHSWLIQVLEIYKINSKIIDFLRKIMSYWKTTLHLNYGQNSIVTRQIKIQKGIYQGDSLSPLWFCLALNPLSRLLHNCRVGYSFKGTDKTVISHLIYMDDIKLYAKTDKDMKKLIEITKEFSSDINMQFGLEKCKTIHIIKGKIKPGDYTINNSDTITAMEPTDLYKYLGYKQLKGLDHTSIKQTLTIEYKRRLNAICKTQLSGKHLIKAINTYAVPILTYSFGIIKWTKTDIEQIERNTRTTLAKHNNLHPKSAIERLTLKRQDGGRGLIDINNLWQKQITTLKTFFHTKSRTSDIHKAIVVNDVNYTPLNLNEQECTRNHSNVDPQKQKLENWKKKVLHGRHPHDLEQPHINTIASNKWLKIGNLFPETEGFIIAIQDQVINTKNYKKYIIKDPNITNDKCRKCHIQPETIQHITGACVTLTQTDYTHRHNQVSNIIHQKLALKHKLIENTKTPYYKYTPQTILENSTHKIYYDRAILTDKTIHYNRPDITLQDKINKVTYLIDIAVPNTHNIQKTITEKINKYNELKEEVIRIWKQEKVYIIPIVISTTGVVPNHLLRSLRLLDLSESLYIPIQKAAILNTCRIVRKFMQLEENNITT

SEQ ID NO: 21626 - protein, 1306 aa, Junonia stemosa
METRSKKKRIGPLPGGDRRGTPGAGAGCDSMRAVSGEELSRRASPDKFHTTADRRELNRRAYGVNATAATDDEINRLTDRTSSPIEPYNSPSTSSYTPSIQSSPSTISLNTEPHLPALNVAREANAFLPASTKAGKPRVRMRWSKEVNSFIMRTYYFITNLETDMTTYRQKLHELFTQEYPGIIVTEQRISDQRRTIIRNKLLTEEELNRLKEEARIQLQQYAITTPLPQNPHSDSPQSHSESHSQTEYYTLAITQNTHTSDTSTQTEAVTIMIENEADTLNVQNPITETYIQEIYDKFSTTLIQYSGMDPVLRPKLSKLKYSPQLSNLIQIFNENILNKFISEDTQLIDIHTLIYCTALVITEELNLKKIENSRRTENRRNNKPPWQHRLEKDIEKLRADCGRLTQYIYNNNRSNKVVKTVEEIFRNSIIHTKHDRNNTKPEEYLDTLKQKLALKVNRLRRYKKAQQRRNDNVTFTTNEKLFYRNLKNPQTPTGTVTDSNTKVPAKEDLEVFWSGIWEEQVEHNSEAHWINEEKTEYSIIEEMEFAEVTETDITNITARLHNWKSPGIDKIHNFWYKKLTSLHKFIAKNLTRIILGQQRIPEFMTVGITYMLPKTKHSPQPSQYRPITCLPTIYKILTSAITTKINSHIQQYNIIAEEQKGCRQAHMGCKEQLVIDSTIHKHATTKNRNLHCTYIDYKKAFDSIPHSWLIQVLEIYKINSKIIDFLRKIMSYWKTTLHLNYGQNSIVTRQIKIQKGIYQGDSLSPLWFCLALNPLSRLLHNCRVGYSFKGTDKTVISHLIYMDDIKLYAKTDKDMKKLIEITKEFSSDINMQFGLEKCKTIHIIKGKIKPGDYTINNSDTITAMEPTDLYKYLGYKQLKGLDHTSIKQTLTTEYKRRLNAICKTQLSGKHLIKAINTYAVPILTYSFGIIKWTKTDIEQIERNTRTTLAKHNNLHPKSAIERLTLKRQDGGRGLIDINNLWQKQITTLKTFFHTKSRTSDIHKAIVVNDVNYTPLNLNEQECTRNHSNVDPQKQKLENWKKKVLHGRHPHDLEQPHINTIASNKWLKIGNLFPETEGFIIAIQDQVINTKNYKKYIIKDPNITNDKCRKCHIQPETIQHITGACVTLTQTDYTHRHNQVSNIIHQKLALKHKLIENTKTPYYKYTPQTILENSTHKIYYDRAILTDKTIHYNRPDITLQDKINKVTYLIDIAVPNTHNIQKTITEKINKYNELKEEVIRIWKQEKVYIIPIVISTTGVVPNHLLRSLRLLDLSESLYIPIQKAAILNTCRIVRKFMQLEENNITT

SEQ ID NO: 21627 - protein, 1299 aa, Vanessa atalanta
METRSKKKRIGPLPGGDRRGTPGAGAGCDSMRTVSGEELSRRASPDKFHTTAGRRELNRRAHGVNATAATDDETNRLTDRTSSPIEPYYSPSTSSYTPSVQSSPSTISLNTESHLPALNVAREANAFLPASTKAGKPRVRMRWSKEVNSFIMRTYYYITNLETDMTTYRQKMHELFTQEYPGITVTEQRISDQRRTIVKNKLLTEDELNRLKEEARIQLQQHDVTTPLPRNPSHSEFYSQTESFTIPNTQNTHTSDMSTQTESVTIILENEVNTLNAQNPITETYIQEIYDKFSTTLLQYSGTDPLIRPRLHKIKYSPQLYNLIQIFNQNILNRFISEDTQLIDIHTLIYCTALVITEEVNPKQIENMQRTKTKQTNKPPWQQRLEKDIEKLRADCGRLTQYIYNNNRSNKVVKRVEEIFQNCIIHTKHDKNNRKPEEYLDTLKQKLALKVNRLRRYKKAQQRRNDNAIFTTNEKLFYRNLQKPHTPTNTVTDRNTDVPTKQDLEVFWSGIWEEQVSHNSKALWINDEKIEFSIIKEMEFVEVTETDIKNITAKLHNWKSPGIDKIHNFWYKKLTSLHKCIAKNLTHIVLGQQKIPEFMTIGITYMLPKTKHSPQPSQYRPITCLPTIYKILTSAITNKINTHIEQHNIIAEEQKGCRRAHMGCKEQLVIDSTIHKHAATKNRNLHCTYIDYQKAFDSIPHSWLIQILEIYKINPKIIDFLRKIMSYWKTTLHLNYGQNTIVTRQIQIKKGIYQGDSLSPLWFCLALNPLSHLLHRCRVGYPLKSIEETIISHLIYMDDIKLYAKSDKDMKKLIEVTKEFSTDINMQFGLDKCKTIHIIKGKIKPGNYAITSSDTITAMEPTDLYKYLGYNQLKGLDHTSIKHTLTIEYKRRINVICKTQLSGKNVIKAINTYAIPILTYSFGIIKWTKTDIEQIERNTRTILTKHNNLHPKSAIERLTLKRQNGGRGLIDIYNLWQKQINTLKTFFHLKSRTSDIHKAIVVNDINYTPLNLNEQGYHMNDCIDDPQKQKLENWKKKVLHGRHPHDLEQPHINTIASNKWLKIGNLFPETEGFIIAIQDQIINTKNYRKYIIKDPTITNDKCRKCHIQPETIQHITGACITLTQTDYTHRHNQVSNIVHQKLALKHKLIQNTKTPYYKYTPQTILENATHKMYYDRGILTDKTIHYNRPDITLQDKINKVTYLIDIAVPNTHNLQKTIAEKINKYNELKEEVTRIWKQEKVYIIPIVISTTGVVPNHLLHSLKLLDLNESLYIPIQKAAILNTCRIVRKFMQLEETDTT

SEQ ID NO: 21628 - protein, 1166 aa, Junonia litoralis
MRWSKEVNSFIMRTYYFITNLETDMTTYRQKLHELFTQEYPGIIVTEQRISDQRRTIIRNKLLTEEELNRLKEEARIQLQQYAITTPLPQNPHSDSPQSHSESHSQTEYYTLAITQNTHTSDTSTQTESVTIMIENEADTLNVQNPITETYIQEIYDKFSTTLIQYSGMDPVLRPKLSKLKYSPQLSNLIQIFNENILNKFISEDTQLIDIHTLIYCTALVITEELNLKKIENSRRTENRRNNKPPWQHRLEKDIEKLRADCGRLTQYIYNNNRSNKVVKTVEEIFRNSIIHTKHDRNNRKPEEYLDTLKQKLALKVNRLRRYKKAQQRRNDNVTFTTNEKLFYRNLQNPQTPTGTVTDSNTNVPAKEDLEVFWSGIWEEQVEHNSEAHWINEEKTEYSIIEEMEFAEVTETDITNITARLHNWKSPGIDKIHNFWYKKLTSLHKFIAKNLTRIILGQQRIPEFMTVGITYMLPKTKHSPQPSQYRPITCLPTIYKILTSAITTKINSHIQQYNIIAEEQKGCRQAHMGCKEQLVIDSTIHKHATTKNRNLHCTYIDYKKAFDSIPHSWLIQVLEIYKINSKIIDFLRKIMSYWKTTLHLNYGQNTIVTRQIKIQKGIYQGDSLSPLWFCLALNPLSRLLHNCRVGYSFKGTDKTVISHLIYMDDIKLYAKTDKDMKKLIEITKEFSSDINMQFGLEKCKTIHIIKGKIKPGDYTINNSDTITAMEPTDLYKYLGYKQLKGLDHTSIKQTLTIEYKRRLNAICKTQLSGKHLIKAINTYAVPILTYSFGIIKWTKTDIEQIERNTRTTLAKHNNLHPKSAIERLTLKRQDGGRGLIDINNLWQKQITTLKTFFHTKSRTSDIHKAIVVNDVNYTPLNLNEQECTRNHSNVDPQKQKLENWKKKVLHGRHPHDLEQPHINTIASNKWLKIGNLFPETEGFIIAIQDQVINTKNYKKYIIKDPNITNDKCRKCHIQPETIQHITGACVTLTQTDYTHRHNQVSNIIHQKLALKHKLIENTKTPYYKYTPQTILENSTHKIYYDRAILTDKTIHYNRPDITLQDKINKVTYLIDIAVPNTHNIQKTITEKINKYNELKEEVIRIWKQEKVYIIPIVISTTGVVPNHLLRSLRLLDLSESLYIPIQKAAILNTCRIVRKFMQLEENNITT

SEQ ID NO: 21629 - protein, 1300 aa, Junonia evarete
METRSKKKRIGPLPGGDRRGTPGAGAGCDSMRAVSGEELSRRASPDKFHTTADRRELNRRAHGVNATAANDDEINRLTDRTSSPTEPYNSPSTSSYTPSVQSSPSTISLNTEPHLPALNVAREANAFLPASTKAGKPRVRMRWSKEVNSFIMRTYYYITNLETDMTTYRRKLHELFTHEYPEITVTEQRISDQRRTIVRNKLLTEEELNRLKEEARIQLEQHDITTPSPQNPSHSEFHSQTESFSLPNTQNTHTSDMSTQTESVSIILENEVNTLNVQNPITETYIQEIYDKFSTTLIHYSGTDPIIRPKLPKIKYSPQLSNLIQIFNQNILNRFISEDTQLIDIHTLIYCTALIITEEVKPKKIENIQRTKTKQTNKPPWQQRLEKDIEKLRADCGRLTQYIYNNNRSNKVVKRVEEIFRNSIIHTKHDRNNTKPEEYLDTFKQKLALKVNRLRRYKKAQQRRNDNTTFTTNEKLFYRNLQKPHTPTNTITDSNTNVPTKQDLEVFWSGIWEEQVSHNSKASWINDEKLEFSILEEMEFVEVTETDITNITAKLHNWKSPGIDKIHNFWYKKLTSLHKCIAKNLTHIILGQQNIPEFMTIGITYMLPKTKHSPQPSQYRPITCLPTIYKILTSAITKKINTHIEQHNIIVEEQKGCRRAHMGCKEQLVIDSTIHKHAATKNRNLHCTYIDYQKAFDSIPHSWLIQILEIYKINSKIIDFLRKIMTYWKTTLHLNYGQNTIVTRQIQIKKGIYQGDSLSPLWFCLALNPLSHLLHRCRVGYPLKSTEETIISHLIYMDDIKLYAKSDKDMKKLIEVTKEFSSDINMQFGLDKCKTIHIIKGKIKPGNYAITSSDTITAMEPTDLYKYLGYNQLKGLDHTSIKHTLTIEYKRRINVICKTQLSGKNLIKAINTYAIPILTYSFGIIKWTKTDIEQIERNTRTILTKHNNLHPKSAIERLTLKRQNGGRGLIDIHNLWQKQINTLKTFFHLKSHTSNIHKAIVVNDINYTPLNLSEQGYTRNDSIDDPQKQKLENWKKKVLHGSHPHDLEQPHINTIASNKWLKIGNLFPETEGFIIAIQDQIINTKNYKKYIIKDPTITNDKCRKCHIQPETIQHITGACVTLTQTDYTHRHNQVSNIIHQKLALKHKLIQNTKTPYYKYTPQTILENATHKMYYDRGILTDKTIHYNRPDITLQDKINKVTYLIDIAVPNTHNLQKTIAEKINKYNELKEEVTRIWKQEKVYIIPIVISTTGVVPNHLLHSLRLLDLNESLYIPIQKAAILNTCRIVRKFMQLEENDTTT

SEQ ID NO: 21630 - protein, 1306 aa, Junonia neildi
METRSKKKRIGPLPGGDRRGTPGAGAGCDSMRAVSGEELSRRASPDKFHTTADRRELNRRAYGVNATAATDDEINRLTDRTSSPIEPYNSPSTSSYTPSIQSSPSTISLNTEPHLPALNVAREANAFLPASTKAGKPRVRMRWSKEVNSFIMRTYYFITNLETDMTTYRQKLHELFTQEYPGIIVTEQRISDQRRTIIRNKLLTEEELNRLKEEARIQLQQYAITTPLPQNPHSDSPQSHSESHSQTEYYTLAITQNTHTSDTSTQTESVTIMIENEADTLNVQNPITETYIQEIYDKFSTTLIQYSGMDPVLRPKLSKLKYSPQLSNLIQIFNENILNKFISEDTQLIDIHTLIYCTALVITEELNLKKIENSRRTENRRNNKPPWQHRLEKDIEKLRADCGRLTQYIYNNNRSNKVVKTVEEIFRNSIIHTKHDRNNTKPEEYLDTLKQKLALKVNRLRRYKKAQQRRNDNVTFTTNEKLFYRNLQNPQTPTGTVTDSNTNVPAKEDLEVFWSGIWEEQVEHNSEAHWINEEKTEYSIIEEMEFAEVTETDITNITARLHNWKSPGIDKIHNFWYKKLTSLHKFIAKNLTRIILGQQRIPEFMTVGITYMLPKTKHSPQPSQYRPITCLPTIYKILTSAITTKINSHIQQYNIIAEEQKGCRQAHMGCKEQLVIDSTIHKHATTKNRNLHCTYIDYKKAFDSIPHSWLIQVLEIYKINSKIIDFLRKIMSYWKTTLHLNYGQNTIVTRQIKIQKGIYQGDSLSPLWFCLALNPLSRLLHNCRVGYSFKGTDKTVISHLIYMDDIKLYAKTDKDMKKLIEITKEFSSDINMQFGLEKCKTIHIIKGKIKPGDYTINNSDTITAMEPTDLYKYLGYKQLKGLDHTSIKQTLTIEYKRRLNAICKTQLSGKHLIKAINTYAVPILTYSFGIIKWTKTDIEQIERNTRTTLAKHNNLHPKSAIERLTLKRQDGGRGLIDINNLWQKQITTLKTFFHTKSRTSDIHKAIVVNDVNYTPLNLNEQECTRNHSNVDPQKQKLENWKKKVLHGRHPHDLEQPHINTIASNKWLKIGNLFPETEGFIIAIQDQVINTKNYKKYIIKDPNITNDKCRKCHIQPETIQHITGACVTLTQTDYTHRHNQVSNIIHQKLALKHKLIENTKTPYYKYTPQTILENSTHKIYYDRAILTDKTIHYNRPDITLQDKINKVTYLIDIAVPNTHNIQKTITEKINKYNELKEEVIRIWKQEKVYIIPIVISTTGVVPNHLLRSLRLLDLSESLYIPIQKAAILNTCRIVRKFMQLEENNITT

SEQ ID NO: 21631 - protein, 1159 aa, Vanessa atalanta
MRWSKEVNSFIMRTYYYITNLETDMTTYRQKMHELFTQEYPGITVTEQRISDQRRTIVKNKLLTEDELNRLKEEARIQLQQHDVTTPLPRNPSHSEFHSQTESFTIPNTQNTHTSDMSTQTESVTIILENEVNTLNAQNPITETYIQEIYDKFSTTLLQYSGTDPLIRPRLPKIKYSPQLYNLIQIFNQNILNRFISEDTQLIDIHTLIYCTALVITEEVNPKQIENMQRTKTKQTNKPPWQQRLEKDIEKLRADCGRLTQYIYNNNRSNKVVKRVEEIFQNCIIHTKHDKNNRKPEEYLDTLKQKLALKVNRLRRYKKAQQRRNDNAIFTTNEKLFYRNLQKPHTPTNTVTDRNTDVPTKQDLEVFWSGIWEEQVSHNSKALWINDEKIEFSIIKEMEFVEVTETDIKNITAKLHNWKSPGIDKIHNFWYKKLTSLHKCIAKNLTHVVLGQQKIPEFMTIGITYMLPKTKHSPQPSQYRPITCLPTIYKILTSAITNKINTHIEQHNIIAEEQKGCRRAHMGCKEQLVIDSTIHKHAATKNRNLHCTYIDYQKAFDSIPHSWLIQILEIYKINPKIIDFLRKIMSYWKTTLHLNYGQNTIVTRQIQIKKGIYQGDSLSPLWFCLALNPLSHLLHRCRVGYPLKSIEETIISHLIYMDDIKLYAKSDKDMKKLIEVTKEFSTDINMQFGLDKCKTIHIIKGKIKPGNYAITSSDTITAMEPTDLYKYLGYNQLKGLDHTSIKHTLTIEYKRRINVICKTQLSGKNLIKAINTYAIPILTYSFGIIKWTKTDIEQIERNTRTILTKHNNLHPKSAIERLTLKRQNGGRGLMDIYNLWQKQINTLKTFFHLKSRTSDIHKAIVVNDINYTPLNLNEQGYHMNDCIDDPQKQKLENWKKKVLHGRHPHDLEQPHINTIASNKWLKIGNLFPETEGFIIAIQDQIINTKNYRKYIIKDPSITNDKCRKCHIQPETIQHITGACITLTQTDYTHRHNQVSNIVHQKLALKHKLIQNTKTPYYKYTPQTILENATHKMYYDRGILTDKTIHYNRPDITLQDKINKVTYLIDIAVPNTHNLQKTIAEKINKYNELKEEVTRIWKQEKVYIIPIVISTTGVVPNHLLHSLKLLDLNESLYIPIQKAAILNTCRIVRKFMQLEETDTT

SEQ ID NO: 21632 - protein, 1306 aa, Junonia coenia
METRSKKKRIGPLPGGDRRGTPGAGAGCDSMRAVSGEELSRRASPDKFHTTADRRELNRRAYGVNATAATDDEINRLTDRTSSPIEPYNSPSTSSYTPSIQSSPSTISLNTEPHLPALNVAREANAFLPASTKAGKPRVRMRWSKEVNSFIMRTYYFITNLETDMTTYRQKLHELFTQEYPGIIVTEQRISDQRRTIIRNKLLTEEELNRLKEEARIQLQQYAITTPLPQNPHSDSPQSHSESHSQTEYYTLAITQNTHTSDTSTQTESVTIMIENEADTLNVQNPITETYIQEIYDKFSTTLIQYSGMDPVLRPKLSKLKYSPQLSNLIQIFNENILNKFISEDTQLIDIHTLIYCTALVITEELNLKKIENSRRTENRRNNKPPWQHRLEKDIEKLRADCGRLTQYIYNNNRSNKVVKTVEEIFRNSIIHTKHDRNNRKPEEYLDTLKQKLALKVNRLRRYKKAQQRRNDNVTFTTNEKLFYRNLQNPQTPTGTVTDSNTNVPAKEDLEVFWSGIWEEQVEHNSEAHWINEEKTEYSIIEEMEFAEVTETDITNITARLHNWKSPGIDKIHNFWYKKLTSLHKFIAKNLTRIILGQQRIPEFMTVGITYMLPKTKHSPQPSQYRPITCLPTIYKILTSAITTKINSHIQQYNIIAEEQKGCRQAHMGCKEQLVIDSTIHKHATTKNRNLHCTYIDYKKAFDSIPHSWLIQVLEIYKINSKIIDFLRKIMSYWKTTLHLNYGQNTIVTRQIKIQKGIYQGDSLSPLWFCLALNPLSRLLHNCRVGYSFKGTDKTVISHLIYMDDIKLYAKTDKDMKKLIEITKEFSSDINMQFGLEKCKTIHIIKGKIKPGDYTINNSDTITAMEPTDLYKYLGYKQLKGLDHTSIKQTLTIEYKRRLNAICKTQLSGKHLIKAINTYAVPILTYSFGIIKWTKTDIEQIERNTRTTLAKHNNLHPKSAIERLTLKRQDGGRGLIDINNLWQKQITTLKTFFHTKSRTSDIHKAIVVNDVNYTPLNLNEQECTRNHSNVDPQKQKLENWKKKVLHGRHPHDLEQPHINTIASNKWLKIGNLFPETEGFIIAIQDQVINTKNYKKYIIKDPNITNDKCRKCHIQPETIQHITGACVTLTQTDYTHRHNQVSNIIHQKLALKHKLIENTKTPYYKYTPQTILENSTHKIYYDRAILTDKTIHYNRPDITLQDKINKVTYLIDIAVPNTHNIQKTITEKINKYNELKEEVIRIWKQEKVYIIPIVISTTGVVPNHLLRSLRLLDLSESLYIPIQKAAILNTCRIVRKFMQLEENNITT

SEQ ID NO: 21633 - protein, 1306 aa, Junonia grisea
METRSKKKRIGPLPGGDRRGTPGAGAGCDSMRAVSGEELSRRASPDKFHTTADRRELNRRAYGVNATAATDDEINRLTDRTSSPIEPYNSPSTSSYTPSIQSSPSTISLNTEQHLPALNVAREANAFLPASTKAGKPRVRMRWSKEVNSFIMRTYYFITNLETDMTTYRQKLHELFTQEYPGIIVTEQRISDQRRTIIRNKLLTEEELNRLKEEARIQLQQYAITTPLPQNPHSDSPQSHSESHSQTEYYTLAITQNTHTSDTSTQTESVTIMIENEADTLNVQNPITETYIQEIYDKFSTTLIQYSGMDPVLRPKLSKLKYSPQLSNLIQIFNENILNKFISEDTQLIDIHTLIYCTALVITEELNLKKIENSRRTENRRNNKPPWQHRLEKDIEKLRADCGRLTQYIYNNNRSNKVVKTVEEIFRNSIIHTKHDRNNRKPEEYLDTLKQKLALKVNRLRRYKKAQQRRNDNVTFTTNEKLFYRNLQNPQTPTGTVTDSNTNVPAKEDLEVFWSGIWEEQVEHNSEAHWINEEKTEYSIIEEMEFAEVTETDITNITARLHNWKSPGIDKIHNFWYKKLTSLHKFIAKNLTRIILGQQRIPEFMTVGITYMLPKTKHSPQPSQYRPITCLPTIYKILTSAITTKINSHIQQYNIIAEEQKGCRQAHMGCKEQLVIDSTIHKHATTKNRNLHCTYIDYKKAFDSIPHSWLIQVLEIYKINSKIIDFLRKIMSYWKTTLHLNYGQNTIVTRQIKIQKGIYQGDSLSPLWFCLALNPLSRLLHNCRVGYSFKGTDKTVISHLIYMDDIKLYAKTDKDMKKLIEITKEFSSDINMQFGLEKCKTIHIIKGKIKPGDYTINNSDTITAMEPTDLYKYLGYKQLKGLDHTSIKQTLTIEYKRRLNAICKTQLSGKHLIKAINTYAVPILTYSFGIIKWTKTDIEQIERNTRTTLAKHNNLHPKSAIERLTLKRQDGGRGLIDINNLWQKQITTLKTFFHTKSRTSDIHKAIVVNDVNYTPLNLNEQECTRNHSNVDPQKQKLENWKKKVLHGRHPHDLEQPHINTIASNKWLKIGNLFPETEGFIIAIQDQVINTKNYKKYIIKDPNITNDKCRKCHIQPETIQHITGACVTLTQTDYTHRHNQVSNIIHQKLALKHKLIENTKTPYYKYTPQTILENSTHKIYYDRAILTDKTIHYNRPDITLQDKINKVTYLIDIAVPNTHNIQKTITEKINKYNELKEEVIRIWKQEKVYIIPIVISTTGVVPNHLLRSLRLLDLSESLYIPIQKAAILNTCRIVRKFMQLEENNITT

SEQ ID NO: 21634 - protein, 1160 aa, Junonia litoralis
MRWSKEVNSFIMRTYYYITNLETDMTTYRRKLHELFTHEYPEITVTEQRISDQRRTIVRNKLLTEEELNRLKEEARIQLEQHDITTPSPQNPSHSEFHSQTESFSLPNTQNTHTSDMSTQTESATIILENEVNTLNVQNPITETYIQEIYDKFSTTLIHYSGTDPIIRPKLPKIKYSPQLSNLIQIFNQNILNRFISEDTQLIDIHTLIYCTALIITEEVKPKKIENIQRTKTKQTNKPPWQQRLEKDIEKLRADCGRLTQYIYNNNRSNKVVKRVEEIFRNSIIHTKHDRNNTKPEEYLDTFKQKLALKVNRLRRYKKAQQRRNDNTTFTTNEKLFYRNLQKPHTPTNTITDSNTDVPTKQDLEVFWSGIWEEQVSHNSKASWINDEKLEFSILEEMEFVEVTETDITNITAKLHNWKSPGIDKIHNFWYKKLTSLHKCIAKNLTHIILGQQSIPEFMTIGITYMLPKTKHSPQPSQYRPITCLPTIYKILTSAITKKINTHIEQHNIIVEEQKGCRRAHMGCKEQLVIDSTIHKHAATKNRNLHCTYIDYQKAFDSIPHSWLIQILEIYKINSKIIDFLRKIMTYWKTTLHLNYGQNTIVTRQIQIKKGIYQGDSLSPLWFCLALNPLSHLLHRCRVGYPLKSTEETIISHLIYMDDIKLYAKSDKDMKKLIEVTKEFSSDINMQFGLDKCKTIHIIKGKIKPGNYAITSSDTITAMEPTDLYKYLGYNQLKGLDHTSIKHTLTIEYKRRINVICKTQLSGKNLIKAINTYAIPILTYSFGIIKWTKTDIEQIERNTRTILTKHNNLHPKSAIERLTLKRQNGGRGLIDIHNLWQKQINTLKTFFHLKSHTSKIHKAIVVNDINYTPLNLSEQGYTGNDSIDDPQKQKLENWKKKVLHGRHPHDLEQPHINTIASNKWLEIGNLFPETEGFIIAIQDQIINTKNYKKYIIKDPTITNDKCRKCHIQPETIQHITGACVTLTQTDYTHRHNQVSNIIHQKLALKHKLIQNTKTPYYKYTPQTILENATHKMYYDRGILTDKTIHYNRPDITLQDKINKVTYLIDIAVPNTHNLQKTIAEKINKYNELKEEVTRIWKQEKVYIIPIVISTTGVVPNHLLHSLRLLDLNESLYIPIQKAAILNTCRIVRKFMQLEENDTTT

SEQ ID NO: 21635 - protein, 1202 aa, Vanessa cardui
METRSKKKRIGPLPGGDRRGTPGAGAGCDSMRTVSGEELSRRASPDKFHTTAGRRELNRRAHGVNATAATDDEIIILTDRTSSPIEPYNSPSTSSYTPSVQSSPSTISLNTEPHLPALNVAREANAFLPASTKAGKPRVRMRWSKEVNSFIMRTYYYITNLETDMTTYRQKMHELFTQEYPGITVTEQRISDQRRTIVRNKLLTEDELNRLKEEARIQLQQHDVTTSLPRNPSYSEFHSQTESFTLPNTQNTHTSDMSTQTKSVTIILENEVYTLNAQNPITETYIQEIYDKFSTTLLQYSGTDPLIRPRLPKIKYSPQLYNLIQIFNQNILNIFISEDTQLIDIHTLIYCTALVITEEVNPKQIENMKRTKTKPTNKPPWQQRLEKDIEKLRADCGRLTQYIYNNNRSNKVVKRVEEIFQNCIIHTKHDRNNRKPEEYLDTLKQKLALKVNRLRRYKKAQQRRNDNAIFTTNEKLFYRNLQKPHTPTNTVTDRNTDVPTKQDLEVFWSGIWEEQVSHNSKASWINDEKIEFSIIEEMEFVEVTETDITNITAKLHNWKSPGIDKIHNFWYKKLTSLHKCIAKNLTHVVLGQQKIPEFMTIGITYMLPKTKHSPQPSQYRPITCLPTIYKILTSAITNKINTHIEQHNIIAEEQKGCRRAHMGCKEQLVIDSTIHKHAATKNRNLHCTYIDYQKTFDSIPHSWLIQILEIYKINPKIIDFLRKIMSYWKTTLHLNYGQNTIVTRQIQIKKGIYQGDSLSPLWFCIALNPLSHLLHRCRVGYPLKSIEETIISHLIYMDDIKLYAKSDKDMKKLIEVTKEFSTDINMQFGLDKCKTIHIIKGKIKPGNYAITSSDTITAMEPTDLYKYLGYNQLKGLDHTSIKHTLTIEYKRRINAICKTQLSGKNLIKAINTYAISILTYSFGIIKWTKTDIEQIERNTRTILTKHNNHHPKSAIERLTLKRQNGGRGLIDIYNLWQKQINTLKTFFHLKSRNSDIHKAIVVNDINYTPLNLSEQGYHMNDCIDDPQKQKIENWKKKVLHGRHPHDLEQPHINTIASNKWLKIGNLFPETEGFIIAIQDQIINTKNYKKYIIKDPTITNDKCRKCHIQPETIQHITGACITLTQTDYTHRHNQVSNIVHQKLALKHKLIQNTKTPYYKYTPQIILENTTHKMYYDRGILTDKTIHYNRPDITLQDKINKVTL

SEQ ID NO: 21636 - protein, 1299 aa, Vanessa tameamea
METRSKKKRIGPLPGGDRRGTPGAGAGCDSMRTVSGEELSRRASPDKFHTTAGRRELNRRAHGVNATAATDDEINRLTDRTSSPIEPYNSPSTSSYTPSVQSSPSTISLNTEPHLPALNAARESNAFLPASTKAGKPRVRMRWSKEVNSFIMRTYYYITNLETDMTTYRQKMHELFTQKYPGITVTEQRISDQRRTIVKNKLLTEDELNRLKEEARIQLQQHDVTTPLPRNPSHSEFHSQTESFTLPNTVNTHTSDMSTQTESVTILLENEVNTLNAQNQITETYIQEIHDKFSTTLLQYSGTDPLIRPRLPKIKYSPQLYKLIQIFNQNILNRFISEDTQLIDIHTLIYCTALVITEEVNPKQIENMQRTKTKQTNKPPWQQRLEKDIEKLRADCGRLTQYIYNNNRSNKVVKRVEEIFQNCITHTKHDRNNRKPEEYLDTLKQKLALKVNRLRRYKKAQQRRNDNAIFTTNEKLFYRNLQKPHTPTNTVTDRNTDAPTKQDLEVFWSGIWEEQVSHNSKALWINDEKIEFSIIEEMEFVEITETDITNITAKLHNWKSPGIDKIHNFWYKKLTSLHKCIAKNLTHVVLGQQKIPEFMTIGITYMLPKTKHSPQPSQYRPITCLPTIYKILTSAITNKINTHIEQHNIIAEEQKGCKRAHMGCKEQLVIDSTIHKHAATKNRNLHCTYIDYQKAFDSIPHSWLIQILEIYKINPKIIDFLRKIMSYWKTTLHLKYGQNTIVTRQIQIKKGIYQGDSLSPLWFCLALNPLSHLLHRCRVGYPLKSIEETIISHLIYMDDIKLYAKSDKDMKKLIEVTKEFSTDINMQFGLDKCKTIHIIKGKIKPGNYAITSSDTITAMEPTDLYKYLGYNQLKGLDHTSIKHTLTIEYKRRINVICKTQLSGQNLIKAINTYAIPILTYSFGIIKWTKTDIEQIERNTRTILTKHNNLHPKSAIERLTLKRQNGGRGLIDIYNLWQKQINTLKTFFHLKSRTSDIHKAIVVNDINYTPLNLSEQGYHMNDCIDDPQKQKLENWKKKVLHGRHPHDLEQPHINTITSNKWLKVGNLFPETEGFIIAIQDQIINTKNYKKYIIKDPTITNDKCRKCHTQPETIQHITGACITLTQTDYTHRHNQVSNIVHQKLALKHKLIQNTKTPYYKYTPQTILENATHKMYYDRGILTDKTIHHNRPDITLQDKINKVTYLIDIAVPNTHNLQKTIAEKINKYNELKEEVTRIWKQEKVYIIPIVISTTGVVPNHLLHSLKLLDLNESLYIPIQKAAILNTCRIVRKFMQLEESDTT

SEQ ID NO: 21637 - protein, 1159 aa, Vanessa cardui
MRWSKEVNSFIMRTYYYITNLETDMTTYRQKMHELFTQKYPGITVTEQRISDQRRTIVKNKLLTEDELNRLKEEARIQLQQHDVTTPLPRNPSHSEFHSQIEYFTLPNTQNTHTSDMSTQTESVTIILENEVNTLNAQNPITETYIQEIYNKFSTTLLQYSGTDPLIRPQLPKIKYSKQLYNLIQIFNENILNRFISEDTQLIDIHTIIYCTALVITEEINPKQIKNMQRTKTKQTNKPPWQQRLERDIEKLRADCGRLTQYIYNNNRSNKVVKRVEEIFQNCNIHTKHDRNNKKPEEYLDTLKQKLALKVNRLRRYKKAEQRRNDNAIFTTNEKLFYRNLQKLHTPTNTVTDRNTNVPTKQDLEVFWSGIWEEQVSHNSKASWINDEKIEFSIIEEMEFVEVTETDITNITAKLHNWKSPGIDKIHNFWYKKLTSLHKCIAKNLTHIVLGQQKIPEFMTIGITYMLPKTKHSPQPSQYRPITCLPTIYKILTSVITNKISTHIEQHNIIAEEQKGCRRAHMGCKEQLVIDSTIHKHAATKNRNLHCTYIDYQKAFDSIPHSWLIEILEIYKINPKIIDFLRKIMSYWKTTLHLNYGQNTIVTRQIQIKKGIYQGDSLSPLWFCLALNPLSHLLHRCRVGYSLKSIEEIIISHLIYMDDIKLYAKSDKDMKKLIEVTKEFSTDINMQFGLDKCKTIHIIKGKIKPGNYAITSSDTITAMEPTDLYKYLGYNQLKGLDHTSIKHTLTIEYKRRINVICKTQLSGKNLIKAINTYAIPILTYSFGIIKWTKTDIEQIERNTRTILTKHNNLHPKSAIERLTLKRQNGGRGLIDIYNLWQKQINTLKTFFHLKSRTSDIHKAIVVNDNNYTPLNLSEQGYHMNDCIDDPQKQKLENWKKKVLHGRHPHDLEQPHINTIASNKWLKIGNLFPETEGFIIAIQDQIINTKNYKKYIIKDPTITNDKCRKCHIQPETIQHITGACITLTQTDYTHRHNQVSNIVHQKLALKHKLIQNTKTPYYKYTPQTILENATHKIYYDRGILTDKTIHYNRPDITLQDKINKVTYLIDIAVPNTHNLQKTIAEKINKYNELKEEVTRIWKQEKVYIIPIVISTTGVVPNHLLHSLKLLDLNESLYIPIQKAAILNTCRIVRKFMQLEETDTT

SEQ ID NO: 21638 - protein, 1158 aa, Vanessa atalanta
MRWSKEVNSFIMRTYYYITNLETDMTTYRQKMHELFTQEYPGITVTEQRISDQRRTIVKNKLLTEDELNRLKEEARIQLQQHDVTTPLPRNPSHSEFHSQTESFTIPNTQNTHTSDMSTQTESVTIILENEVNTLNAQNPITETYIQEIYDKFSTTLLQYSGTDPLIRPRLPKIKYSPQLYNLIQIFNQNILNRFISEDTQLIDIHTLIYCTALVITEEVNPKQIENMQRTKTKQTNKPPWQQRLEKDIEKLRADCGRLTQYIYNNNRSNKVVKRVEEIFQNCIIHTKHDKNNRKPEEYLDTLKQKLALKVHRLRRYKKAQQRRNDNAIFTTNEKLFYRNLQKPHTPTNTVTDRNTDVPTKQDLEVFWSGIWEEQVSHNSKALWINDEKIEFSIIKEMEFVEVTETDIKNITAKLHNWKSPGIDKIHNFWYKKLTLHKCIAKNLTHVVLGQQKIPEFMTIGITYMLPKTKHSPQPSQYRPITCLPTIYKILTSAITNKINTHIEQHNIIAEEQKGCRRAHMGCKEQLVIDSTIHKHAATKNRNLHCTYIDYQKAFDSIPHSWLIQILEIYKINPKIIDFLRKIMSYWKTTLHLNYGQNTIVTRQIQIKKGIYQGDSLSPLWFCLALNPLSHLLHRCRVGYPLKSIEETIISHLIYMDDIKLYAKSDKDMKKLIEVTKEFSTDINMQFGLDKCKTIHIIKGKIKPGNYAITSSDTITAMEPTDLYKYLGYNQLKGLDHTSIKHTLTIEYKRRINVICKTQLSGKNLIKAINTYAIPILTYSFGIIKWTKTDIEQIERNTRTILTKHNNLHPKSAIERLTLKRQNGGRGLIDIYNLWQKQINTLKTFFHLKSRTSDIHKAIVVNDINYTPLNLNEQGYHMNDCIDDPQKQKLENWKKKVLHGRHPHDLEQPHINTIASNKWLKIGNLFPETEGFIIAIQDQIINTKNYRKYIIKDPSITNDKCRKCHIQPETIQHITGACITLTQTDYTHRHNQVSNIVHQKLALKHKLIQNTKTPYYKYTPQTILENATHKMYYDRGILTDKTIHYNRPDITLQDKINKVTYLIDIAVPNTHNLQKTIAEKINKYNELKEEVTRIWKQEKVYIIPIVISTTGVVPNHLLHSLKLLDLNESLYIPIQKAAILNTCRIVRKFMQLEETDTT

SEQ ID NO: 21639 - protein, 1299 aa, Vanessa atalanta
METRSKKKRIGPLPGGDRRGTPGAGAGCDSMRTVSGEELSRRASPDKFHTTAGRRELNRRAHGVNATAATDDETNRLTDRTSSPIEPYNSPSTSSYTPSVQSSPSTISLNTESHLPALNVAREANAFLPASTKAGKPRVRMRWSKEVNSFIMRTYYYITNLETDMTTYRQKMHELFTQEYPGITVTEQRISDQRRTIVKNKLLTEDELNRLKEEARIQLQQHDVTTPLPRNPSHSEFHSQTESFTIPNTQNTHTSDMSTQTESVTIILENEVNTLNAQNPITETYIQEIYDKFSTTLLQYSGTDPLIRPRLPKIKYSPQLYNLIQIFNQNILNRFISEDTQLIDIHTLIYCTALVITEEVNPKQIENMQRTKTKQTNKPPWQQRLEKDIEKLRADCGRLTQYIYNNNRSNKVVKRVEEIFQNCIIHTKHDKNNRKPEEYLDTLKQKLALKVNRLRRYKKAQQRRNDNAIFTTNEKLFYRNLQKPHTPTNTVTDRNTDVPTKQDLEVFWSGIWEEQVSHNSKALWINDEKIEFSIIKEMEFVEVTETDIKNITAKLHNWKSPGIDKIHNFWYKKLTSLHKCIAKNLTHVVLGQQKIPEFMTIGITYMLPKTKHSPQPSQYRPITCLPTIYKILTSAITNKINTHIEQHNIIAEEQKGCRRAHMGCKEQLVIDSTIHKHAATKNRNLHCTYIDYQKAFDSIPHSWLIQILEIYKINPKIIDFLRKIMSYWKTTLHLNYGQNTIVTRQIQIKKGIYQGDSLSPLWFCLALNPLSHLLHRCRVGYPLKSIEETIISHLIYMDDIKLYAKSDKDMKKLIEVTKEFSTDINMQFGLDKCKTIHIIKGKIKPGNYAITSSDTITAMEPTDLYKYLGYNQLKGLDHTSIKHTLTIKYKRRINVICKTQLSGKNLIKAINTYAIPILTYSFGIIKWTKTDIEQIERNTRTILTKHNNLHPKSAIERLTLKRQNGGRGLIDIYNLWQKQINTLKTFFHLKSRTSDIHKAIVVNDINYTPLNLNEQGYHMNDCIDDPQKQKLENWKKKVLHGRHPHDLEQPHINTIASNKWLKIGNLFPETEGFIIAIQDQIINTKNYRKYIIKDPSITNDKCRKCHIQPETIQHITGACITLTQTDYTHRHNQVSNIVHQKLALKHKLIQNTKTPYYKYTPQTILENATHKMYYDRGILTDKTIHYNRPDITLQDKINKVTYLIDIAVPNTHNLQKTIAEKINKYNELKEEVTRIWKQEKVYIIPIVISTTGVVPNHLLHSLKLLDLNESLYIPIQKAAILNTCRIVRKFMQLEETDTT

SEQ ID NO: 21640 - protein, 1519 aa, Amphipyra berbera
MRLRNRILPQAGTGANRNGESRPGPSSPGCPSYSGEGTVPHQPVQSRTVADQHSPTSSLFSSIPSSPPSYLDSVRESSSSISSPTSSPSPAHPTKNTNSNTPTNNTLNDPGRNVLQEMLPATTLAGRNRQRMKWTDDVNRQLLRCYYTVTNCETNFTGYRPTLHAKFIEIYPDLHILTEQRLADQIRIIQRNNRIPISERENIKREVASITDNTPTQTENPHSQTTESLSSQVSHSYSLTPEQYPQSSLQTSRTPTIQETTAEISDVIDRLTDRTNCLEEPFSPSTTSYTPSIPSSHSTIHLNIDSPIPTLNVARAVNTFLPASTKAGKPRVRMRWSKDVNIFIMRTYLYITKLETDMTTYRQQLHELFTRQYPDINVTEQRISDQRRTIVRNKLLSQEELNQLKEEVQTRLLEETDNSIGENPSPLTQELSSQSELQTQLQPQSHTQSHSQSQPQTQPSTQNTQTSHTSAQTDAITLTLENDFETLVDYNPTTENCIQEIHDKFRTTLAQYSGMDPTARPKLPKLKYSPKLSHLIHLFNQNILQQYVSENTQLVDTHTLIYCTALVISEELNYKVTEYTGNTRPRQNTKPPWQQRLEKDIEKLRADCGRLTQYINNNRSNKVVRRVEAIFKSTFTHTRHENNNKKPEEFLDTLKQKLALKVHRLRRYKKAQMRRTDNIIFATNEKIFYRNLQKPQTDTLTENNIDIPTKEQLETFWSGIWEEQVQHNDKAPWIAEEQTKWSAIEEMEFVEITESDITRITARLHNWKSPGIDKIQNFWYKKLISLHNTMAKNLTDIILGQQNMPEFIATGITYMLPKTKYSPQPSQYRPITCLPTIYKILTSAITSKINTHIERHNIIAEEQKGCRRGHMGCKEQLVIDSTVHKHATTKNRNLHCTYIDYKKAFDSIPHSWLIQILEIYKINPKILDFLRSIMSRWKTTLHLSNRHNTVITRQISIKKGIYQGDSLSPLWFCLALNPLSHLLQRCRAGYCLKHTTEETVISHLIYMDDIKLYSKTEKEMKQLVETTAEFSNDINMQFGLDKCKTVHIIRGKIRPGDYVVNNTDTITAMESTDLYKYLGYTQLKGLDHTKIKQALTIEYKRRLNALCKTQLAGKHLIKALNTYAIPILTYSFGVIKWTKTDIEQLERTTRTTLTKHNNLHPKSAIERLTIKRQNGGRGLIDIHHLWQKQINTLKTFFHTKSRTSHIHKAITQNDSNYTPLNLNDQTNTHTNTQTGGNSDPQKKKIEDWKKKVLHGRHPHDLEQSHVNTIASNKWLKVGNLFPETEGFMIAIQDQIINTKNYRKYIIKDPNITNDKCRKCHTQPETIQHITGACTTLTQTDYTHRHNQVANVIHQKLALKYALIQNTNTPYYKYTPETVLENTTHKLYYDRAILTDRTIHYNRPDITLQDKINKITYLIDIAVPNTHNLQKTITEKISKYADLKEEVTRIWRQEKVYVVPIVLSTTGVIPNHLLHSLKLIDLKESLYITLQKAAILNTCRIVRKFMQIEEDSITPHNIIP

SEQ ID NO: 21641 - protein, 1186 aa, Amphipyra berbera
MRWSKDVNIFIMRTYLYITKLETDMTTYRQQLHELFTRQYPDINVTEQRISDQRRTIVRNKLLSQEELNQLKEEVQTRLLEETDNSIGENPSPLTQELSSQSELQTQLQPQSHTQSHSQLQPQTQPSTQNTQTSHTSAQTDAITLTLENDFETLVDYNPTTENCIQEIHDKFRTTLAQYSGMDPTARPKLPKLKYSPKLSHLIHLFNQNILQQYVSENTQLVDTHTLIYCTALVISEELNYKVTEYTGNTRPRQNTKPPWQQRLEKDIEKLRADCGRLTQYINNNRSNKVVRRVEAIFKSTFTHTRHENNNKKPEEFLDTLKQKLALKVHRLRRYKKAQMRRTDNIIFATNEKIFYRNLQKPQTDTLTENNIDIPTKEQLETFWSGIWEEQVQHNDKAPWIAEEQTKWSAIEEMEFVEITESDITRITARLHNWKSPGIDKIQNFWYKKLISLHKTMAKNLTDIILGQQNMPEFIATGITYMLPKTKYSPQPSQYRPITCLPTIYKILTSAITSKINTHIERHNIIAEEQKGCRRGHMGCKEQLVIDSTVHKHATTKNRNLHCTYIDYKKAFDSIPHSWLIQILEIYKINPKILDFLRSIMSRWKTTLHLSNRHNTVITRQISIKKGIYQGDSLSPLWFCLALNPLSHLLQRCRAGYCLKHTTEETVISHLIYMDDIKLYSKTEKEMKQLVETTAEFSNDINMQFGLDKCKTVHIIRGKIRPGDYVVNNTDTITAMESTDLYKYLGYTQLKGLDHTKIKQALTIEYKRRLNALCKTQLAGKHLIKALNTYAIPILTYSFGVIKWTKTDIEQLERTTRTTLTKHNNLHPKSAIERLTIKRQNGGRGLIDIRHLWQKQINTLKTFFHTKSRTSHIHKAITQNDSNYTPLNLNDQTNTHTNTQTGSNSDPQKKKIEDWKKKVLHGRHPHDLEQSHVDTIASNKWLKVGNLFPETEGFMIAIQDQIINTKNYRKYIIKDPNITNDKCRKCHTQPETIQHITGACTTLTQTDYTHRHNQVANVIHQKLALKYALIQNTNTPYYKYTPETVLENTTHKLYYDRAILTDRTIHYNRPDITLQDKINKITYLIDIAVPNTHNLQKTITEKINKYADLKEEVTRIWRQEKVYVVPIVLSTTGVIPNHLLHSLKLIDLKESLYITLQKAAILNTCRIVRKFMQIEEDSITPHNIIP

SEQ ID NO: 21642 - protein, 1322 aa, Mesoligia furuncula
METRSKRKRIGPLPGGDRRGALGADAECLSMRTVSGEELNRRAPTDKDATADIIDDGDRLTDRINTPVEPYSPSTVSYTPSRPSTPSIPSSPSIPSSPPITSFNSVQPNSTLNVTREVSTFLPASTKAGKARVRMRWSKEVNLFIMRTYLYITKLETDLTTYRKQLHELFTRQYPEITVTEQRISDQRRIIVRNKLLSQDIINQLKEEVRTQLQGESENTAGAISIALTQNTTAYNQQEQPCSQTEPIIQSQPITQSQPYFQSQAYSETTHTSTQTESITIMLENEIETLADISINQSTDTHIQEIHDKFKTALTLYSGMDPAARPRLPKLRYTPKLSQLVHLFNQNILQQYISEETHLIDIHTLIYCTALVISEELNFKITEYTGNSRQRNINKPAWQQRLEKDIEKLRADCGRLTQYINNNRSNKVVKRVDAIFKNMATHTRHENDNRKPEEFLDTLKQKLALKVHRLRRYKKAQERKHDNSLFATSEKNFYRNLQTAQTNTNTMTTENNIELPTAEQLETFWSGIWEEQVQHNNNSDWITDEETKWSSLEEMEFVELTESDITCVTARLHNWKSPGIDKIHNFWYKKLESLHKVLAKNLTQIILGKQNIPEFLATGITYMLPKAQYSSQPSQYRPITCLPTIYKILTSAITTKINKHIENHNIIAEEQKGCRRGHMGCKEQLVIDSIIHKHANTKHRNLHCTYIDYKKAFDSIPHSWLIQILQIYKINSKIIDFLQDIMARWRTTLQLNYRNNAITTRQISIKKGIYQGDSLSPLWFCLALNPLSDLLHRSQAGYSMKHTTEETIISHLIYMDDIKLYSKSEKEMKKLIDITTEFSKDINMQFGLDKCKTVHIIRGKIKPGDYPINNTDTITAMEPTDLYKYLGYKQLKGLDHSTIKYTLNSEYKRRVVAVCKTQLSGKHLIKALNTYAIPILTYSFGVVKWSKTDIQQIERTTRTTLTKHNNLHPKSAIERLTIKRQYGGRGLIDVHHLWQKQIAKLRTFFHSKSQTSNIHKAVVMNDISYTPLNLHDQIQHTSHEDPHKQKVEDWKKKVLHGRHPHDLEQSHIDTIASNKWLKIGNLFPETEGFIIAIQDQIINTKNYRKFIIKDPTITNDKCRKCHSQPETIQHITGACTTLTQTDYTHRHNQVANVIHQKLALKYKLVQDTNTPYYKYVPQTILENTTHKLYYDRAILTDRTVHYNRPDITLQDKVNKVTYLIDIAVPNTHNLQKTIGEKISKYVELKEEVSRIWRQEKVYVVPIVVSTTGVIPNHLHHSLKQIDLKDSIYITLQKAAILNTCRIVRKFMQIDENEISPHNINSS

SEQ ID NO: 21643 - protein, 1281 aa, Parnara guttata
METRSKSKRIGPLPGGNRRGTPGADAGCHSMRTVSGEELSGRTPSGYPEDTTAYHTDNNSSLNSPVTIHEPFSPSTASYIPSPVSSLGENLRETPTPVLSVAQEANAFLPASTKAGKPRVRMKWSKETNIFIMRTYYYITKLETDMTTYRKQLHELFSHQYPEIQVTEQRISDQRRTIVRNRLLPLDVINQIKEEVRRNLELNINDPDIESRPRTQHATITPSHIPSITQTQQDNHTERLHISTQTLNETLTLENDIDILVDCNPSKEQLADVLNTKLRTAIIKYSGMDPSKRPKLPKLKYSYKLNHLINIFNQFIIHQFISNETQITDIHSLVYCIAVVIAEELEYKIRENANPTGPKINKPSWEIRLERDVEKLRADIGRVTQYINNNRSNRIVKKVEQIFKKRLRHTTYENNNKTPEEFLDTLKQNLIIKANRLKRYKKAQQRKNDNILFTANEKIFYRNLGKPKNNTNTSENTEAPTQIELERFWSDMWEQEIQHNDKAHWIEQEESRWSSVKEMEFEEVTEEDIRNVTARLHNWKSPGIDRIHNFWYKKLTSLHKCLAKNLTHIILGKQNIPHFLATGITYMLPKNTFTSEPSQYRPITCLPTIYKILTSVITKKINVHIEHNHIIAEEQKGCRRGHMGCKEQLVIDSTIHKQASTKNKNLHCTYIDYKKAFDSIPHSWLLKILQIYKISPNIINFIRNIIPHWKTSLHLNNNNQVITTRTIYIKKGIYQGDSLSPLWFCLAMNPLSYLLQQCHAGYNIDGKNKEKAISHLIYMDDIKLYSKTQKEMQTLIETTTEFSRDINMEFGVDKCRTLHIIRGKIQPGDYAINEFTNITAMEATDMYKYLGYNQLKGLDHTQIKQTLTTEYKRRMHSICNRQLSGKNIIKALNTYAVPILTYSFGVIKWSNTDINAIERMTRTTLTKHKYLHPKSAIERLTIKRDRGGRGFIDVHQLWQKQIQNLQHFFHTKSQTSNIHKVILQNDINYTPLNLSEYNKNVGNIDSSDPQIGKIDRWKKKTLHGRHPHDLEQTHIDPIASNKWLKIGNLFPETEGFIIAIQDQVINTKNYRKFITKDNSIKDDKCRKCHTQPETIQHITGACTVLTQTDYTHRHNQIVNIIHQKLALKHNLIQYTNTPYYKYIPSTVLENNTHKLYYDRTILTDKTIYCNRPDITLIDKINNTTYLIDVAVPNTHNIQKTISEKISKYTELKEEVARIWKQKKVYIVPIVLSTTGVIPKHLHLSLKLIDLKENLYMILQKAAILNTCRIVRKFLQLEENED

SEQ ID NO: 21644 - protein, 1004 aa, Thymelicus lineola
MDPTARPKLPKLKHSYKLTHLVNIFNQKIIHQFISNESRTLDIHTLIYCIALVIAEELGYNITENTNNNFARPKSLNKPRWQIRLERDIDKLRADIGRLTQYINNNRSKKIVKKVEEIFKRKIVHTRHENYNNKPEEFLDTLKQKLTLKSNRLKRYNKAQQRKNDNGLFIANEKVFYRNLQKPKNCNSSTENKETPTGAQLETFWSGIWEKPVQHNEKAEWIIQEENRWNTIEEMRFEAITETDIAIVTSKLHNWKTPGTDSIHNFWYKKLTSLHKCLAKNLTDIVLGKQAVPEFIATGITYMLPKTTHTSDPSQYRPITCLPTIYKILTSAIARKINTHIEHNNIIAEEQKGCRKGHMGCKEQLVIDSIIHKNATAKNRNLHCTYIDYKKAFDSIPHSWLLQILRIYKINQKIINFLHNIIPLWKTSLQLNNHNQTIKTRAIYIKKGIYQGDSLSPLWFCLALNPLSHLLYQCHAGYSLSYATEKTIISHLIYMDDIKLYSKTQKEMKILLETTTEFSKDINMEFGLDKCKTLHIIRGKVQPGDYEIDENDSIKAMEANDMYKYLGYKQLKGLDHTQTKHTITNEYRSRINRICKTQLTGRNFIKALNTYAIPILTYSFGVIKWSNTDIEQIERNTRTTLTKHNYLHPKSAIERLTIKRHRGGRGLIDIHHLWQKQISNLKHFFHNKSLVSHIHKAIVKNDFNYTPLNLGEYQNTISTFDKRDPQIPKIENWKKKTLHGRHPHDLEQTHIDSIASNKWLHVGNIFPETEGFIIAIQDQIINTKNYRKYIIKDNSITNDKCRKCHTQSETIQHITGACTTLTQTDYTHRHNQIVNIIHQKLALKHNLIQNTSTPYYKYTPPTILENTTHKLYYDRAILTDKTIYCNRPDITLQDKCNKTTYLIDIAVPNTHNLQKTISEKISKYTELKEEVTRIWKQEKVYIVPIVLSTTGVIPKHLFHSLKLIDLKENIYITLQKAAILNTCRIVRKFLQIDENEHHHITPGN

SEQ ID NO: 21645 - protein, 1303 aa, Mythimna ferrago
METRSKSKRIGPLPGGDRRGAPGADAGCHSMRTVSGEELSRRAPTDKDTTAEIIDDADRLTNRTDTPVEPYSPSTVSYTPSRTSSISSSPTFISLNSAPTTPALNVAREVSTFLPASTKAGKARVRMRWSKEVNLFIMRTYLYITKLETDMTTYRQQLHAIFSRQYPEITVTEQRISDQRRSIIRNKLLSQDIIDKIKEEVRTQLLQEDLVNTPSDNIITQNLSENSQSELAQTLTQLPLNQSQPYTRISHTSTQTEYLTLTLENDVETLIIGDQNFTTDTYIQEIHNKFRSTLAQYSGMNPASRPNLPKLKYTPKLFRLVNLFNDNILQQFLSDDAHLLDLHLIIYCTAVVISEELNFKITDSTRNTSKRKNVEPAWQQRLVKDIEKLRADCGRLTQYINGSRSNKVAKRVEAIFRSYFTHTRHENSNRKPEEFLDTLKQKLALKVHRLRRYKKAQQRKNDNAIFSTNEKIFYRNINKPHTDTNNVNSTNSTNQLTSPTKEQLETYWSSIWEEQIQHNDEAHWIEEESAKWRDIDEMEFKEVTESDITHITARLHNWKSPGIDKIHNFWYKKLTSIHKYLAKNLTDIILGQQDIPEFITTGITYMIPKTKFAPQPSQYRPITCLPTIYKILTSAITRKINSLIEHNNIIAEEQKGCRQGHMGCKEQLIIDSTIHKHATTKNRNLHCTYIDYKKAFDSVPHSWLIKILKIYRINSEIIDFLRRIMLQWKTTLQINCSNNVITTRQIFIKKGIYQGDSLSPMWFCLALNPLSHLLQSSKFGYCLKHTTEETTISHLIYMDDIKLYAKTENEMKKLVDITAAFSKDINMQFGLDKCKTLHIVRGKVRPGDYVVNNTDAITAMEPTYLYKYLGYEQLKGLDHVRIKSTLITEFKRRLNAVCKTHLSSKNLIKAINTFAIPVLTYSFGVIKWTKTDTEQLERITRTTLTKHNNLHPKSAVERLTVKRQYGGRGLIDIQYLWRKQVRRLKTFFYTKSRTSSIHKAIVTNDLNSTPLNLNNNQTEIDTITNDDPQAQKIEDWKKKVLHGRHPHDLEQSHINKLASNKWLIIGNLFPETEGFIIAIQDQIINTKNYRKYIIKDPRVTNDKCRKCHIQPETIQHITGACTTLTQTDYTHRHNQVANVIHQKLALKYSLIQNANTPYYNYVPQTILENTTHKLYYDRAILTDKTIYYNRPDVILQDKVNKVTYLIDIAVPNTHNIQKTISEKISKYAELKEEIVRIWRQEKVYVVPIVLSATGVIPNHLLHSLKLLDLKETLYITLQKAAILNTCRIVRKFMQIEENDHTTH

SEQ ID NO: 21646 - protein, 1282 aa, Colias croceus
METRLSKRKRIGSLPGGDRRGTPGADAGCFSMRTVSGEELSRRASTDKNTTAEHYDENDAPTDRANTPEEPYSPSTISYTPSASSSPSTTCLNPCSPTPTLDVAREANAFLPASTKAGKPRVRMRWSKDVNIFIMRTYYYITKLETDFTIYRKQLHELFTQEYPEINVSEQRISDQRRTIVRNKLLDQETLNRLKEEVQVKLQTEIQNTETNELIAPIYTPTDNMILSTYSLSQSPTQSSHIFTQTESTTLTLENDTVIRTDNNNMTENELVQDLYDKFREVQTQYSEIDPTVRPKLPKLRYSPQLDQLVKIFNSQILGQFINDELQLKDIHTIIYCTALVISEKLNYKIINNRQDAKSKNYRKPPWEIRLEKDIEKLRADCGRLTQYINNNRSKKLVKKVEAIFKTRLTHTRHENNNKKPEEFLDTLKQKLALKVHRLKRYKKAQQRKNDNKMFATNEKQFYRNLQKPKTGIHREDNQNIPTVQQLEDFWAGIWEQQVEHNDKADWISEETEKWSSIEEMEFVEITEADIRNITARLHNWKSPGVDRIHNYWYKKLIVLHKSLAKNLSDIIKGHQNIPEFITTGITYMLPKTDYSPLPSQYRPITCLPTIYKILTSAITVKINSHIERYNIIAEEQKGCRRGHMGCKEQLIIDSTIHKHATTKNRNLHCTYIDYKKAFDSIPHTWLIQILKMYKVNSKLVDFLQNIMTQWKTTLHLSTHHINISTREIFIRKGIYQGDSLSPMWFCLALNPLSHLLQNSKAGYYFKRNVEETVISHLIYMDDIKLYAKSDRDMKKLVDITARFSKDIKMEFGLDKCKTLHIIKGKVRPGDYEIENGETIAAIEPTDLYKYLGYKQLKGLDHSTIKKTLITEYKKRLSLLCKTQLSGKALIKSINTYAIPILTYSFGIIKWSKTNIETIERNTRTILTKYNNLHPKSAIERLTIKREHGGRGLIDIRHLWKKQISKLKIFFQSKSRTSSIHQTILQHDHKYTPLNLIENTDIPNIDADPTKRKIEDWRKKVLHGRHPHDLAQPHIDTIASNKWLKIGNLFPETEGFMIAIQDQIINTRNYRKYIIKDPTIANDKCRKCNIQSETIQHITGACTTLTQTDYTHRHNQVSNIIHQKLAIKHKLIHNTNTPYYKYTPETVLENDHYKLYYDRAILTDRTIHFNRPDITLQDKRNKTTYLIDIAVPNTHNIQKTISEKINKYNDLKEEVVRIWRQDKVYIVPIVLSTTGVIPKHLKQSLKQIHLEETVFIQLQKAVILNTCRIVRRFLQIEENDNT

SEQ ID NO: 21647 - protein, 1282 aa, Colias croceus
METRLSKRKRIGSLPGGDRRGTPGADAGCFSMRTVSGEELSRRASTDKNTTAEHYDENDAPTDRANTPEEPYSPSIISYTPSASSSPSTTSLNPCSPTPTLDVAREANAFLPASTKAGKPRVRMRWSKDVNIFIMRTYYYITKLETDFTIYRKQLHELFTQEYPEINVSEQRISDQRRTIVRNKLLDQETLNRLKEEVQEKLQTEIQNTETNELIAPIYTPTDNMILSTYSLSQSPTQSSHIFTQTESTTLTLENDTVIRTDNNNMTENELVQDLYDKFREVQTQYSEIDPTVRPKLPKLRFSPQLDQLVKIFNSQILGQFINDELQLKDIHTIIYCTALVISEKLNYKIINNRQDPKSKNYRKPPWEIRLEKDIEKLRADCGRLTQYINNNRSKKLVKKVEAIFKTRLTHTRHENNNKKPEEFLDTLKQKLALKVHRLKRYKKAQQRKNDNKMFATNEKQFYRNLQKPKTGIHREDNQNIPTVQQLEDFWAGIWEQQVEHNDKADWISEETEKWSSIEDMEFVEITESDIRNITARLHNWKSPGVDRIHNYWYKKLIVLHKSLAKNLSDIIKGHQNIPEFITTGITYMLPKTDYSPLPSQYRPITCLPTIYKILTSAITVKINSHIERYNIIAEEQKGCRRGHMGCKEQLIIDSTIHKHATTKNRNLHCTYIDYKKAFDSIPHTWLIQILKIYKVNSKLVDFLQNIMTQWKTTLHLSTHHVNISTREIFIRKGIYQGDSLSPMWFCLALNPLSHLLQNSKAGYYFKRNVEETVISHLIYMDDIKLYAKSDRDMKKLVDITARFSKDIKMEFGLDKCKTLHIIKGKVRPGDYEIENGETIAAIEPTDLYKYLGYKQLKGLDHSTIKKTLITEYKKRLSLLCKTQLSGKALIKSINTYAIPILTYSFGIIKWSKTNIETIERNTRTILTKYNNLHPKSAIERLTIKREHGGRGLIDIRHLWKKQISKLKIFFQSKSRTSSIHQTILQHDHKYTPLNLIENTDIPNIDADPTKRKIEDWRKKDLHGRHPHDLTQPHIDTIASNKWLKIGNLFPETEGFMIAIQDQIINTRNYRKYIIKDPTIANDKCRKCNTQSETIQHITGACTTLTQTDYTHRHYQVSNIIHQKLAIKHKLIHNTNTPYYKYTPETALENDHYKLYYDRAILTDRTIHFNRPDITLQDKRNKTTYLIDIAVPNTHNIQKTISEKINKYNDLKEEVVRIWRQDKVYIVPIVLSTTGVIPKHLKQSLKQIHLEETVFIQLQKAVILNTCRIVRRFLQIEENDNT

SEQ ID NO: 21648 - protein, 1282 aa, Colias croceus
METRLSKRKRIGSLPGGDRRGTPGADAGCFSMRTVSGEELSRRASTDKNTTAEHYDENDAPTDRANTPEEPYSPSTISYTPSASSSPSTTSLNPCSPTPTLDVAREANAFLPASTKAGKPRVRMRWSKDVNIFIMRTYYYITKLETDFTIYRKQLHELFTQEYPEINVSEQRISDQRRTIVRNKLLDQETLNRLKEEVQEKLQTEIQNTETNELIAPIYTPTDNMILSSYSLSQSPTQSSHIFTQTESTTLTLENDTVIRTDNNNMTENELVQDLYDKFREVQTQYSEIDPTVRPKLPKLRYSPQLDQLVKIFNSQILGQFINDELQLKDIHTIIYCTALVISEKLNYKIINNRQDPKSKNYRKPPWEIRLEKDIEKLRADCGRLTQYINNNRSKKLVKKVEAIFKTRLTHTRHENNNKKPEEFLDTLKQKLALKVHRLKRYKKAQQRKNDNKMFATNEKQFYRNLQKPKTGIHREDNQNIPTVQQLEDFWAGIWEQQVEHNDKADWISEETEKWSSIEDMEFVEITESDIRNITARLHNWKSPGVDRIHNYWYKKLIVLHKSLAKNLSDIIKGHQNIPEFITTGITYMLPKTDYSPLPSQYRPITCLPTIYKILTSAITVKINSHIERYNIIAEEQKGCRRGHMGCKEQLIIDSTIHKHATTKNRNLHCTYIDYKKAFDSIPHTWLIQILKIYKVNSKLVDFLQNIMTQWKTTLHLSTHHVNISTREIFIRKGIYQGDSLSPMWFGLALSPLSHLLQNSKAGYYFKRNVEETVISHLIYMDDIKLYAKSDRDMKKLVDITARFSKDIKMEFGLDKCKTLHIIKGKVRPGDYEIENGETIAAIEPTDLYKYLGYKQLKGLDHSTIKKTLITEYKKRLSLLCKTQLSGKALIKSINTYAIPILTYSFGIIKWSKTNIETIERNTRTILTKYNNLHPKSAIERLTIKREHGGRGLIDIRHLWKKQISKLKIFFQSKSRTSSIHQTILQHDHKYTPLNLIENTDIPNIDADPTKRKIEDWRKKVLHGRHPHDLTQPHIDTIASNKWLKIGNLFPETEGFMIAIQDQIINTRNYRKYIIKDPTIANDKCRKCNTQSETIQHITGACTTLTQTDYTHRHNQVSNIIHQKLAIKHKLIHNTNTPYYKYTPETVLENDHYKLYYDRAILTDRTIHFNRPDITLQDKRNKTTYLIDIAVPNTHNIQKTISEKINKYNDLKEEVVRIWRQDKVYIVPIVLSTTGVIPKHLKQSLKQIHLEETVFIQLQKAVILNTCRIVRRFLQIEENDNT

SEQ ID NO: 21649 - protein, 1317 aa, Ochropleura plecta
METRSKNKRIGPLPGGDRRGAPGADAGCHSMRTVSGEELNRRAPTDKDTTAEIIDDGDRLTDRTDTPVEPYSPSTVSYTPSRPSSPSISSSPTLSTHPIITLNTVSPTPTLNAARGVSTFLPASTKAGKARVRMRWSKEVNLFIMRTYFYITKLETDMTTYRKQLHELFTQQYPEITVSEQRISDQRRAIVRNKLLSQAIIDQLKEDIRVQLQADDNTTPLLENLTDIAQQPQTQLNTQSQPNIQSQLYNQSQANTQTSHTSTQTEYITFTLENDIETLVVENHNPTTDTYIQEIHDKFRTTLSQYSGMDPAIRPKLPKLRYSPNLFRLVNLFNENILNQFISDETQLIDIHTLIYCTAVVISEELNFKITQNTENPRPKQNIKPAWQQRLEKDIEQLRADIGRLTQYINNNRSSKVVRRVETIFRTHLVHTRHENNNRKPEEFLDTIKQKLALKVHRLRRYKKAQQRKNDNAIFATNEKIFYRNLNKPNTDTHYDTNTDTPTQPTKEQLETYWASIWEQQARHNDEAAWITEEETKWKAIDEMEFVEVTEADITHITGRLHNWKSPGIDKVHNFWFKKLTSLYKPIARNLTQIILGQQNAPEFIATGLTYMLPKTKNSPQPSQYRPITCLPTIYKILTSAISTKINTHIEQHNIMAEEQKGCRRGHMGCKEQLIIDSTIHKHATTKNRNLHCTYIDYKKAFDSVPHSWLIQILKIYRVNSKIIDFLSNIMSQWKTTLQINCNQNSITTRQIFIKNGIYQGDSLSPLWFCLALNPLSHLLQRCQAGYRLKHTTEQTTISHLIYMDDIKLYAQTEKDMKKLVEATADFSQDINMQFGLDKCKTLHIIRGKIRPGNYVVNNTDTITAMEPSDLYKYLGYTQLKGLDHVRIKETLTAEYKRRLNVVCKTQLSGKNLIKALNTFAIPILTYSFGVIKWTKTDTEQLERTTRTTLTKHNNLHPKSAIERLTIKRQNGGRGLIDIQHLWRKQVCRLKTFFHTKSHTSNIHKAIVQNDHNYTPLNLNEQLDHTSHNTNEDPQTQKIYDWKKKVLHGRHPYDLEQTHVNKDASNKWLKIGNLFPETEGFIIAIQDQIINTKNYRKFIIKDPSVTNDKCRKCHTQPETIQHITGACTTLTQTDYTHRHNQVANVIHQRLAVQYTLIQDTNTPYYNYTPQATLENDTHKLYYDRAILTDRTIHYNRPDIILQDKINKITYLIDIAVPNTHNIQKTITEKISKYAELKEEVTRIWRQEKVYVVPIVLSTTGVIPNHLLHSLKLLSLKETLYITLQKAAILNTCRIVRKFMQIEENEIGPHHNTPHTST

SEQ ID NO: 21650 - protein, 1310 aa, Furcula furcula
METRSRKKLRGPLPGGDRRGAPGADAGCFSIRTVSGEELSRRTPTGSSENVTADHDHHNVLTDRRTNSPEEPYSPSTVSYAPSVRTSPSLDSDSPLSTLDVAREANAFLPTSTKAGKPRVRMSWSNDVNLFIMRTYYYITKLETDLTIYRKKLHEIFSQRYPEVKVSEQRLSDQKRAIIRNRLLSQEILDQLKEEIRRRLREKSDDVHRTRPYDEYPNNTPSSPNPHTESVFLTQLPFTEPDTGAQTYSLNTQITHTSTQTETITLTLESDIETVVDINPITETNIQNIHDKFITTLTKYSGMDPTARPKLPKLKYSPKLTELIEIFNKKILDLFLTEDTQLINIHTLIYCTAIVISEELKFKVTEANTKHTRPRNVNKPPWQHRLEKDIEKLRADCGRLTQYINNNRSDRVVKKVEEIFRNRRTHTRHENDNIKPEEFLDTLKQKLAVKVHRLKRYKKSQQRKDDNRTFATNEKTFYRNLQVLKTNNPINNNEETPTKEELEMFWSGIWEEQTQHDDNANWIKEEEERWSNIEEMEFTEITESDIKIITDRLHNWKSPGIDKIHNFWYKKLTTLHKLLAKNLTDIILKKQNIPEFMATGVTYMIPKTKHSSQPSQYRPITCLPTIYKILTSAITLKINTHIEKYHIMAEEQKGCRRGHMGCKEQLVIDSTIHKHATTKNRNLHCTYIDYKKAFDSIPHSWLIQILGIYKINNNIIGFLQHIMTYWKTTLHLNNHHDSVVTREIFIKKGIYQGDSLSPMWFCLALNPLSHLLHRCRAGYHLKNDADDITISHLVYMDDIKLYAKTHKDMEKLIKATTQFSTDINMQFGLDKCRTLHIIRGKVRPGNYAIGDDESIKAMDSSDLYKYLGYRQLKGLDHTNIKNTLNMEFKKRLNAICKSQLTGKHLIKALNAYAIPILTYSFGVIKWSKTDIEQIERTIRTTLTKHNHLHPKSAIERLTIKRQNGGRGLIDIHHLWQKQIYTLRSFFHEKSLVSDIHKAVTHNDNNFTPLNLREHTGISPTTNTNVNDSQLQKLSNWKRKVLHGRHPHDLEQSHIDKLASNEWLKIGNLFPETEGFIIAIQDQIINTKNYRKYIIKDASLINDKCRKCHTQSETIQHITGACTNLTQTDYTHRHNQISNIIHQHLAIKHELIQNTNTPYYKYTPQTVLENSSHKLYYDRAILTDRTIHYNRPDIILQDKINKITYLIDIAVPNTHNIQKTIAEKLNKYAELKEEVTRIWKQEKVFVVPIVLSTTGVIPYHLHHSLKLLGIKKSLFITLQKAAILNTCRIVRKFLQIDENEVVHNHATTSII

SEQ ID NO: 21651 - protein, 807 aa, Furcula furcula
MFWSGIWEEQTQHDDNANWIKEEEERWSNIEEMEFTEITESDIKIITDRLHNWKSPGIDKIHNFWYKKLTTLHKLLAKNLTDIILKKQNIPEFMATGVTYMIPKTKHSSQPSQYRPITCLPTIYKILTSAITLKINTHIEKYHIMAEEQKGCRRGHMGCKEQLVIDSTIHKHATTKNRNLHCTYIDYKKAFDSIPHSWLIQILGIYKINNNIIGFLQHIMTYWKTTLHLNNHHDSVVTREIFIKKGIYQGDSLSPMWFCLALNPLSHLLHRCRAGYHLKNDADDITISHLVYMDDIKLYAKTHKDMEKLIKATTQFSTDINMQFGLDKCRTLHIIRGKVRPGNYAIGDDESIKAMDSSDLYKYLGYRQLKGLDHTNIKNTLNMEFKKRLNAICKSQLTGKHLIKALNAYAIPILTYSFGVIKWSKTDIEQIERTIRTTLTKHNHLHPKSAIERLTIKRQNGGRGLIDIHHLWQKQIYTLRSFFHEKSLVSDIHKAVTHNDNNFTPLNLREHTGISPTTNTNVNDSQLQKLSNWKRKVLHGRHPHDLEQSHIDKLASNEWLKIGNLFPETEGFIIAIQDQIINTKNYRKYIIKDASLINDKCRKCHTQSETIQHITGACTNLTQTDYTHRHNQISNIIHQHLAIKHELIQNTNTPYYKYTPQTVLENSSHKLYYDRAILTDRTIHYNRPDIILQDKINKITYLIDIAVPNTHNIQKTIAEKLNKYAELKEEVTRIWKQEKVFVVPIVLSTTGVIPYHLHHSLKLLGIKKSLFITLQKAAILNTCRIVRKFLQIDENEVVHNHATTSII

SEQ ID NO: 21652 - protein, 1317 aa, Ochropleura plecta
METRSKNKRIGPLPGGDRRGAPGADAGCHSMRTVSGEELNRRAPTDKDTTAEIIDDGDRLTDRTDTPVEPYSPSTVSYTPSRPSSPSISSSPTLSTHPIITLNTVSPTPTLNAAREVSTFLPASTKAGKARVRMKWSKEVNLFIMRTYFYITKLETDMTTYRKQLHELFTQQYPEITVSEQRISDQRRAIVRNKLLSQAIIDQLKEDIRVQLQADDNTTPLLENLTDIAQQPQTQLNTQSQPNIQSQLYIQSQANTQTSHTSTQTEYITFTLENDIETLVVENHNPTTDTYIQEIHDKFRTTLSQYSGMDPAIRPKLPKLRYSPNLFRLVNLFNENILNQFISDETQLIDIHTLIYCTAVVISEELNFKITQNTGNPRPKQNIKPAWQQRLEKDIEQLRADIGRLTQYINNNRSSKVVRRVEAIFRTHLVHTRHENNNRKPEEFLDTIKQKLALKVHRLRRYKKAQQRKNDNAIFATNEKIFYRNLSKPNTDTHYDTNTDTPTQPTKEQLETYWASIWEQQARHNDEAAWITEEETKWKAIDEMEFVEVTEADITHITGRLHNWKSPGIDKVHNFWFKKLTSLYKPIARNLTQIILGQQNAPEFIATGITYMLPKTKNSPQPSQYRPITCLPTIYKILTSAISTKINTHIEQHNIMAEEQKGCRRGHMGCKEQLIIDSTIHKHATTKNRNLHCTYIDYKKAFDSVPHSWLIQILKIYRVNSKIIDFLSNIMSQWKTTLQINCNQNSITTRQILIKNGIYQGDSLSPLWFCLALNPLSHLLQRCQAGYRLKHTTEQTTISHLIYMDDIKLYAQTEKDMKKLVEVTADFSQDINMQFGLDKCKTLHIIRGKIRPGNYVVNNTDTITAMEPSDLYKYLGYTQLKGLDHVRIKETLTAEYKRRLNVVCKTQLSGKNLIKALNTFAIPILTYSFGVIKWTKTDTQQLERTTRTTLTKHNNLHPKSAIERLTIKRQNGGRGLIDIQHLWRKQVCRLKTFFHTKSHTSNIHKAIVQNDHNYTPLNLNEQLDHTSHNTNEDPQTQKIDDWKKKVLHGRHPYDLEQTHVNKDASNKWLKIGNLFPETEGFIIAIQDQIINTKNYRKFIIKDPSVTNDKCRKCHTQPETIQHITGACTTLTQTDYTHRHNQVANVIHQRLAVQYTLIQDTNTPYYNYTPQATLENDTHKLYYDRAILTDRTIHYNRPDIILQDKINKITYLIDIAVPNTHNIQKTITEKISKYAELKEEVTRIWRQEKVYVVPIVLSTTGVIPNHLLHSLKLLSLKETLYITLQKAAILNTCRIVRKFMQIEENEIGPHHNTPHTST

SEQ ID NO: 21653 - protein, 1319 aa, Boloria selene
METRSKSKRIGPLPGGDRRGTPGADAGCHSMRTVSGEELSRRAPTDKDATAEITDDGDRYSNKTDTPTEPYSPSTASYTPSRTLSPSKQSSPSMPSSSPIISLDTVPPKLALTVARGANAFLPASTKAGKARVRMTWSQDVNLFIMRTYLHITKLETDMTTYRQQLHALFSRQYPEITVSEQRISDQRRTIVRNKLLSQEVIEQLKEEVRAILIQEDSENHENTNAITLIQNTNKKQPMSLSQEQHSTQSQPQNHSRTYLQTSHICTNTPHTCTQTSHTSTQTESLTLTLENDIQTMADVEHNLAPDAYYIQEIHDKYRTTLTHYAGMDPAARPKLPKLKYTPTLFRLVNLFNKNILPQFLSDDTQLTDLHTLIYCTALVISEELNFKITEHTTNTRPRNKIKPPWQLRLEKDIEKLRADCGRLTQYINNNRSQKVVKRVETIFRNELIHTRHESSNRTPKDFLDTLKQKLALKVGRLKRYMKGQQRKKDNAIFAMNEKSFYRNIQTPQNEPTTAINTDTPTKENLERFWSSIWEDPVQHNNKAPWIAEEEEKWRMVEVMEFTQITESDITNITARLHNWKAPGIDKIHNFWYKKLTILHKYIAKNLTNIILGQQNIPDFIATGITYMLPKAKYTSEPSQYRPITCLPTIYKILTSAITTKINSHIEHHSIIAEEQKGCRRGHMGCKEQLIIDSTIHKHATTKNRNLHCTYIDYQKAFDSIPHSWLIKILEIYKVNPKIVDFLRIIMTHWKTTLQLNTIITRQIHIRKGIYQGDSLSPLWFCLALNPLSHLLHQCRAGYNFKNNSNETIISHLIYMDDIKLYAKNEKEMKTLLKTTTKFSTDINMQFGLDKCRTLHIIKGKIKPGNYTVNDTDTITAMEATDLYKYLGYKQLKGINHTEVKHALNTEYRRRVNAVCKTKLSGKHLIKALNTFAIPVLTYSFGVIKWSKTDIDQIEISTRTILTKHNNLHPKSAIERLTIKRQNGGRGLTDIQHLWQKQINNLRTFFYTKSHTSDIHKAIILNDFNYTPLNLNDQNTPVTNNTDPQKQKFENWKRKVLHGRHPHDLEQSHINIEASNKWLKIGNLFPETEGFMIAIQDQIINTKNYRKYIIKDPTAVNDKCRRCHIQPETIQHITGACTALTQTDYTHRHNQVVNIIHQKLALKHALIQNTNTPYYNYSPHTILENDTHKLYYDRAILTDKTIHYNRPDITLQDKKRKTTYLIDIAVPNTHNIQKTISEKISKYAELKEEVARIWKQEKVYVIPIVLSTTGVIPNHLMHSLKLLDLEETVFISLQKAAILNTCRIVRKVMQLEEENTFTF

SEQ ID NO: 21654 - protein, 1311 aa, Hydraecia micacea
METRSKRKRIGPLPGGDRRGTLGADAECFSMRTVSGEELNRRAPTDKDATAEVIDDDDRLTNKTDTPVEPYSPSTVSYAPSRTPSPSIPSSPIPSSSPITSFNTVSSTPALNVAREVSTFLPASTKAGKTRVRMRWSKEVNLFIMRTYLYITKLETDMTTYRQQLHERFSRQYPEISVSEQRISDQRRTIVRNKLLSQVELDQLKEEVSTQLQQESETYADTNTIILTQNTNVNILQEQPQSLTQLHSNSQLLTYNQSQAYTQTAHISTQTESLTLTLENDIETLVVADQNLTTDTYIQEIRDKFRTTLTQYSGMDPAARPKLPKLKYSPNLFRLVNLFNEDILKQFFSNDTQLIDIHTLIYCTAVVISEELNYKITEHARNTIQRDTAKQPWQQRLEKDIEKLRADCGRLTHYINGSRSHKVVKRVEAIFKNNFTHTRHENNNRKPEEFLDTLKQKLALKVHRLRRYLKAQQRKKDNAIFATNEKIFYRNIQKPHTVSTTQNDTDTPSKEHLETFWSNIWEEQVHHNDKATWITEEATKWRAIDEMEFTEITEAEITYLTSRLHNWKSPGIDKIQNFWYKKLTVLHKSIAKNLTGIVLGEQNIPEFIATGITYMLPKSKYTSEPSQYRPITCLPTIYKILTSAITNKINSHIEHHNMIAEEQKGCRRGHMGCKEQLVIDSTIHKHATTKNRNLHCTYIDYQKAFDSIPHSWLIQILQIYKINSKIIDFLRIVMTRWKTTLQINNNRLSTLITRQIHIRKGIYQGDSLSPLWFCLALNPLSHLLNRCRAGYNFKNNTEETIISHLIYMDDIKLYAKTEKEMKTLIEITTTFSQDINMQFGLDKCRTLHIIKGKVKPGNYAVSDTDTIAAMEPSDLYKYLGYKQLKGFDHTAIKQTLNTEYRRRINAICKTQLSGKHLIKALNTFAIPILTYSFGVIKWSKTDIEQLERTTRTTLTKHNNLHPKSAIERLTIKRQNGGRGLIDIHHLWQKQITRLKTFFYTKSRTSNIHKAITLNDFNYTPLNLNEQNIQDINITDPQNQKIENWKKKVLHGRHPHDLEQSHINKLASNKWLKIGNLFPETEGFIMAIQDQIINTKNYRKFIIKDPTITNDKCRRCHIQSETIQHITGACITLTQTDYTHRHNQVANIVHQKLALKHGLIQNTNTPYYKYAPQTILENDTHKLYYDRAILTDRTIHYNRPDITLQDKISKITYLIDIAVPNTHNLQKTIAEKISKYADLKEEVIRIWRQDKVYVVPVVLSTTGVIPNHLLRSLKLIDLEESLYINLQKAAILNTCRIVRKFMQLDESTLLSS

SEQ ID NO: 21655 - protein, 763 aa, Griposia aprilina
MEFKEITESEITYLTARLHNWKSPGIDKIQNFWYKKLTILHISIAKNLTDIVLGEQNIPEFIATGITYMLPKTKYTSEPSQYRPITCLPTIYKILTSALTNKITSHIEHHNMIAEEQKGCRRGHMGCKEQLIIDSTIHKHATTKNRNLHCTYIDYQKAFDSIPHSWLIQILEIYKINSKIIDFLRIVMTRWKTTLQINNRLSTLITRQINIRKGIYQGDSLSPLWFCLALNPLSHLLNRCRAGYNFKNNTEEIIVSHLIYMDDIKLYAKTEKEMKSLIEVTTTFSQDINMQFGLDKCRTLHIIKGKVKPGNYAVSDTDTIAAMEPTDIYKYLGYKQLKGLDHTSIKQTLNTEYRRRINAICKTQLSGKHLIKALNTFAIPILTYSFGVIKWSKTDIEQLERTTRTTLTKHNNLHPKSAIERLTIKRQNGGRGLIDIQHLWQKQITRLKTFFYTKSLTSNIHKAITLNDFNYTPLNLNEQNIQDINITDPQNQKIENWKKKVLHGRHPHDLEQSHINKLASNKWLKIGNFFPETEGFIIAIQDQIINTKNYRKFIIKDPTITNDKCRRCHIQSETIQHVTGACITLTQTDYTHRHNQVANIIHQKLALKHSLIQNTNTPYYKYTPQTILENDTHKLYYDRAILTDRTIHFNRPDITLQDKITKTTYLIDIAVPNTHNLQKTIAEKISKYVDLKEEVTRIWRQDKVYVVPVVLSTTGVIPNHLLRSLKLIDLEESLYINLQKAAILNTCRIVRKFMQLDESTFSP

SEQ ID NO: 21656 - protein, 1309 aa, Griposia aprilina
METRSKRKRIGPLPGGDRRGALGADAKCLSMRPVRGEELNRRAPTDKDATAEAIDDGDRLTNRTDTPVEPYSPSTVSYAPSRTSSPSIPSSPISSSPPLTSLNTVSPTLALNVAREVSTFLPASTKAGKARVRMRWSKEVNLFIMRTYLYITKLETDMTTYRQQLHERFSRQYPEISVSEQRISDQRRTIVRNKLLSQVELDQLKEEVRTQLRQESENYADTNIIILTHSTNEKIMQEQPQSLTQFHPNSQSLTNNQSQAHTQTAHTSTQTESLTLTFENDIESLVVTDQNLTTDSYIHEIYDKFRTTITQYSGMDPAVRPKLPKLKYTLNLFRLVNLFNESILIQFISDDTQLIDIHLLIYCTAVVISEELNFKITDHTGATRTSHIVKPAWQQRLEKDIEKLRADCGRLTHYINGIRSHKVVKRVEAIFQNYFTHTRHENNNRKPEEFLDTIKQKLALKVHRLRRYLKAQQRKKDNAIFSTNEKSFYRNIQKAHTDSTIENDTNTPSKEHLETFWSNIWEEHVHHNDKATWITEEATKWRAIDEMEFKEITESEITYLTARLHNWKSPGIDKIQNFWYKKLTILHKSIAKNLTDIVLGEQNIPEFIATGITYMLPKTKYTSEPSQYRPITCLPTIYKILTSALTNKITSHIEHHNMIAEEQKGCRRGHMGCKEQLIIDSTIHKHATTKNRNLHCTYIDYLKAFDSIPHSWLIQILEIYKINSKIIDFLRIVMTRWKTTLQINNRLSTLITRQINIRKGIYQGDSLSPLWFCLALNPLSHLLNRCRAGYNFKNNTEEIIVSHLIYMDDIKLYAKTEKEMKSLIEVTTTFGQDINMQFGLDKCRTLHIMKGKIKPGNYAVSDTDTIAAMEPTDIYKYLGYKQLKGLDHTSIKQTLNTEYRRRINAICKTQLSGKHLIKALNTFAIPILTYSFGVIKWSKTDIEQLERTTRTTLTKHNNLHPKSAIERLTIKRQNGGRGLIDIQHLWQKQITRLKTFFYTKSLTSNIHKAITLNDFNYTPLNLNEQNIQDINITDPQNQKIENWKKKVLHGRHAHDLEQSHINKLASNKWLKIGNLFPETEGFIIAIQDQIINTKNYRKFIIKDPTITNDKCRRCHIQSETIQHVTGACITLTQTDYTHRHNQVANIIHQKLALKHSLIQNTNTPYYKYTPQTILENDTHKLYYDRAILTDRTIYFNRPDITLQDKIRKTTYLIDIAVPNTHNLQKTIAEKISKYVDLKEEVTRIWRQDKVYVVPVVLSTTGVIPNHLLRSLKLIDLEESLYINLQKAAILNTCRIVRKFMQLDESTFSP

SEQ ID NO: 21657 - protein, 1310 aa, Hydraecia micacea
METRSKRKRIGPLPGGDRRGTLGADAECFSMRTVSGEELNRRAPTDKDATAEVIDDGDRLTNRTDTPVEPYSPSTVSYAPSRTSSPSIPSSPIPSSSPITSFNTVSSTPALNVAREVSTFLPASTKAGKTRVRMRWSKEVNLFIMRTYLYITKLETDMTTYRQQLHERFSRQYPEISVSEQRISDQRRTIVRNKLLSQVELDQLKEEVCTQLQQESETYADTNTIILTQNTNVNILQEQPQSLTQLHSNSQLLTYNQSQAYTQTAHISTQTESLTLTLENDIETLVVTDQNLTTDTYIQEIRDKFRTTLTQYSGMDPAARPKLPKLKYSPNLFRLVNLFNEDILKQFFSNDTQLIDIHTLIYCTAVVISEELNYKITEHARNTVQRDTAKQPWQQRLEKDIEKLRADCGRLTHYINGSRSHKVVKRVEAIFKNNFTHTRHENNNRKPEEFLDTLKQKLALKVHRLRRYLKAQQRKKDNAIFATNEKIFYRNIQKSHTVSITQNDTDTPSKEHLETFWSNIWEEQVHHNDKATWITEEATKWRAIDEMEFKEITESEITYLTSRLHNWKSPGIDKIQNFWYKKLTVLHKSIAKNLTGIVLGEQNIPEFIATGITYMLPKSKYTSEPSQYRPITCLPTIYKILTSAITNKINSHIEHHNMIAEEQKGCRRGHMGCKEQLVIDSTIHKHATTKNRNLHCTYIDYQKAFDSIPHSWLIQILQIYKINSKIIDFLRIVMTRWKTTLQINNRLSTLITRQIHIRKGIYQGDSLSPLWFCLALNPLSHLLNRCRAGYNFKNNTEETIISHLIYMDDIKLYAKTEKEMKTLIEITTTFSQDINMQFGLDKCRTLHIIKGKVKPGNYAVSDTDTIAAMEPSDLYKYLGYKQLKGFDHTAIKQTLNTEYRRRINAICKTQLSGKHLIKALNTFAIPILTYSFGVIKWSKTDIEQLERTTRTTLTKHNNLHPKSAIERLTIKRQNGGRGLIDIHHLWQKQITRLKTFFYTKSRTSNIHKAITLNDFNYTPLNLNEQNIQDINITDPQNQKIENWKKKVLHGRHPHDLEQSHINKLASNKWLKIGNLFPETEGFIMAIQDQIINTKNYRKFIIKDPTITNDKCRRCHIQSETIQHITGAYITLTQTDYTHRHNQVANIVHQKLALKHGLIQNTNTPYYKYAPQTILENDTHKLYYDRAILTDRTIHYNRPDITLQDKISKITYLIDIAVPNTHNLQKTIAEKISKYADLKEEVIRIWRQDKVYVVPVVVSTTGVIPNHLLRSLKLIDLEESLYINLQKAAILNTCRIVRKFMQLDESTLSSS

SEQ ID NO: 21658 - protein, 1310 aa, Hydraecia micacea
METRSKRKRIGPLPGGDRRGTLGADAECFSMRTVSGEELNRRAPTDKDATAEVIDDGDRLTNRTDTPVEPYSPSTVSYAPSRTSSPSIPSSPIPSSSPITSFNTVSSTPALNVAREVSTFLPASTKAGKTRVRMRWSKEVNLFIMRTYLYITKLETDMTTYRQQLHERFSRQYPEISVSEQRISDQRRTIVRNKLLSQVELDQLKEEVCTQLQQESETYADTNTIILTQNTNVNILQEQPQSLTQLHSNSQLLTYNQSQAYTQTAHISTQTESLTLTLENDIETLVVTDQNLTTDKYIQEIRDKFRTTLTQYSGMDPAARQKLPKLKYSPNLFRLVNLFNEDILKQFFSNDTQLIDIHTLIYCTAVVISEELNYKITEHARNTVQRDTAKQPWQQRLEKDIEKLRADCGRLTHYINGSRSHKVVKRVEAIFKNNFTHTRHENNNRKPEEFLDTLKQKLALKVHRLRRYLKAQQRKKDNAIFATNEKIFYRNIQKSHTVSITQNDTDTPSKEHLETFWSNIWEEQVHHNDKATWITEEATKWRAIDEMEFKEITESEITYLTSRLHNWKSPGIDKIQNFWYKKLTVLHKSIAKNLTGIVLGEQNIPEFIATGITYMLPKSKYTSEPSQYRPITCLPTIYKILTSAITNKINSHIEHHNMIAEEQKGCRRGHMGCKEQLVIDSTIHKHATTKNRNLHCTYIDYQKAFDSIPHSWLIQILQIYKINSKIIDFLRIVMTRWKTTLQINNRLSTLITRQIHIRKGIYQGDSLSPLWFCLALNPLSHLLNRCRAGYNFKNNTEETIISHLIYMDDIKLYAKTEKEMKTLIEITTTFSQDINMQFGLDKCRTLHIIKGKVKPGNYAVSDTDTIAAMEPSDLYKYLGYKQLKGFDHTAIKQTLNTEYRRRINAICKTQLSGKHLIKALNTFAIPILTYSFGVIKWSKTDIEQLERTTRTTLTKHNNLHPKSAIERLTIKRQNGGRGLIDIHHLWQKQITRLKTFFYTKSRTSNIHKAITLNDFNYTPLNLNEQNIQDINITDPQNQKIENWKKKVLHGRHPHDLEQSHINKLASNKWLKIGNLFPETEGFIMAIQDQIINTKNYRKFIIKDPTITNDKCRRCHIQSETIQHITGACITLTQTDYTHRHNQVANIVHQKLALKHGLIQNTNTPYYKYAPQTILENDTHKLYYDRAILTDRTIHYNRPDITLQDKISKITYLIDIAVPNTHNLQKTIAEKISKYADLKEEVIRIWRQDKVYVVPVVVSTTGVIPNHLLRSLKLIDLEESLYINLQKAAILNTCRIVRKFMQLDESTLSSS

SEQ ID NO: 21659 - protein, 1311 aa, Griposia aprilina
METRSKRKRIGPLPGGDRRGALGADAKCLSMRPVSGEELNRRAPTDKDATAEAIDDGDRLTNRTDTPVEPYSPSTVSYVPSRTSSSLSIPSSPISSSPPLTSLNTVSPTLALNVAREVSTFLPASTKAGKARVRMRWSKEVNLFIMRTYLYITKLETDMYTYRQQLHERFSRQYPEISVSEQRISDQRRTIVRNKLLSQVELDQLKEEVRTQLRQESENYADTNIIILTQSTNEKFMQEQPQSLTQLHPNSQSLTYNQSQAHTQTAHTSTQTESLTLTLENDIESLVVTDQNLTTDSYIQEIYYDKFRTTITQYSGMDPAVRPKLPKLKYTLNLFRLVNLFNESILIQFISDDTQLIDIHLLIYCTAVVISEELNFKITDHTGATRTSHIVKPAWQQRLEKDIEKLRADCGRLTHYINGIRSHKVVKRVEAIFQNYFTHTRHENNNRKPEEFLDTLKQKLALKVHRLRRYLKAQQRKKDNAIFSTNEKSFYRNIQKAHTDSTIENDTNTPSKEHLETFWSNIWEEHVHHNDKATWITEEATKWRAIDEMEFKEITESEITYLTARLHNWKSPGIDKIQNFWYKKLTILHKSIAKNLTDIVLGEQNIPEFIATGITYMLPKTKYTSEPSQYRPITCLPTIYKILTSALTNKITSHIEHHNMIAEEQKGCRRGHMGCNEQLIIDSTIHKHATTKNRNLHCTYIDYQKAFDSIPHSWLIQILEIYKINSKIIDFLRIVMTWWKTTLQINNRLSTLITRQINIRKGIYQGDSLSPLWFCLALNPLSHLLNRCRAGYNFKNNTEEIIVSHLIYMDDIKLYAKTEKEMKSLIEVTTTFSQDINMQFGLDKCRTLHIIKGKVKPGNYAVSDTDTIAAMEPTDIYKYLGYKQLKGLDHTSIKQTLNTEYRRRINAICKTQLSGKHLIKALNTFAIPILTYSFGVIKWSKTDIEQLERTTRTTLTKHNNLHPKSAIERLTIKRQNGGRGLIDIQHLWQKQITRLKTFFYTKSLTSNIHKAIALNDFNYTPLNLNEQNIQDINITDPQNQKIENWKKKVLHGRHPHDLEQPHINKLASNKWLKIGNLFPETEGFIIAIQDQIINTKNYRKFIIKDPTITNDKCRRCHIQSETIQHVTGACITLTQTDYTHRHNQVANIIHQKLALKHSLIQNTNTPYYKYTPQTILENDTHKLYYDRAILTDRTIHFNRPDITLQDKIRKTTYLIDIAVPNTHNLQKTIAEKISKYVDLKEEVTRIWRQDKVYVVPVVLSTTGVIPNHLLRSLKLIDLEESLYINLQKAAILNTCRIVRKFMQLDESTFSP

SEQ ID NO: 21660 - protein, 1309 aa, Griposia aprilina
METRSKTKRIGPLPGGDRRGALGADAKCLSMRPVSGEELNRRAPTDKDATAEAIDDGDRLTNRTDTPVEPYSPSTVSYAPSRTSSPSIPSSPISSSPPLTSLNTVSPTLALNVAREVSTFLPASTKAGKARVRMRWSKEVNLFIMRTYLYITKLETDMTTYRQQLHERFSRQYPEISVSEQRISDQRRTIDRNKLLSQVELDQLKEEVRTQLRQESENYADTNTIILTQSTNENIMQEQPQSLAQLHPNSQSLIYNQSQAHTQTAHTSTQTETLTLTLENDIESLVVTDQNLTTDSYNQEIYDKFRTTITQYSGMDPTVRPKLPKLKYTLNLFRLVNLFNESILIQFISDDTELIDIHLLIYCTAVVISKELNFIITDHTGATRTSHIVKPAWQQRLEKDIEKLRADCGRLTHYINGIRSHKVVKRVEAIFQNYFTHTRHENNNRKPDEFLDTLKQKLAHKVHRLRRYLKAQQRKKDNAIFSTNEKTFYRNIQKAHTDSTIENDTNTPSKEHLETFWSNIWEEHVHHNDKATWITEETTKWRAIDEMEFKEITESEITYLTARLYNWKSPGIDKIQNFWYKKLTILHKSIAKNLTDIVLGEQNIPEFIATGITYMLPKTKYTSEPSQYRPITCLPTIYKILTSAITNKITSHIEHHNMIAEEQKGCRRGHMGCKEQLIIDSTIHKHATTKNRNLHCTYIDYQKAVDSIPHSWLIQILEIYKINSKIIDFLRIVMTRWKTTLQINNRLSTLITRQINIGKGIYQGDSLSPLWFCLALNPLSHLLNRCRAGYNFKNNTEEIIVSHLIYMDDIKLYAKTEKEMKSLIEVTTTFSQDINMQFGLDKCRTLHIIKGKVKPGNYAVNDTDTIAAMEPTDIYKYLGYKQLKGLDHTSIKQTLNTEYRRRINAICKTQLSGKHLIKALNTFAIPILTYSFGVIKWSKTDIEQLERTTRTTLTKHNNLHPKSAIERLTIKRQNGGRGLIDIQHLWQEQITRLKTFFYTKSLTSNIHKAITLNDFNYTPLNLNEQNIQDINITDPQNQKIENWKKKVLHGRHPHDLEQPHINKLASNKWLKIGNLFPETEGYNIAIQDQIINTKNYRKFIIKDPTITNDKCRRCHIQSETIQHITGACMTLTQTDYTHRHNQVANIIHQKLALKHSLIQNTSTPYYMYTPQTILENDTHKLYYDRAILTDRTIHFNRPDITPQDKIRKTTYLIDIAVPNTHNLQKTIAEKISKYVDLKEEVTRIWRQDKVYVVPVVLSTTGVIPNHLLRSLKLIDLEESLYINLQKAAILNTCRIVRKFMQLDESTFSS

SEQ ID NO: 21661 - protein, 777 aa, Xestia xanthographa
MEFVEITEADITHITGRLHNWKSPGIDKVHNFWFKKLTSLYKPIARNLTQIILGQQNIPEFIATGITYMLPKTKNSPHPSQYRPITCLPTIYKILTSAITAKINTHIEHHNIMAEEQKGCRRGHMGCKEQLIIDSTIHKHATTKNRNLHCTYIDYKKAFDSVPHSWLIQILKIYRVNSKIIDFLSNIMSQWKTTLHMNCNHNNVTTRQIFIRKGIYQGDSLSPLWFCLALNPLSHLLQRCRAGYCLKHTTTQAQLQEQTTISHLIYMDDIKLYAQTEKEMKKLVEATAEFSQDINMQFGLDKCKTLHIIRGKIRPGNYVVNNTDTITAMEPSDLYKYLGYTQLKGLDHVRTKETLTAEYKRRLNAVCKTQLSGKNLIKALNTFAIPILTYSFGVIKWTKTDTEQLERTTRTTLTKNNNLHPKSAVERLTIKRQNGGRGLIDIQHLWRKQVCRLKTFFHTKSHTSNIHKAIAQNDHNYTPLNLYEQSDTSHIDNEDPQTQKIEDWKKKVLHGRHPHDLEQSHVNKIASNKWLKIGNLFPETEGFIIAIQDQIINTKNYRKFIIKDPSVTNDKCRKCHTQPETIQHITGACATLTQTDYTHRHNQVANIIHQRLAVKYTLIQDTNTPYYNYTPQATLENDTHKLYYDRAILTDRTIHYNRPDIILQDKINKVTYLVDIAVPNTHNIQKTITEKISKYADLKQEVTRIWRQEKVYVVPIVLSTTGVIPNHLLHSLKLLSLKETLYITLQKAAILNTCRIVRKFMQIEENEIGPHHNTPST

SEQ ID NO: 21662 - protein, 1320 aa, Xestia xanthographa
METRSKSKRIGPLPGGDRRGAPGADARCHSMRSVSGEELNRRAPTDKDTTAEIIDDGDRLTDRTDTPVEPYSPSTVSYTPSRRSSPSIPSSPTHPSPSNISLNTVAPTPTLTAARGVSTFLPASTKAGKARVRMRWSKEVNLFIMRTYFYITKLETDMTTYRQQLHELFTRQFPEITVSEQRISDQRRAIVRNKLLSQEIIDQLKEEIRIELQADDNATTLVQNITDIAQRPQTQPYTQLQPSVQSQLYNQSQANTQTSHISTQTEYITLTLENDIETLIVENHNLTTDTYIQEIHDKFRTTLAQYSGMDPATRPRLPKLRYSPNLFRLVNLFNENILNQFISDETQLIDIHTLIYCTAVVISEELNFKITQNTGNTRPKQNIKPAWQQRLEKDIEKLRADIGRLTQYINNNRSNKVVRRVEAIFRSHLIHTRHEHNNRKPEEFLDTIKQKLALKVHRLRRYKKAQQRKNDNAIFATNEKIFYRNLNKPNTDTNHDTNTDTPNQPTKEQLETYWSSIWEEQARHNDEATWITEEETKWRAIHEMEFVEITEADITHITGRLHNWKSPGIDKVHNFWFKKLTSLYKPIARNLTQIILGQQNIPEFIATGITYMLPKTKNSPHPSQYRPITCLPTIYKILTSAITAKINTHIEHHNIMAEEQKGCRRGHMGCKEQLIIDSTIHKHATTKNRNLHCTYIDYKKAFDSVPHSWLIQILKIYRVNSKIIDFLSNIMSQWKTTLHMNCNHNNVTTRQIFIRKGIYQGDSLSPLWFCLALNPLSHLLQRCRAGYCLKHTTTQAQLQEQTTISHLIYMDDIKLYAQTEKEMKKLVEATAEFSQDINMQFGLDKCKTLHIIRGKIRPGNYVVNNTDTITAMEPSDLYKYLGYTQLKGLDHVRTKETLTAEYKRRLNAVCKTQLSGKNLIKALNTFAIPILTYSFGVIKWTKTDTEQLERTTRTTLTKNNNLHPKSAVERLTIKRQNGGRGLIDIQHLWRKQVCRLKTFFHTKSHTSNIHKAIAQNDHNYTPLNLYEQSDTSHIDNEDPQTQKIEDWKKKVLHGRHPHDLEQSHVNKIASNKWLKIGNLFPETEGFIIAIQDQIINTKNYRKFIIKDPSVTNDKCRKCHTQPETIQHITGACATLTQTDYTHRHNQVANIIHQRLAVKYTLIQDTNTPYYNYTPQATLENDTHKLYYDRAILTDRTIHYNRPDIILQDKINKVTYLVDIAVPNTHNIQKTITEKISKYADLKQEVTRIWRQEKVYVVPIVLSTTGVIPNHLLHSLKLLSLKETLYITLQKAAILNTCRIVRKFMQIEENEIGPHHNTPST

SEQ ID NO: 21663 - protein, 762 aa, Curetis bulis
MQFTEITEDEITHITAKLHNWKSPGIDGVHNFWYKKLTCLHTTIATNLTNIILDKQKVPEFIATGTTYMLPKNNYSAQPSQYRPITCLPNIYKILTSVITRRITSHVEQYNIIAEEQKGCRRGHMGCKEQLIIDSTIMKHATHRNRNLHCTYIDYKKAFDSIPHSWLIQVLEIYKINPYIINFLRNIMTHWKTKLQLNNQRTSITTRQIAIKKGIYQGDSLSPLWFCLALNPLSRQLHECQAGYHLKDNNTETIISHLIYMDDLKLYARNKKEMKILIDTTAKFCKDVNMQFGLDKCRTVNMIKGKVQPGDYAVDDREIITAMEPTDLYKYLGFQQLKGLDHTAIKQTLITEYKRRTNAICKTQLSSKHLIKAVNTYAIPVLTYSFGIIKWCKTDLEQIERITRTTFTKHNNLHPKSAIERLTIKRQDGGRGLIDIHHLWKKQIHNLKTFFESKSQSSAIHRAISMSDKNYTPLNLEEHNYTDPRNIDPQRQKMDNWKKKVLHGRHPHDLEQTHIDTKASNMWLKIGSLFPETEGFLIAIQDQVINTKNYRKHIIKDTSCTDDKCRKCHTHPETIQHITGACPSLTQTDYTHRHNQLVNIIHQKISFKHNLIQYTNTPYYKYVPQTVLENSSYKLYYDRAILTDRTIHYNRPDLTLQDKINKITYLIDIAVPNTHNLQKTFTEKMTKYADLKEEIIRIWKQEKVYIVPIIISTTGVVPYHIHNSLKLLDLNKNTFITLQKAAILNTCRIVRKFLQLEENQIT

SEQ ID NO: 21664 - protein, 1290 aa, Leucinodes orbonalis
METRARKKLRGPLPGGDRRGTPGADAGCSSTRTVSGEQLNRRALTGGLQPEYTTADQIHTDTESRASSPSEPYSPSTASYNPSVQISPSISGNRTPSPVLAVAREAIAFLPASTKAGKPRIRMQWSYEVNLFIMRIYYYITKIETDMTTYRKKLHEQFSLKYPEIKVSEQRVSDQRRTIERNKLLSQETLDQLKEDVRKQLQAEENINQENMNTHSLPTQIETQSYLTFQHTQMAHTSTQTESISLTLENDIDILISDLPERDSIQYPDIKEKFRLNLTLYSGMDPTLRPNLPKLKYSPKLFSLVQFFNQNFLHNFISSDTKLIDLHTLIYCAALTISQELQYKVPHNTFTNKKRKEYKPSWQFRIEKDIQKLRADIGKITQYINNNRSRKIENRVQALLKRYSVHTKHEKNNSKPEEILDTLKQKLALKANRLKRYKKTEERKNHNNLFHTNEKQFYRNITNSNVPLQDNNEETPTVEQLEEYWSSVWQDQSSHNTEADWISEETERWNIINNMEYKEVTEEDIANTTARLHNWKSPGIDKIHNFWYKKLTSLHKSLASNITEIISGQQDIPEFIALGITYMLPKNNYTAEPSQYRPITCLPTVYKIITSVIARKINLHVEKYNILAEEQKGCRRGHMGCKEQLVIDSTILKHATSKHRNIHCTYIDYKKAFDSIPHSWLLKILQIYKIHPIIINFLQNVMAHWKTTLHLYTPHKNIKTKQLAIKKGIYQGDSLSPLWFCLALNPLSNLLHRDQAGYRLKHDNSESIISHLIYMDDIKLYARNTKEMKTLVETTLRFSKDINMKFGFEKCKTLHIKRGHIQPGGYTINNGDTISAMQTGDLYKYLGFQQLKGLDHSTIKQSLSVEYKRRVNAICKTRLTSKHLIKAINTFAIPILTYSFGIIKWNITDIENLERITRTILTKNNNLHPKSAVERLTIKRQDGGRGLIDIKYIWKKQIRNLQKFFITKAQTSSLHSAIAQNDSKYTPLDLQHNREFEEPTNIDPQKNKIESWKKKVLHGRHPQDLNQPHIDKKASNLWLKTGYLFPETEGFIIAIQDQIISTKNYRKYIIKDATITNDKCRKCHTQPETIQHITGACTTLTQNDYTHRHNQLTNIIHQKLAQKHELIQQDKHTPYYKYSPQTILENNLYKLYYDRAILTDKTIHHNRPDITLLDKINKITYLIDIAVPNTHNLQKTIAEKVNKYTELREEVIRIWKQSKVYIVPIVISTTGVVPNHIHQSLKLINLEENILRTLQKAAILNTCRIVRKFLQLDESYDMNTVPTSTLTTNL

SEQ ID NO: 21665 - protein, 1188 aa, Zera sp.
MSWSKEVNLFIMRTYYYVTKLETDFTTYRKQLHELFSQQYPEIKVTEQRIADQRRTIVKNKRLSQDSLDQIKEEVRLMLETENHIHILDRSSDHESDNGLPPHSLSIENTHTSHPTIQKTQLPQTTLLNIHTNTPTQIESVTLTFENSINTSECFNETTNIYVQNLNEKFKTTFMQYSEIDPAMRPKLPKIRYSPQLFELVNIFNQNTLKQFISDNTQLKDLHTIVYCTALIISQELKYKIKDATENTQPKNHYKPPWQIRLETDIEKLRVSCGRLTQYIKGNRSKKILKHIKVLFKSINTHTGYEKENRKPEEFLDTLKQKLALKVGRLKRYMKAQQRKIDNILFTTSEKLFYRNLRKPKTHSTNKNTADLPTQEQLETFWSGIWEKPIKHNEGADWIVQEKLKWSAIEEMHFIQITESDITNIMHRLHNWKSAGTDKIHNFWYKKLTTLHKLIAKNFTEIILGKQDIPDFITIGVTYMIPKTQHSQHPSQYRPITCLPTIYKILTSAITQKINNHIEQHKIIAEEQKGCRRGHMGCKEQLIIDSTIHKHATTRNRNLHCTYIDYKKAFDSIPHSWLIEILQIYKISPTIIDFLRNTMTRWKTTLYLSTGQNSITTRQISIRRGIYQGDALSPLWFCLALNPISHLLHSCKVGYCLKNNTINTNISHLIYMDDIKLYSKTEKDMTKLLDATTRFSKDIHMEFGLDKCKTLHIIRGKVRPGNYEINNIDTITALEPSDVYKYLGYKQLKGLDHTAIKNTLTTEYRKRTNALCKTQLSGKHLIKSLNTYAIPILTYSFGVIKWTKTDLEQLERTTRTILTKHNNLHPKSAVERLTIKRQDGGRGLVNIAQLWRKQISKLKDFFYTKSQTSAIHNAIANNDHNYTPLNLKEETNKQYTQSNNNIHNDDSQKQKIEAWKKKTLHGRHPHDLEQPHIDTIASNKWLQIGNLFPETEGFMIAIQDQIINTRNYRKYIIKDPTIHHDKCRKCHTQPETIQHITGACITLTQTDYTHRHNQVVNIIHQKLALKYKLIHRTNTPYYNYIPQTILENKTHKLYYDRAILTDKTIHYNRPDITLLDKLNKTTYIIDIAVPNTHNLQKTITEKISKYMELKEEIIRIWRQDKVFIVPIVLSTTGVIPKHLRHSLKQLNLNESTYITLQKAAILNTCRIVRKFMQIDDNDIVPHHSISSF

SEQ ID NO: 21666 - protein, 1281 aa, Proteides mercurius
MRRSNRIKNLLNKNSAQSGTVAEIIPPSSPSSSTHSLFPSTNSTPLSFENISNTVSRSTTVSPMSADIEQAQNIAVSTSDVARGANAFLPASTKAGKPRVRMTWSQDVNIFIMRTYYHITKLETDMTTYRKTLHELFSRQYPDINVSEQRISDQRRMIIKKRYLTQEILNKLKEEVSRQLQEEENINDVINDNNQVHLVADRNTLESSTQLQNYSPQSHNLQSHTQTSVSTSHSSTQTEFITLLLENETETIADVAPPSEASFQDMYDKLQATLTQYSGMDPTARPKLPRIKNSKHFNDLVHLFNQHILHRLTSKEMQLNDIHTLIYCTALVIAKELNYKIIHNTTHTHIKPRTFTKPSWQIRLEKDIENLRADIGRVTQYINNNRSDRLVKKVQHIFNRIARHTKHETNNRKPEEFLDTLKQKLALKTHRLKRYKKTLQRKKDNMQFITNEKMFYKNLCKPKIEVQTKEIPTKDQLETYWSNIWEENIIHNDKADWIREEQDKWEVIDEMEFQEITERDITDVTARLHNWKSPGVDKIHNFWFKKLTVLHQPLARSLTEIILGKQNIPNFITIGITYMLPKTNNTTHPSQYRPITCLPTIYKILTSAITSKINTHIEHHNIIAEEQKGCRRAHMGCKEQLVIDSIIHKHATSKHRNLHCTYIDYKKAFDSIPHSWLIKILQIYRINPIIIDFLRNIMPHWKTTLHLNQGNKSITTRQINIKKGIYQGDSLSPLWFCLALNPISNLLHKCQTGYRLNNSPEVTTISHLIYMDDIKLYARTHKDMEKLLNKTTQFSKDINMQFGLDKCKTLHIIKGKIQSGDYRLDNNDVISAIEATDVYKYLGYNQLKGILHTNIKQTLTAEFKRRIDAICKTHLLGRHLTKAINTYAIPILTYSFGIIKWTKTDIEQLERITRTTLTKHNHLHPKSAVERLNIKRQDGGRGVIDINYLWQKQISNLRNFFFVKSSTSQIHSAITHNDENFTPLNLSDHTTQHTLNRNLQIQKIEHWKNKVLHGRHPHDLEHTHIDKIASNKWLKVGSLFPETEGFIIAIQDQVINTKNYRKHIIKDPNVKNDKCRRCHSQPETIQHITGACTTLTQTDYTHRHNQVTNIIHQNLALKHNLIQNTNTPYYKYTPQTVVENTSHKLYYDRAVLTDRTIHYNRPDIILQDKLNKITYLIDIAVPNTHNIQKTITEKINKYVELKEEVTRIWKQSKVYVVPIVLSTTGVIPYHLHQSLKLIGLTPSIYITLQKAAILNTCRIVRKFMQIDEKEVGPNNIQPALP

SEQ ID NO: 21667 - protein, 829 aa, Notocrypta feisthamelii
MLFTANEKVFYRKLMEPKSNISINENLRIPSQTQLETFWSEIWENEIQHNEKAKWIQEEEKRWSSIKEMEFQEITEADITSITAKLHNWKSPGIDKIHNFWYKKLTSLHKCLAKNLTDIIVGKQNIPEFIARGITYMLPKTIYSSEPSQYRPITCLPTLYKIITSAIASKINTHIEHNHIIAEEQKGCRRGHMGCKEQLVIDSTIHKHAASKNRNLHCTYIDYKKAFDSIPHSWLLQILQIYKINPKIVNFLRNIIPYWKTTLQLNSFNHIITTRTMSIKKGIYQGDSLSPLWFCLALNPLSHMLQLCRAGYTFRHTKDTTRTDISHLVYMDDIKLYSKTQKEMKKLIDTTIEFSRDINMEFGLDKCRILHITKGKIQPGNITIDSISTIAAMEATDMYKYLGYKQSRGLDHTQIRQTLTTEYKNRINAICKTQLSGRNVIKAVNTYAIPILTYSFGIIKWTNTDIDQIERTTRTTLTKHNYLHPKSAIERLTIKRHEGGRGLIDINHLWHKQIHNLRYFFYSKSLKSNIHKEIFENDHNFTPLNLSQYQNTSSLENRNPQIHKIENWKKKTLHGRHPHDLEQTHIDPKASNKWLKIGNLFPETEGFIIAIQDQIINTKNYRKFIIKDKSITSDKCRKCHTQSETIQHITGACTTLTQTDYTHRHNQIVNIIHQKLALKHKLIQNTNTPYYKYIPPTVLENQSHKLYYDRAILTDKTICCNRPDITLLDKINKTTYLIDIAVPNTHNIQKTISEKISKYTELKEEVARIWKQQKVYIVPIVLSTTGVIPKYLHHSLKLIDLNENLYITIQKAAILNTCRIVRKFLQIDE

SEQ ID NO: 21668 - protein, 1256 aa, Pythonides amaryllis
METRSKKKRSGPLPGGDRRGTPGADAGCFSMRTVSGEELSRRTPTGLSENATAETDVLTDRTTPIEPYSPSTSSYTPSIPTSPSLSSCLSTNSPTLTLDVAQGANAFLPASTKAGKKRVRMSWSKEVNLFIMRTYYYITKLETDFTTYRKQLYKIFSRQYPEINVTEQRIADQRRTIVKNKRLDQDTLNQLKDEVRMQIEAEGQMHTNANHSTEHQTESVLELQRSLPQSPTQSQLPTQNNKKSTTQKSQTSQAFTPNVQISHTSTQTESVSLMLESDINILECKTATTNITTQEIHDKFRTVLTQYSGMNPEVRPKLPKLRYSPQLFQLVNIFNQDILKQFISEDTQLIDIHTIIYCTALVISQELNYKIYDNTDSTRPKDHNKPPWQIRLEIDIEKLRINCGRLTQYIKGNRSKKILEHVETLFNTMNTHTRYEKKNRKPEEFLDTLKQKLALKVSRLNRYKKALQRKTDNTLFTTNEKVFYRNLQKPTTDTTATVNNPNLPTQKQLETFWSDIWEKKGQHNAKADWIEKEKSKWGMIEEMAFIEITETDITNITNRLHNWKSAGVDKIHNFWYKKLFTLHKIIAKNITDFILGTQDIPEFITTGITYMLPKTQYSQEPSKYRQITCLPTIYKIITSAVTQKINEHIEQHNIIAEEQKGCRRGHMGCKEQLIIDSTIHKHATTKNRNLHCTYIDYKKAFDSIPQTWLIKILQIYRINPKIINFLQKTMTRWKTTLKLTTHHTSITTRQILIKRGIFQGDALSPLWFCLALNPLSHLLQRCRVGYCLKHDTIDTNISHLIYMDDIKLYSKTEKDMTKLLDTTSQFSKDINMEFGLDKCKILHIIRGKVRPGNYEINDTDTIEALEPNDMYKYLGYKQLTRLDHTAIKNTLTTEYRKRINALCKTQLSSKHLIKSLNTYAIPILTYSFGIIKWTKTDIEQLERTTRTILMKHNNLHPKSAVERLTIRRQDGGRGLVNMFQLWQKQVSSLKNFFYTKSQTSDIHKAIVHNDKNYTPLNLKEETNQYTQSSNKNEIQKQKIDDWKKKVLHGRHPHDLEQPHIDAIASNKWLQIGNLFPETEGFMIAIQDQIINTKNYRKYIIKDPTILNDKCRKCHTHPETIQHITGACTNLTQTDYTHRHNQVANIIHQKLALKYKLIHNTNTPYYNYTPQTVLENETHKLYYDRAILTDKTIHYNRPDITLRDKIKEVTYLIDIAVPNTHNLQKTITEKISKYAELKEEVTRIWKQEKVFIVPIVL

SEQ ID NO: 21669 - protein, 774 aa, Dendrolimus punctatus
MEFKEITELDITHITNKLHNWKSPGIDKIHNFWYKKLTSLHRSIAKNLTNIILGEQNIPDFITTGITYMLPKVQNSLEPSQYRPITCLPTIYKILTSAITTKINSHVQHHNIMAEEQKGCRRGHMGCKEQLIIDSTIHKHATTKHRNLHCTYIDYKKAFDSVPHSWLIKILEIYRISPKIIDFLRNIMPRWKTTLQINCNPNPITTRQISIKKGIYQGDSLSPLWFCLALNPLSHLLQCCRAGYCLKNTTGNTSISHLIYMDDIKLYAQSEKEMKKLVEATAEFSKDINMQFGLDKCKTLHIIGGKIQSGDYVINDTDTITAMESTDLYKYLGYTQLKGLDHVRIKNTLTTAYKKRLNAICKSQLSSKHLVKALNTYAIPILTYSFGIIKWTKTDTEQLERTTRTTLTKHNNLHPKSAIERLTIKRQNGGRGLIDIQYLWRKQIIRLKSFFHTKSHSSKIHNAIVLNDNNYTPLNLSDQTDTLNTNSNNPQEQKIEEWKKKVLHGRHPHDLEQSHINTLASNKWLKVGSLFPETEGFMMAIQDQIINTKNYRKYIIKDPTITNDKCRKCHTQPETIQHITGACTTLTQTDYTHRHNQVANIIHQKLAIKYALIHKTQDTNTPYYKYTPQTILENTTHKLYYDRAILTDKTIHYNRPDITLQDKINKITYLIDIAIPNTHNIQKTITEKINKYTELKDEVSRIWRQEKVFIVPIVLSTTGVIPNHLLHSLKLLDLKETLYITLQKAAILNTCRIVRKFLQIDENEIAPHNNIPST

SEQ ID NO: 21670 - protein, 1271 aa, Udranomia kikkawai
MTSLAYRGNKMRRSNRIKNKTSAQLNTVAETSTVNTRTLSSTSSSIHSLFESPRSSPQSFENLISRSSTVSPILQIENTAKPTSDVAREANAFLPVSTKAGKPRVRMRWNQDVNKFIMRTYYFITKLETDMTVYRKTLHELFTLQYPEINVSEQRVSDQRRMIIKNKYLSQDTLDELKEEVSRQLQEEEASNNHIEPYHLQVSCNALESQENLHSPQNFTNFGQFDTHTLTQSSHIATQTEFTTLLLENEVETVSGLPPFTDARSQKIHDKLHSTVLQYSGMDPETRPRLPRLKHTKHLNNLVNLVNQQILINFIPIEAQLIDIHTLIYCTALVISEELNYKIIHNPTYTKSNNRTKPSWQIRLEKDIQKLRADIGRLTQYINNNRSNKVVKKVQEIFHNITVHSTHERNNRKPEEFMDTLKQKLALKTHRLRRYKKAQHRKEDNLQFATNEKVFYRKMCKPENIENEDQTEIPTKEQIESYWSDIWEEKIQHNSKADWIGEEKVKWQAIEEMEFSEITEQDLINITARLHNWKSPGTDKIHNYWYKKLTSLHKPLAKNLTEIILGKQKIPDFVATGITYLLPKTKNSSHPSKYRPITCLPTLYKILTSAITTKITAHTEKHNILAEEQKGCRRGHMGCKEQLIIDSIVHKHASTKNRNLHCTYIDFKKAFDSIPHSWLIEILRIYKINPVIIEFLSNIMSYWKTTLQLNKYEKLITTRQINIKKGIYQGDSLSPLWFCLALNPLSSLLRNCQAGYHLGHTHKEIKISHLIYMDDIKLYAKTREDMKTLVDITTEFSNDINMQFGLDKCKTLHIIKGKILPGDFIVNNSDIITALEPTDIYKYLGYNQLKGLQHTNIKQTLKTEYKRRVNAICKSYLVGKNLSKAINSYAIPILTYSFGVVKWTKTDILQIERITRTTLTKHNYLHPKSAVERLTIRRQDGGRGIIDILHLWKKQISNLRNFFVTKSTTCDIHAAVTQIDQNFTPLNLVEHNNEPLNRNTQTQKLEDWKKKVLHGRHPHDLEHKHIDKTASNKWLKVGNLFPETEGFMIAIQDQVVNTKNYRKYIIKDPNITNDKCRRCHTQPETIQHITGACISLTQTDYTHRHNQVANIIHQKLALKHQLTQNTNTPYYNYTPQAVLENSTHKLYYDRAILTDRTIHYNRPDIILQDKVNKTTYLIDVAVPNTHNIQKTIVEKINKYAELKEEVSRIWKQDKVFLVPIVVSTTGVIPYHLHQSLKLLDLTHSTYILLQKAAILNTCRTVRKFMQIDENI

SEQ ID NO: 21671 - protein, 1313 aa, Deilephila porcellus
METRSKKKLRGPLPGGDRRGTPGADAGCSSIRTVSGEELSRRTPTGSPENTTADNDLDRLTDSRSNSPIEPYSPSTISYTPSICETPSIPSSPPTNNFRDPPILALDAAREVNTFLPVTTKAGKPRVRMSWSKEVNLFIMRTYYYITKLETDMTIYRKQLHEHFSRQYPNIKVTEQRLSDQKRAIERNKLLSQDILDQLKEEVRRQLNVEIDSNENNNLVSSANRGQYDLPRYSPTQTVTQINPEPLTLNQPYNLNLAHTSTQTETITLTLENDVDSLMESNPITDTHIQELQNKLITTLTLYSGLDPESRPKLPKVKYNPKLNLLIHIFNKDILNNFVSESSKLTDVHTLIYATALVIIEELGYKITDNNTVHPKPKHNSKPSWQYRLEKDIEKLRADCGRLTQYINNNRSKKIVKRVEEIFKNTRTHTRHENNNKKPEEFLDTLKQKLALKAQRLKRYKKTQQRRKDNILFTANEKMFYRNLRNPHRNSFSENIESTPTKEELESFWGSVWEEQIQHNDKADWIKEEENRWSVIDEMEFTEVTESDIKLTTNRLHNWKSPGIDKIHNFWYKKLTSLHKTIARNLTDIILYRQDIPPFIATGITYMLPKDKISPQPSQYRPITCLPTIYKILTSVISAKINAHIENHNIIAEEQKGCRRGHRGCKEQLVIDSTIHKHAATRNRNLHCTYIDYKKAFDSIPHSWLIKILKIYKINNKLIDFLQQIMTHWKTTLHLNCNNSVKTRLINIRKGIYQGDSLSPLWFCLALNPLSQILHSCRAGYQLKTLTENINISHLIYMDDIKLYAKNEKDMKKLIEATAKFSKDINMNFGLDKCKTVHIIKGKIRPGDYTINNTDTITAMEPNDLYKYLGYKQLKGLDHTNIKHTLTAEYQRRINAICKTQLSGKNLIKALNTYAIPILTYSFGIIKWTKTDIEKIERTTRTTLTKHNNLHPKAAIERLTIKRDVGGRGLIDIYHLWLKQLHNLKTYFHTKSHNSIMHKAIVHNDNNFTPLNLHEQTDSEIPNMINRQQQKIEDWKKKVLHGRHPHDLEQTHIDKTASNKWLKIGNIFPETEGFMLAIQDQIINTRNYRKFIIKDPTITTDKCRRCHIQPETIQHITGACTSLTQTDYTHRHNQVANIIHQSLAFKFSLIQDTKTPYYKYKPDIVLENSSCKLYFDRAILTDRTIHYNRPDITLQDKINKITYLIDIAVPNTHNIQKTIAEKNNKYADLKDEVSRIWKQEKVYIVPIVLSTTGVIPKHLHNSLKLLNLNESLYITLQKAAILNTCRIVRKFMQIDENEIIQHHNIPATNPLQS

SEQ ID NO: 21672 - protein, 1313 aa, Deilephila porcellus
METRSKKKLRGPLPGGDRRGTPGADAGCSSIRTVSGEELSRRTPTGSPENTTADNDLDRLTDSRSNSPIEPYSPSTISYTPSICETPSIPSSPPTNNFRDPPILALDAAREVNTFLPVTTKAGKPRVRMSWSKEVNLFIMRTYYYITKLETDMTIYRKQLHEHFSRQYPDIKVTEQRLSDQKRAIERNKLLSQDILDQLKEEVRRQLNVEIDSNENNNLVSSANRGQYDLPRYSPTQTVTQINPEPLTLNQPYNLNLAHTSTQTETITLTLENDVDSLMESNPITDTHIQELQNKLITTLTLYSGLDPESRPKLPKVKYNPKLNLLIHIFNKDILNNFVSESSKLTDVHTLIYATALVIIEELGYKITDNNTVHPKPKHNSKPSWQYRLEKDIEKLRADCGRLTQYINNNRSKKIVKRVEEIFKNTRTHTRHENNNKKPEEFLDTLKQKLALKAQRLKRYKKIQQRRKDNILFTANEKMFYRNLRNPHRNSFSENIESTPTKEELESFWGSVWEEQIQHNDKADWIKEEENRWSVIDEMEFTEVTESDIKLTTNRLHNWKSPGIDKIHNFWYKKLTSLHKTIARNLTDLILYRQDIPPFIATGITYMLPKDKISPQPSQYRPITCLPTIYKILTSVISAKINAHIENHNIIAEEQKGCRRGHRGCREQLVIDSTIHKHAATRNRNLHCTYIDYKKAFDSIPHSWLIQILKIYKINNKLIDFLQQIMTHWKTTLHLNCNNSVKTRLINIRKGIYQGDSLSPLWFCLALNPLSQILHSCRAGYQLKTLTENINISHLIYMDDIKLYAKNEKDMKKLIEATAKFSKDINMNFGLDKCKTVHIIKGKIRPGDYTINNTDTITAMEPNDLYKYLGYKQLKGLDHTNIKHTLTAEYQRRINAICKTQLSGKNLIKALNTYAIPILTYSFGIIKWTKTDIEKIERTTRTTLTKHNNLHPKAAIERLTIKRDVGGRGLIDIYHLWLKQLHNLKIYFHTKSHNSIMHKAIVHNDNNFTPLNLHEQTDSEIPNMINRQQQKIEDWKKKVLHGRHPHDLEQTHIDKTASNKWLKIGNIFPETEGFMLAIQDQIINTRNYRKFIIKDPTITTDKCRRCHIQPETIQHITGACTSLTQTDYTHRHNQVANIIHQSLAFKYSLIQDTKTPYYRYKPDIVLENSSCKLYFDRAILTDRTIHYNRPDITLQDKINKITYLIDIAVPNTHNIQKTIAEKNNKYADLKDEVSRIWKQEKVYIVPIVLSTTGVIPKHLHNSLKLLNLNESLYITLQKAAILNTCRIVRKFMQIDENEIIQHHNIPATNPLQS

SEQ ID NO: 21673 - protein, 1159 aa, Danaus chrysippus
MRWSKEVNSFIMRTYYYITNLETDMTTYRQKLHELFTHEYPEITVTEQRISDQRRTIVRNKLLTEEELNRLKEEARVQLEQQDITILLPRNPSHSEFHTQTESFSLPNTQNTHTSDMSTQTESVTIILENEVNTLNVQNPITETYIQEIYDKFSTTLIQYSGTDPLIRPKLPKIKYSPQLSNLIQIFNQNILNRFISEDTQLIDIHTLIYCTALIITEEVKPKKIENMQRTKTKQTYKPPWQHRLEKDIKKLRADCGRLTQYIYNNNRSEKVVKRVEEIFRNSIIHTKHDRSNTKPEEYLDTFKQKLALKVSRLRRYKKAQQRRNDNTTFTTNEKLFYRNLQKPHTPANTITDSNTNVPTKQDLEVFWSGIWEEQISHNSKASWINDEKLEFSIVEEMEFVEVTETDITNITAKLHNWKSPGIDKIHNFWYKKLISLHKCIAKNLTHIILGQQNIPEFMTIGITYMLPKTKHSPQPSQYRPITCLPTIYKILTSAITKKINTHIEQHNIIVEEQKGCRRAHMGCKEQLVIDSTIHKHAATKNRNLHCTYIDYQKAFDSIPHSWLIQILEIYKINSKIIDFLRKIMTYWKTTLHLNYGQNTIVTRQIHIKKGIYQGDSLSPLWFCLALNPLSHLLHRCRVGYPLKSTEETIISHLIYMDDIKLYAKSDKDMKKLIEVTNEFSSDINMQFGLDKCKTIHIIKGKIKPGNYAITSSDTITAMEPTDLYKYLGYNQLKGLDHTSIKHTLTIEYKRRINVICKTQLSGKNLIKAINTYAIPILTYSFGIIKWTKTDIEQIERNTRTILTKHNNHHPKSAIERLTLKRQNGGSGLIDIHNLWQKQINTLKIFFHLKSRTSNIHKAIVVSDINYTPLNLSEQYTSNDCIEDPQKQKLENWKKKVLHGRHPHDLEKPHINTIASNKWLKIGNLFPETEGFIIAIQDQIINTKNYKKYIIKDPSITNDKCRKCHIQPETIQHITGACVTLTQTDYTHRHNQVSNMIHQKLALKHKLIENTKTPYYKYTPQTILENATHKMYYDRGILTDKTIHYNRPDITLQDKINKVTYLIDIAVPNTHNLQKTIAEKINKYNELKEEVTRIWKQEKVYIIPIVISATGVVPNHLLHSLRLLDLNESLYIPIQKAAILNTCRIVRKFMQLGENDTTT

SEQ ID NO: 21674 - protein, 1297 aa, Aguna metophis
METRSKKKRSGPLPGGDRRGTPGADAGCLSMRTVSGEELSRRAPTGTSENATAESDTLTDRTTPIEPYSPSTISYTPSVATSPSSRTNTHSPSLTLDVAQVANAFLPVSTKAGKPRVRMSWSKEVNQFIMRTYYYITKLETDFTTYRKVLHEHFRRQYPEINVTEQRIADQRRTIVKNKRLSQEILNQLKEDVRVQLEAEGENQMHTDYSLSAGQQYENILEDPQPQELSPPLEFNRNSQQSYITTQNIQLSDTSTLTENLTLVLENEIDVVEDHNPTANNQTREIFNKLITVLTQYSGTDPTTRPKLPKIRYSTKLFQLLDLFNHAILNRFIAENMKLIDIHTIVYCTALVISQELKYNITNQKLVRKSKNHDKPPWQIRLEKDIEKLRAECGRLTQYINGNRSRKVIKHVEVIFKSRIKHTRHEKDNRKLEEFLDTIKQNLSLKVNRLKRYKKAQQRKNDNKLFCTNEKQFYRKIHKTDTTSENNLDIPNKEQLEEFWSGIWEEQVQHHSNADWIAEEESKWSHIDEMEFIEITEAEITQITAKLNNWKSPGVDKIHNFWFKKLITLHKSIAKILTEIILGKQEIPEFIATGITYMIPKTHYTQQPSQYRPITCLPTIYKILTSAIAMKINKHTEQHNIIAEEQKGCRQGHMGCKEQLIIDSTIHKHATSKNRNLHCTYIDYKKAFDSIPHSWLIHILKIYKVNPQIVHFLQNIMTHWKTTLQVSTRHTSITSRKILIRKGIYQGDSLSPMWFCLALNPLSHLLHSCQVGYSLKHNTTDTIISHLIYMDDIKLYAKTEKDMNKLLNTTAQFSKDINMDFGLDKCKILHIKRGKVLPGDYAINNTDIITALEPTDLYKYLGYRQLKGIDHTAIKETLATEYKNRITTLCKTQLSAKHLFKAFNTFAIPILTYSFGIVKWTKCDIDQLERTVRTTLTKHNNLHPKSAIERLTIKRQDGGRGLIDLNHLWQKQIGRLKLFFYTKAQSSPIHEAIVHNDHKYTPLNLNEDKNTPYTINIDNNNLQTQKIEDWKKKVLHGRHPHDLDQPHIDKIASNKWLQLGNLFPETEGFLIAIQDQIINTKNYRKYIIKDSTITTDKCRKCHAQPETIQHITGACITLTQTDYTHRHNQVVNIIHQKLALKHKLIQNTNTPYYNYTPKTILENEFYKLYYDRAILTDKTIHYNRPDITLQDKFNKVTYLIDIAIPNTHNVQKTITEKITKYAELKEEVLRIWKQQKVFVVPIVISTTGIIPKHLKHSFKQLDLKYSTYITLQKAAILNTCRIVRKFMQIDENETVPH

SEQ ID NO: 21675 - protein, 1355 aa, Udranomia kikkawai
MRLRSRQIPQAGTRKGESRPEPSGSGSPSYSGGGNVSHMTTHSSTVVVDQQSTSTTSSSFNHHTSSTTSSLVSSTSPSTSTPGAISGEEMIKRAPTVSFENFTAETYVLTDRSSPIEPYSPSTISFTPSVPTSPSSNSSYTRSPIPTLDVAQGANAFLPASTKAGKPRVRMSWSKEVNLFIMRTYYYITKLETDFTTYRKQLHEHFSQKYPDINVTEQRIADQRRIIVKNKRLSQEILEQLKEEVKIKLEAEQKDKIYTDMSTSQNHHIENSYTEHNILNQPNLSQPTLPSQKSQLSHISIQTESENLMMDDIENVEYHITYANAYVEDLHEKLKTTITQYTNTDPVDRPKLPRLRYSPKLSQLLSIFNHELLNQFISEKKQLTDIHTIIYCAALVISQELNYTIINHIKNTRPKIYNKPNWQTRLEKDIEKLRADCGRLTQYINGNRSKKVSKYVQDIFKTRITHTRHENENRKPEEYLDTVKQKLALKVNRLRRYNKAQQRKNHNSVFVTNEKMFYRNLHKLQTDNNNKDDPDLPTKEQLESFWSGIWEQEVEHNGSAKWITEEKTKWSVVGEMEFTEVTDTDIANITAKLHNWKSPGIDKIHNFWYKKITSLHKSIAKTFTEIILGRQNIPEFIATGLTYMLPKSQYSSQPSQYRPITCLPTIYKILTSAITLKINKHIEQNNIIAEEQKGCRRGHMGCKEQLIIDSTIHKHATSRNRNLHCTYIDYKKAFDSIPHSWLIQILQIYKINPKIVDFLCNIMKRWKTTLHIFTHNKSITTRQIFIKKGIYQGDSLSPLWFCLALNPLSNLLNSYQIGYNLKHDTTETIISHLLYMDDIKLYAKTENDMKNLLDITTQFSSDINMEFGLDKCRTLHIKRGRVEPGDYTINNTDTITAMDPTEVYKYLGYKQLKGLDHTKIKQTLTAEYKKRIDALCRTQLSGKNLIKSLNTYAIPILTYSFGIVKWSRTNIVKIERTTRTTLTKYNNLHPKSAIERLTIKRQEGGRGLIDIYQLWQKQVNSLKSFFYTKAQESHIHKAIVRNDHNYTPLNLNLGNEQTQNHDTNINNPHTQKLQEWRKKVLHGRHPHDLEQPHIDRIASNKWLQIGILFPETEGFMIAIQDQIINTKNYRKYIIKDTKIANDKCRKCHNQSETIQHITGACITLTQTDYTHRHSQVVNIIHQKLALKHKLIQNSNTPYYNYTPQTILESKTHKLYYDRAILTDRTTHYNRPDITLQDKLKKVTYLIDIAIPNTHNLQKTITEKITKYADLKEEVKRIWKQEKVFIVPIVLSTTGVIPKHLHHSLKQLDLKATTYITLQKAAILNTCRIVRKFMEIDENEIVPHHISQQQQLFTTN

SEQ ID NO: 21676 - protein, 1321 aa, Ouleus salvina
METRSMKNRTGPLPGGNRRGTPGADAGCLSMRTVSGEELTRRTPTGSSENTTAETNILTDRTTPIEPYSPSSSSYRPSVPTSPSVSSCLSIHSPTPTLDVAQAANAFLPASTKAGKPRVRMSWSKEVNLFIMRTYYYITKLETDFTTYRKQLHEIFSQKYPEINVSEQRIADQRRTIVKNKRLSQDALNQLKEEVKIRLEIDNQIHSPDIGTTSSQYQIENTVHSQSATVHQSLLQSQLFNQNTQTLHSHFQHTQLSHITTSNIQSSRMPTQNESVSQMPGNDSNYPQDITNNIDIQEINDKFKTALIEYSATKPAMRPRLPKLRYTPRLFKLINIFNQHILKQFISEDTQLTDIHTIIYCSALVISQELNYKIYDNTENIKPKDKNKPPWQIRLENDIEKLRASCGRLTQYINGNRSRKILKHVEALFKNINTHTRYEKENRKPEEFLDTLKQKLALKASRLKRYNKALQRKTDNTLFTTNEKIFYRNLQKLTTDHNIENKPDLPTEEQLETFWSGIWEKQVQHNEKADWIAEEKTTWSAIEEMTFFEITEIDITNTTNRLHNWKSAGIDKIHNFWYKKLFTLHKPLAKNFTEIILGKQDIPEFITIGITYMIPKIQHSQDPSQYRPITCLPTIYKILTSTVALKINKHIEQNNIIAEEQKGCRRGHMGCKEQLIIDSTIHKQATSKNRNLHCTYIDYKKAFDSIPHSWLIEILQIYKISPKIINFLCNTMTKWKTTLQLSTHYKSITTRQIHIRRGIYQGDALSPLWFCLALNPLSHLLHRCQVGYSLKNDTIDTIISHLIYMDDIKLYAKTEKDMAQLLDTTTQFSIDINMEFGLDKCKILHIKRGKVQPGNYEINNTDIITALEPSDVYKYLGYKQLKKLDHIVIKNTLTTEYKKRINTLCKTQLSGKHLIKSFNTYAIPILTYSFGIIKWTTTDIEQLERTTRTILTKHNNLHPKSAVERLTIRRQDGGRGLVNIFQLWQKQISRLKQFFHTKSQTSDIHKTIVYNDQNYTPLNLREEANIQYTQNNDNNNSQKQRIESWKNKVLHGRHPHDLEQPHIDATASNKWLQMGNLFPETEGFMIAIQDQIINTKNYRKYIIKDPTILNDKCRKCHNQSETIQHITGACITLTQTDYTHRHNQVANIIHQKLAHKHKLIHDTNTPYYNYIPKNILENETHKLYYDRAILTDKTIHYNRPDITLRDKINKITYLIDIAVPNTHNLQKTITEKISKYAELREEVIRIWKQEKVLIVPIVLSTTGVIPVHLRHSLKQIGLHDNTYITLQKAAILNTCRIVRKFLQLDENIITPHQITSNTILN

SEQ ID NO: 21677 - protein, 1302 aa, Mythimna impura
METRSKSKRIGPLPGGDRRGAPGADAGCHSMRTVSGEELSRRAPTDKDTTAEIIDDGDRLTGRTNTPVEPYSPSTVSYSPSRHSVPSILSSPSITVPLTPTLNVAREASSFLPTSTKAGKARVRMRWSKEVNLFIMRTYLYITKLETDMTTYRKELHELFSLQYPEITVSEQRISDQRRTIVRNKLLSLVEIDKLKEEVRSQLQTGSDGVGDATSFSLTQGTTYLQQEQSTPITQSQPFYQSQVHSQTMHTSTQTENLTVTLENDIETLTDSNQNSPTDAFIQDIHDKFKTALTQYSGMDPAARPKLPKLRYSPKLFQLVHLFNTNILIQYISEEIQLIDVHTLIYCTALVISEELNFKITEYTRNTRYRNTNKPAWQQRLENNIEKLRADCSRITQYINNNRSNKVVRRVEIIFKNMATHTRHETDNRKPEEFLDTLKQKLALKVHRLRRYKKAQERKNDNSRFASNEKSFYRNLQKSQTNTVTPTENNIELPTAEQLEIFWSGIWEEQVQHNEKSDWVIDEQTKWSSLEEMEFVELTESDITRITMRLHNWKSPGIDKIHNYWYKKLESLHKVLAKNFTEIILRKHNIPEFMATGITYMLPKTQYSPQPSQYRPITCLPTIYKILTSAIAAKINKHIEHHNIIAEEQKGCRRGHMGCKEQLVIDSTIHKHAATKNRNLHCTYIDYKKAFDSIPHSWLIQILQIYKINSKLIDFLKNVMLQWKTTLHLNYRDNLNITTRLIHIRKGIYQGDSLSPLWFCLALNPLSHLLNRCQAGYSLKHTTEETIISHLIYMDDIKLYAKSEREMKQLIDTTTKFSKDINMQFGLDKCKTVHIIRGKIKPGDYPINNTDTITAMETTDLYKYLGYKQLKGIDHTSIKHTLNTEYKRRVVAVCKTQLSGKHLIKALNTYAIPILTYSFGVIKWSKTDIQHIERTTRATLTKHNNLHPKSAVERLTIKRQCGGRGLIDIHHLWQKQITRLRTFFHSKSHTSKIHKAIVINDINYTPLNLNDQIETPHTNIDDPQKQKLENWKKKVLHGRHPHDLEQSHIDTMASNKWLKIGTLFPETEGFIIAIQDQIINTKNYRKFIIKDPTMTNDKCRKCHTQPETIQHITGACTTLTQTDYTYRHNQVANIIHQNLALKYKLTQDTNTPYYKYAPQKVLENTTHKLYYDRAILTDRTIHYNRPDITLQDKINKITYLIDIAVPNTHNLQKTIGEKISKYAELKEEVTRIWRQEKVYVVPIVVSTTGVIPHHLHHSLKLIDLKDSTYITLQKAAILNTCRIVRKFMQIEEISPHNTHFSH

SEQ ID NO: 21678 - protein, 777 aa, Xestia xanthographa
MEFVEITEADITHITGRLHNWKSPGIDKVHNFWFKKLTSLYKPIARNLTQIILGQQNIPEFIATGITYMLPKTKNSPHPSQYRPITCLPTIYKILTSAITAKINTHIEHHNIMAEEQKGCRRGHMGCKKQLIIDSTIHKHATTKSRNLHCTYIDYKKAFDSVPHSWLIQILKIYRVNSKIIDFLSNIMSQWKTTLHMNCNHNNVTTRQIFIRKGIYQGDSLSPLWFCLALNPLSHLLQCCRAGYCLKHTTTQAQLQEQTTISHLIYMDDIKLYAQTEKEMKKLVEATAEFSQDINMQFGLDKCKTLHIIRGKIRPGNYVVNNTDTITAMEPSDLYKYLGYTQLKGLDHVRTKETLTAEYKRRLNAVCKTQLSGKNLIKALNTFAIPILTYSFGVIKWTKTDTEQLERTTRTTLTKNNNLYPKSAVERLTIKRQNGGRGLIDIQHLWRKQVCRLKIFFHTKSHTSNIHKAIAQNDHNYTPLNLYEQSDTSHIDNEDPQTQKIEDWKKKVLHGRHPHDLEQSHVNKIASNKWLKIGNLFPETEGFIIAIQDQIINTKNYRKFIIKDPSITNDKCRKCHTQPETIQHITGACATLTQTDYTHRHNQVANIIHQRLAVKYTLIQDTNTPYYNYTPQATLENDTHKLYYDRAILTDRTIHYNRPDIILQDKINKVTYLVDIAVPNTHNIQKTITEKISKYADLKQEVTRIWRQEKVYVVPIVLSTTGVIPNHLLYSLKLLSLKETLYITLQKAAILNTCRIVRKFMQIEENEIGPHHNTPST

SEQ ID NO: 21679 - protein, 1290 aa, Xestia xanthographa
MRSVSGEELNRRAPTDKDTTAEIIDDGDRLTDRTDTPVEPYSPSTVSYTPSRRSSPSIPSSPTHPSPSNISFNTVAPTPTLTAARGVSTFLPASTKAGKARVRMRWSKEVNLFIMRTYFYITKLETDMTTYRQQLHELFTRKFPEITVSEQRISDQRRAIVRNKLLSQEIIDQLKEEIRIELQADDNATTLVQNITDIAQRPQTQPYTQLQPSVQSQLYNQSQANTQTSHTSTQTEYITLTLENDIETLIVENHDLTTHTYIQEIHDKFRTTLAQYSGMDPATRPRLPKLRYSPNLFRLVNLFNENILNQFISDETQLIDIHTLIYCTAVVISEELNFKITQNTGNTRPKQNIKPAWQQRLEKDIEKLRADIGRLTQYINNNRSNKVVRRVEAIFRSHLIHTRHEHNNRKPEEFLDTIKQKLALKVHRLRRYKKAQQRKNDNAIFATNEKIFYRNLNKPNTDTNHDTNTDTPNQPTKEQLETYWSSIWEEQARHNDEATWITEEETKWRAIHEMEFVEITEADITHITGRLHNWKSPGIDKVHNFWFKKLTSLYKPIARNLTQIILGQQNIPEFIATGITYMLPKTKNSPHPSQYRPITCLPTIYKILTSAITAKINTHIEHHNIMAEEQKGCRQGHMGCKEQLIIDSTIHKHATTKNRNLHCTYIDYKKAFDSVPHSWLIQILKIYRVNSKIIDFLSNIMSQWKTTLHMNCNHNNVITRQIFIRKGIYQGDSLSPLWFCLALNPLSHLLQRCRAGYCLKHTTTQAQLQEQTTISHLIYMDDIKLYAQTEKEMKKLVEATAEFSQDINMQFGLDKCKTLHIIRGKIRPGNYVVNNTDTITAMEPSDLYKYLGYTQLKGLDHVRTKETLTAEYKRRLNAVCKTQLSGKNLIKALNTFAIPILTYSFGVIKWTKTDTEQLERTTRTTLTKNNNLHPKSAVERLTIKRQNGGRGLIDIQHLWRKQVCRLKTFFHTKSHTSNIHKAIAQNDHSYTPLNLYEQSDTSHIDNEDPQTQKIEDWKKKVLHGRHPHDLEQSHVNKIASNKWLKIGNLFPETEGFIIAIQDQIINTKNYRKFIIKDPSVTNDKCRKCHTQPETIQHITGACATLTQTDYTHRHNQVANIIHQRLAVKYTLIQDTNTPYYNYTPQATLENDTHKLYYDRAILTDRTIHYNRPDIILQDKINKVTYLVDIAVPNTHNIQKTITGKISKYADLKQEVTRIWRQEKVYVVPIVLFTTGVIPNHLLHSLKLLSLKETLYITLQKAAILNTCRIVRKFMQVEENEIGPHHNTPST

SEQ ID NO: 21680 - protein, 1140 aa, Sesamia nonagrioides
MRTYFYTTKLETDMTTYRQQLHEHFSRQYPEISVSEQRISDQRRAIVRNALLSQTELDHLKEEVRTQLQHESENYANTNTIMPTQNTNVEPQALTPLHTINQCLADNQTSHLSTQIESITLTLENDIEIATATNEITDKYIQDIHGKFKTTLTLYSGMDPAARPKLPKLKYSRNLFRLVNIFNEYILKQFLSNDTQLIDIHTLIYCTAAVISEELNFKITEHARNTIQRDTGKPPWQQRLEKDIEKLRADCGRLTHYINGIRSHKVVKKVEAIFKNNLTHTRHENNNRKPEEFLDTLKQKLALKVHRLRRYLKAQKRKKDNAIFSTNEKLFYRNLQKPHTSTENDTETPSKEHLETFWSNIWEEQVCHNDKATWITEEATKWRAIGEMEFKEITETEITHITSRLHNWKSPGIDKIQNFWYKKLTVLHKSIAKNLTDIVLGDQNVPEFVATGITYMLPKTKYTSEPSQYRPITCLPTIYKILTSAITHKINSHVEHHSIIAEEQKGCRRGHMGCKEQLVIDSTIHKHATTKNRNLHCTYIDYQKAFDSIPHSWLIKINPKIIDFLRIIMTRWKTTLHINNRLSSLITRQIHIRKGIYQGDSLSPLWFCLALNPLSNLLNRCRVGYQFKNNSEETTISHLIYMDDIKLYAQTEKQMKTLIDITKTFSQDINMQFGLDKCRTLHIIKGKVKPGNYTVSNTDIIAAMEPSDLYKYLGYKQLKRLEHTAIKQTLNTEYRSRINAICKTQLSGKHLIKALNTFAIPILTYSFGIIKWSKTDIEQLERTTRTTLTKHNNLHPKSAIERLVIKRQNGGRGLIDIHQLWQKQINRLQTFFYTKSRTSNIHKAITLNDFNYTPLNLNEQNTQDTNTIYPQTQKIENWKKKALHGRHPHDLEQSHINKLASNKWLKIGNLFPETEGFIIAIQDQVINTKNYRKFDPSVTNDKCRRCHVQAETIQHITGACIALTQTDYTHRHNQIANIIHQKLALKHRLIQNTNTPYYKYTPHSVLENDTYKLYYDRAILTDRTIHYNRPDITLQDKVRQITYLIDIAVPNTHNLQKTITEKISKYTELKEEITRIWRQEKVYVVPIVLSTTGVIPNHLLCSLKLIDLEEPTYIDMQKAAILNTCRIVRKFMQLEENTTP

SEQ ID NO: 21681 - protein, 930 aa, Muschampia proteus
MRLEKDIEKLRVECGRLTQYIKGNRSKKIIKYVQNIFKSTLIHTTHENNNRKPEEFLDTLKQKLALKVNRLKRYKKAQQRKNDNIIFRTNEKIFYKKLHKPQTMIVNEPDVPTEEHLEKFWSDIWEDKVQHNEKADWIVEEEKKWNTIEEMEFIEITETDITYITHRLHNWKSPGVDKIHNFWYKKLVSLHKPIAKNITNIILGKQSIPEFIATGITYMLPKSEYTPHPAQYRPITCLPTIYKILTSAITLHINKHIERHNILAEEQKGCRRGHMGCKEQLIIDSTIHKHATSKNRNLHCTYIDYKKAFDSIPHSWLLKILKIYKINPKIILFLQNIMTQWKTTLHLTTQRKSIKTRQISIRKGIYQGDSLSPLWFCLALNPLSHSLHRCQVGFPLKHDKTDTIISHLVYMDDIKLYAKTEIGMKKLLDTTIQFSKDINMEFGIEKCKTLHIKRGKIQPGDYSINNVGTIIAMEPNDLYKYLGYKQLKGLDHRAIKETLTTEYRNRMNKLCKTQLSGKNLIKSINTYAIPILTYSFGIVKWTSTDIERLERMARTTLTKHNNLHPKSAIERLTIKRQDGGRGLIDICKLWKSQISRLKEFFYTKSQTSIMHKAVVQNDRNYTPLNLFAPDKVITQYTQHDNTPHNSNTQKDKIEDWKKKVLHGRHPHDLEQSHVDTVASNKWLQIGNLFPETEGFMIAIQDQVINTRNYRKHIMKDPTLINDKCRKCHTHPETIQHITGACITLTQTDYTHRHNQIANIIHQKLALKHKLLQNTKTPYYQYTPQTILENKTYKLYYDRAILTDKTIHYNRPDITFQDKVNRVTYLIDIAVPNTHNLQKTITEKINKYTELQEEVTRIWRQDKVLIVPIVVSTTGVIPNHLHHSLKQLHLNENTYITVQKAAILNTCRIVRKFLQIDETEILTHHSRQTKV

SEQ ID NO: 21682 - protein, 1029 aa, Muschampia plurimacula
MHIQVIYDKFSTALTKYSEINPVDRPKLPKLRYSPHLFQLINIFNQDILSNSITKETKLVDIHNIIYCTALTISQELKYKVTDDIQNIIPKNRNKPPWQMRLEKDIEKLRVECGSLTQYIKGNRSKKIIKYVQNIFKSTLIHTTHENNNRKPEEFLDTLKQKLALKVNRLKRYKKAQQRKNDNIIFRTNEKIFYKKLHKPQTMIVNELDVPTEEHLEKFWSDIWEDKVQHNEKADWIVEEEKKWNTIEEMEFMEITETDITYITHRLHNWKSPGVDKIHNFWYKKLVSLHKPIAENITSIILGKQSIPEFIATGITYMLPKSEYTPHPAQYRPITCLPTIYKILTSAITLHINKHIERHNILAEEQKGCRRGHMGCKEQLIIDSTIHKHATSKNRNLHCTYIDYKKAFDSIPHSWLLKILKIYKINPKIILFLQNIMTQWKTTLHLTTQRKSIKTRQISIRKGIYQGDSLSPLWFCLALNPLSHLLHRCQVGFPLKHDKTDTIISHLVYMDDIKLYAKTEIGMKKLLDTTIQFSKDINMEFGIEKCKTLHIKRGKIQPGDYSINNVGTIIAIEPNDLYKYLGYKQLKGLDHRAIKETLTTEYRNRMNKLCKTQLSGKNFIKSINTYAIPILTYSFGIVKWTSTDIERLERMALTTLTKHNNLHPKSAIERLTIKRQDGGRGLIDIYKLWKSQISRLKEFFYTKSQTSIMHKAVVHNDRNYTPLNLFAPDKVITQHTQDDNTPHNNNTQKDKIEDWKKKILHGRHPHDLEQSHVDTVASNKWLQIGNLFPETEGFMIAIQDQVINTRNYRKHIMKDPTLINDKCRKCHTHPETIQHITGACITLTQTDYTHRHNQIANIIHQKLALKHKLLQNTKTPYYQYTPQTILENKTYKLYYDRAILTDKTIHYNRPDITLQDKVNRMTYLIDIAVPNTHNLQKTITEKINKYTELQEEVTRIWRQDKVLIVPIVVSTTGVIPNHLHHSLKQLHLNENTYITVQKAAILNTCRIVRKFLQIDETEILTHHSRQTKV

SEQ ID NO: 21683 - protein, 1317 aa, Ochropleura plecta
METRSKNKRIGPLPGGDRRGAPGADAGCHSMRTVSGEELNRRAPTDKDTTAEIIDDGDRLTDRTDTPVEPYSPSTVSYTPSRPSSPSISSSPTLSTHPIITLNTVSPTPTLNAARGVSTFLPASTKAGKARVRMRWSKEVNLFIMRTYFYITKLETDMTTYRKQLHELFTQQYPEITVSEQRISDQRRAIVRNKLLSQAIIDQLKEDIRVQLQADDNTTPLLENLTDIAQQPQTQLNTQSQPNIQSQLYNQLQANTQTSHTSTQTEYITFTLENDIETLVVENHNPTTDTYIQEIHDKFRTTLSQYSGMDPAIRPKLPKLRYSPNLFRLVNLFNENILNQFISDETQLIDIHTLIYCTAVVISEELNFKITQNTGNQRPKQNIKPAWQQRLEKDIEQLRADIGRLTQYINNNRSSKVVRRVEAIFRTHLVHTRHENNNRKPEEFLDTIKQKLALKVHRLRRYKKAQQRKNDNAIFATNEKIFYRNLNKPNTDTHYDTNTDTPTQPTKEQLETYWASIWEQQARHNDEAAWITEEETKWKAIDEMEFVEVTEADITHITGRLHNWKSPGIDKVHNFWFKKLTSLYKPIARNLTQIILGQQNAPEFIATGITYMLPKTKNSPQPSQYRPITCLPTIYKILTSAISTKINTHIEQHNIMAEEQKGSRRGHMGCKEQLIIDSTIHKHATTKNRNLHCTYIDYKKAFDSVPHSWLIQILKIYRVNSKIIDFLSNIMSQWKTTLQINCNQNSITTRQILIKNGIYQGDSLSPLWFCLALNPLSHLLQRCQAGYRLKHTTEQTTISHLIYMDDIKLYAQTEKDMKKLVEVTADFSQDINMQFGLDKCKTLHIIRGKIRPGNYVVNNTDTITAMEPSDLYKYLGYTQLKGLDHVRIKETLTAEYKRRLNVVCKTQLSGKNLIKALNTFAIPILTYSFGVIKWTKTDTEQLERNTRTTLTKHNNLHPKSAIERLTIKRQNGGRGLIDIQHLWRKQVCRLKTFFHTKSHTSNIHKAIVQNDHNYTPLNLNEQLDHTSHNTNEDPQTQKIDDWKKKVLHGRHPYDLEQTHVNKDASNKWLKIGNLFPETEGFIIAIQDQIINTKNYRKFIIKDPSVTNDKCRKCHTQPETIQHITGACTTLTQTDYTHRHNQVANVIHQRLAVQYTLIQDTNTPYYNYTPQATLENDTHKLYYDRAILTDRTIHYNRPDIILQDKKNKITYLIDIAVPNTHNIQKTITEKISKYAELKEEVTRIWRQEKVYVVPIVLSTTGVIPNHLLHSLKLLSLKETLYITLQKAAILNTCRIVRKFMQIEENEIGPHHNTPHTST

SEQ ID NO: 21684 - protein, 1313 aa, Helicoverpa zea
METRSKSKRIGPLPGGDRRGTPGADAGCHSMRTVSGEEFNRRAPTDKDTTADNSDDGDRHTDRTDTPIEPFSPSTISYTPSRASSPSIPSSPPTHSSPPHTSMRYYPPLPALNVARGASAFLPASTKAGKPRVRMRWSKEVNTFIMRTYFHITKLETDMTTYRQQLHELFTRQYPEISVSEQRISDQRRTIVRNKLLSQVEIDKLKEEMREQLETLSYIPMTETHTATQNTTQVQSHSPTQSQTNTQSQPYTHTPPYSQGTHTSTQTENITITLENDIETLENFHQNQLSDTYIQEIHEKLKTALTQYSGMDPAVRPKLPKLKYTPKLTHLVRIFNTIILHQYIDEKMTIIDVHTLIYCTALVISEELNYKITEYTGNTRPRTVNKPPWQQRLERDIEKLRADCGRLTQYINNNRSNRVVKRVEAIFKNMTTHTRHENDNRKPEEFLDTLKQKLALKVHRLRRYNKAQERKHDNTMFATNEKNFYRNLHKSQIHTTTDINTNTQLPTTEQLESFWAGIWEDQVQHNDKARWITEETTKWNALEEMEFTNISESDINYTTAKLHNWKSPGIDKIHNYWYKKFDSLHKIIAKNFTDIVLGKQNIPDFIATGITYMLPKTQYSSQPSQYRPITCLPTIYKILTSVLTNKINKHIEHHNIIAEEQKGCRRGHMGCKEQLIIDSVIHKHATTKNRNLHCTYIDYKKAFDSIPHTWLIQILHIYKINPKIIDFLHHIMARWKTTLHVHYNNDTITTRQISIRKGIYQGDSLSPLWFCLALNPLSNLLNNCQAGYPLKHTTTDEITISHLIYMDDIKLYTKTEREMKQLIDITTEFSTDINMQFGLDKCKTLHIIRGKIKPGDYTVNTSDTIAAMEPTDLYKYLGYKQLKGLDHTSIKNTLISEYKRRVTAICKKQLSGKHLIKALNTYAIPILTYSFGIIKWSKTDIQQIERTTRTTLTKHNNLHPKSAIERLTIKRQNGGRGLIDINYLWQKQIHRLKTFFHTKSHTSIIHKSVTLNDHNFTPLNLHEQTDTQHNNTTDPQIQKIEDWKKKVLHGRHPHDLEQPHIDTIASNKWLKIGNLFPETEGFIIAIQDQIINTKNYRKYIIKDPTATNDKCRKCHTQPETIQHITGACTTLTQTDYTHRHNQVANIIHQKLALKHKLIQDTNTPYYKYTPQTVLENNTHKLYYDRAILTDRTVHYNRPDITLQDKINKVTYLIDIAVPNTHNLQKTIVEKISKYEELKEEVTRIWRQDKVYVVPIVVSTTGVIPNHLHHSLKLIELKDSIYILLQKAAILNTCRIVRKFMQLDEHGITPQHTQ

SEQ ID NO: 21685 - protein, 1320 aa, Xestia xanthographa
METRSKKKRIGPLPGGDRRGAPGADARCHSMRSVSGEELNRRAPTDKDATAEIIDDGDRLTDRTDTPVEPYSPSTVSYTPSRRSSPSIPSSPTVSSPPIISLNTVTPTPTLNVARGVSTFLPASTKVGKARVRMKWSKEVNLFIMRTYLHITKLETDMTTYRQQLHALFTRQYPEITVSEQRISDQRRTIVRNKLLSQEVIDQLKEEVRTQLQQEEIVNYTDTNNITQNINGIGYQEQPQLLSQSQLIYAQSQPYSQSQAYTQTSHTSTQTESITLTLENDIETIVVPDQHLTTDTYIQEMNEKFRTTITQYSGMDPAARPRLPKLKYTPHLFRLVNLFNESILTQFISDDTKLIDIHLLIYCTAVVISEELNFKITDHTGTPRTRQNIVPAWQQRLEKDIEKFRADIGRLTQYISGCRSNKLVKRVEIIFRNNSTHTRHENSNRKPEEFLDTLKQKLALKVHRLKRYKKAQQRKNDNATFATNEKMFYRNLHTPQTDTNHENNTNTPNLPSKEQLETYWAGIWEEQKQHNDKASWIADEEAKWRDIDVMEFVEVTESDIIHITARLHNWKSPGIDKIHNFWYKKLTALHKSMAKNLTDIVLGQQNIPEFITTGITYMLPKTKYTSEPSQYRPITCLPTIYKILTSAVTKKINSHIIQHNIIAEEQKGCRQGNMGCKEQLIIDSTIHKHATSKNRNLHCTYIDYKKAFDSVPHSWLIQILEIYRINPKIVDFMRHVMLQWKTTLKINSSNNNVTTRQISIKTGIYQGDSLSPLWFCLALNPLSHLLQRCGAGNCLKHAADETTISHLIYMDDIKLYAKSEKDMKKLVDITAEFSQDINMQFGLEKCKTLHIVRGKVRPDYAVNESDSITALEPTDLYKYLGYTQLKGLDHVKIKDTLTTEYKKRVNAVCKTQLSGKHLIKALNTLAIPVLTYSFGVIKWTKTDTEQLQRTTRTTLTKHNNLHPKSAIERLTIKREHGGRGLIDIQHLWWKQVSRLKSFFHTKSRNSNIHKAIVTNDLNYTPLNLSDQIETQNTTNDDPQTQKIKDWKRKVLHGRHPHDLEQSHINKLASNKWLKIGNFFPETEGFIIAIQDQVINTKNYRKYIIKDPTVTNDKCRKCHVHPETIQHITGACTTLTQTDYTHRHNQVANIIHQKLALKHALIQNTNTPYYNYKPETTLENTTHKLYYDRAILTDRTIHYNRPDVILQDKINKVTYLIDIAVPNTHNIQKTITEKINKYAELKEEVTRIWRQEKVYVVPIVLSTTGVIPNHLIHSLKLLDLKETLYITLQKAAILNTCRIVRKFMQIEENEIGPHHNTTSSN

SEQ ID NO: 21686 - protein, 1310 aa, Abrostola tripartita
METRSKSKRIGSLPGGDRRGTPGADAGCLSMRTVSGEELNRRAPTDKDTTAEIIDDGDRLTVRDSPVEPYSPSTVSYIPSIPSSPSIPSSPSIPLSPPISSSPLIRLNTDSPMPASSVAREVSSFLPASTKAGKQRVRMKWSKEVNLFIMRTYYYITKLETDMTIYRKLLHETFSRQYPHISVSEQRISDQRRTIVRNKLLSQEELDRLKEEVRTQLLEDNNTDINRTSPAPDQNFNVTPLHTQNSPDLFTQTYTHNTQISHTSTQTESVTLTLVNDIDTLVEHNPITEAYTKEIRDKFQTALTQYSGMDPTARPKLPKLKYSFKLTQLVILFNERVLSSFISESMQLVDLHTLIYCTALVVSEELGFKVTEYNGITRPKYNNKPAWQLRLENDIEKLRADCGRLTQYINNNRSNKVIKRVEAIFKSKIMHTRHENNNRTPEEFLDTLKQKLALKVHRLKRYKKTQQRKNDNTLFNTNEKLFYRNLAKPQSDTSAQDNTEIPTKEQLEAFWSGIWEEQVQHNDEAEWITEEEKRWTTIEEMEFIEITENDIATITAKLHNWKSPGLDKIHNFWYKKLFSLHKSLARNFTDIILGKQNIPEFIATGITYMLPKDKHSPLPSQYRPITCLPTIYKILTSAIATRISTHTEEHQIIAEEQKGCRRGHMGCKEQLVIDSTIHKHATSKNRNLHCTYIDYKKAFDSIPHSWLLKILQMYKINSKIIDFLRSIMLSWKTTLQLNYHQNSVTTRQISIKKGIYQGDSLSPLWFCLALNPLSFMLHRCQAGYSLKNTMQETTISHLIYMDDIKLYAKTEKEMKKLLDKTTEFSKDINMQFGLEKCKTIHIVRGKIKPGDYPVSNSDTITAMEPTDLYKYLGYKQLKGLDHTTLKNSLITEYKRRINALCKSQLIGKHLIKSINTYAIPILTYSFGVIKWSKTDIELVERSTRTTLTKHNNLHPKSAIERLTIKRHNGGRGLIDIHSLWQKQISRLKVFFLEKSRTSDIHKAITLNDHNYTPLNLSDQTIDLHSDDNRDPQKEKIDNWKKKVLHGRHPHDLEQSHINTAASNKWLKIGSLFPETEGFIIAIQDQIINTKNYRKFIIKDPTITNDKCRKCHSQPETIQHITGACTTLTQTDYTHRHNQVANIIHQKLALKYTLIQNTNTPYYKYTPQTILENTTHKLYFDRAILTDRTIHYNRPDITLQDKINNTTYLIDIAVPNTHNVQKTISEKISKYAELKDEVSRIWRQEKVYVVPIVLSSTGVIPNHLLHSLKLLDLKETIYITLQKAAILNTCRIVRKFLQIDENDIAPHHNTP

SEQ ID NO: 21687 - protein, 1278 aa, Autographa gamma
METRSKKKRIGPLPGGYRRGTPGADAGCLSMRSVSGEELSRRALTDKDTTAENSDEIDRLTDRTISPVEPFSPSTISYTPSLASSPLTISSSDILPTPTLDVAREVNTFLPASTKAGKQRVRMKWSKEANLFIMRTYYYITKLETDMTIYRKVLHELFSQKYPEISVSEQRVSDQRRTIVRNKLLSQAELDTLKNEVRAQLEERANEIPLAQEDTEDLSINIPNGTQNLNTQTLTQNYLTSHIGTQTESLTLTIENDINTFVEPDPLPDPCTEDILEKLKTALVLYSGMDPVSRPKLPKLKYSPKLMQLVVLFNNSILSNFVSEDTQLVDLNTLIYCTALVISEELNYKVTEYAGNTRPKYNNKPAWQIRLERDIEKLRADCGRLTQYINNNRSNKVIKRVEAIFKSRVTHTRHENDNRKPEEFLDTLKQKLALKVHRLKRYAKAQQRKNDNIVFSTNEKMFYRNLSKPQSAQDNSELPTKEALENFWSGIWEQQVQYNDNAEWIRQEEAKWIAIEEMGFADITETDILNVTVRLHNWKSPGVDKIHNYWYKKLVTLHKILAKNLTDVILGRQIIPDFLATGVTYMLPKGKHSAEPSLYRPITCLPTVYKILTSVITSKINKHIDHHNIIAEEQKGCRRNHMGCKEQLIIDSTIHKHASTKNRNLHCTYIDYQKAFDSIPHAWLVKILEIYKINFKIIRFLSSIMTRWKTTLQLNYNRNTIMSRQIFIRKGIYQGDSLSPLWFCLALNPLSSMLHRNRVGYCLKHSTQEVIISHLIYMDDIKLYSKSEQDMKKLIDTTTLFSNDINMQFGLDKCKTLHIIRGKIKPGDYPVNVTDCITAMEPTDLYKYLGYKQLKGLDHTSIKGTLDTEYRRRVNALCKSHLAGKHLIKAINTYAIPILTYSFGVIKWTKTDIEKIERTTRTTLTKHNNLHPKSAIERLTIKRQDGGRGLIDIHHLWQKQIIRLKSFFLTKSYTSDVHKAIAQNDDNYTPLNLNDQTEIPNICNDEPQKQKMETWKKKVLHGRHPHDLEQPHVDTIASNKWLKVGNLFPETEGFILAIQDQIINTKNYRKYIIKDPSVTNDKCRKCHTQPETIQHITGACTSLTQTDYTHRHNQVVNIIHQQLAALKYKLIENNKTPYYKYSPQTVLENGTHKLYYDRAILTDKTIHYNRPDITLQDKESKTTYLIDIAVPNTHNLQKTIAEKISKYAELKEEVARIWRQDKVVVVPIVLSSTGVIPNNLHNSLKIIELNKSTYITLQKAAILNTCRIVRKFLTLEDN

SEQ ID NO: 21688 - protein, 1251 aa, Autographa pulchrina
MRSVSGEELSRRAPIDKDTTAETSDEIDRLTDGTISPVEPFSPSTIFYTPSLASSPLTVSNSDILPTPTLDVAREVNTFLPASTKAGKQRVRMRWSKEVNLFIMRTYYYITKLETDMTIYRKVLHELFSQKYPEISVSEQRVSDQRRTIVRNKLLSQAELDRLKNEVRAQLEECANEIPLVQENTEDLSIPLPNSTQLNLNTQTLTQNYLTSHIGTQTESLTLTIENDINTFVEPDPLPDPCTEDILEKLKTALVLYSGMDPVSRPKLPKLKYSPKLMQLVVLFNNSILSNFVSEDTQLVDLNTLIYCTALVISEELNYKVTEYAGNTRPKHNNKPAWQIRLERDIEKLRADCGRLTQYINNNRSNKTIKRVEAIFKSRITHTRHENDNRKPEEFLDTLKQKLALKVHRLKRYKKAQQRKNDNIVFSTNEKIFYRNLSKPQSESIAQDNDELPTKESLENFWSGIWEQQVQYNDNAEWIRQEEAKWIAIEEMGFADITETDILNITVRLHNWKSPGVDKIHNYWYKKLVTLHKILAKNLTDVILGRQIIPDFLATGVTYMLPKGKHSAEPSQYRPITCLPTVYKILTSVITSKINKHIEHHNIIAEEQKGCRRNHMGCKEQLIIDSTIHKHASTKNRNLHCTYIDYQKAFDSIPHAWLVKILEIYKINFKIIEFLSSIMTRWKTTLQLNYNRNTIISRQISIRKGIYQGDSLSPLWFCLALNPLSSMLHRNRVGYCLKHSTQEVIISHLIYMDDIKLYSKSEQDMKKLIDTTTLFSNDINMQFGLDKCKTLHIIRGKIKPGDYLVNVTDCITAMEPTDLYKYLGYKQLKGLDHTSIKGTLDTEYRRRVNALCKSHLAGKHLIKAINTYAIPILTYSFGVIKWTKTDIEQIERTTRTTLTKHNNLHPKSAIERLTIKRQDGGRGLIDIHHLWQKQINRLKSFFLTKSNTSDVHKAIAQNDDNYTPLNLNDQTEIPNICNDEPQKQKMETWKKKVLHGRHPHDLEQPHVDTIASNKWLKVGNLFPETEGFILAIQDQIINTKNYRKYIIKDPKVINDKCRKCHTQPETIQHITGACTSLTQTDYTHRHNQVVNIIHQQLALKYKLIENNKTPYYKYTPQTVLENGTHKLYYDRAILTDKTIHYNRPDITLQDKESKTTYLIDIAVPNTHNLQKTIAEKISKYAELKEEVARIWRQDKVVVVPIVLSSTGVIPNNLHNSLKVIALNKSIYITLQKAAILNTCRIVRKFLTLEDN

SEQ ID NO: 21689 - protein, 1281 aa, Autographa pulchrina
METRSKKKRIGPLPGGYRRGTPGADAGCLSMRSVSGEELSRRAPIDKDTTAETSDEIDRLTDGTISPVEPFSPSTISYTPSLASSPLTVSNSDILPTPTLDVAREVNTFLPASTKAGKQRVRMRWSKEVNLFIMRTYYYITKLETDMTIYRKVLHELFSQKYPEISVSEQRVSDQRRTIVRNKLLSQAELDRLKNEVRAQLEECANEIPLVQENTEDLSIHLPNSTQLNLNTQTLTQNYLTSHIGTQTESLTLTIENDINTCVEPDPLPDPCTEDILEKLKTALVLYSGMDPVSRPKLPKLKYSPKLMQLVVLFNNSILSNFVSEDTQLVDLNTLIYCTALVISEELNYKVTEYAGNTRPKHNNKPAWQIRLERDIEKLRADCGRLTQYINNNRSNKVIKRVEAIFKSRITHTRHENDNRKPEEFLDTLKQKLTLKVHRLKRYKKAHQRKNDNIVFSTNEKMFYRNLSKPQSESIAQDNAELPTKETLENFWSGIWEEQVQYNDNAEWIRQEEAKWIAIEEMGFADITETDILNITVRLHNWKSPGVDKIHNYWYKKLVTLHKILAKNLTDVILGRQIIPDFLATGVTYMLPKGKHSAEPSQYRPITCLPTVYKILTSVITSKINKHIEHHNIIAEEQKGCRRNHMGCKEQLIIDSTIHKHASTKNRNLHCTYIDYQKAFDSIPHAWLVKILEIYKINFKIIEFLSSIMTRWKTTLQLNYNRNTIISRQISIRKGIYQGDSLSPLWFCLALNPLSSMLHRNRVGYCLKHSTQEVIISHLIYMDDIKLYSKSEQDMKKLIDTTTLFSNDINMQFGLDKCKTLHIIRGKIKPGDYPVNVTDCITAMEPTDLYKYLGYKQLKGLDHTSIKGTLDTEYRRRVNALCKSHLAGKHLIKAINTYAIPILTYSFGVIKWTKTDIEQIERTTRTTLTKHNNLHPKSAIERLTIKRQDGGRGLIDIHHLWQKQISRLKSFFLTKSNTSDVHKAIAQNDDNYTPLNLNDQTEIPNICNDEPHKQKMETWKKKVLHGRHPHDLEQPHVDTIASNKWLKVGNLFPETEGFILAIQDQIINTKNYRKYIIKDPKVINDKCRKCHTQPETIQHITGACTSLTQTDYTHRHNQVVNIIHQQLALKYKLIENNKTPYYKYTPQTVLENGTHKLYYDRAILTDKTIHYNRPDITLQDKESKTTYLIDIAVPNTHNLQKTIAEKISKYAELKEEVARIWRQDKVVVVPIVLSSTGVIPNNLHNSLKVIELKKSTYITLQKAAILNTCRIVRKFLSLEDN

SEQ ID NO: 21690 - protein, 1121 aa, Calpodes ethlius
MRMSWSKEAKIFIMRTYYYITKLETDMTMYRKQLHNIFSQQYPEINVTEQRISDQRRTIIRNKLLPINTLNEIKEEVRIKLREHTDLIDNTQTNPQTTQAHNIESPLVTQTHTQLYTESSHMATQTSHTYAQTECETVIVENDIEMLVEINPLTETHIQRLHDRLKTTLIQYSGMDPTVRPKLPKLKYSYKLSQLTNLFNNDILPQYISNDTKLIDVHTLIFCTGLVISEELNYKIIAHTNNERSKTSCKPPWQQRLEKDIEKLRADCGRLTQYINNNRSNKLVKKVQEIFKRKIIHTRHENNNSKAEEFLDTLKQKLALKVHRLKRYKKAQQRKNDNILFNKNEKVFYRNLLKQTYNYTTENLDIPTVTQLEDFWAQIWEEDVQHNDKAEWIVQEESRWSAIPEMDFIEITETDITNVTATLHNWKSPGIDKIHNYWYKKLTTLHKSIAKNLTHIILGKQNIPEFIATGITYMIPKSTHTQEPSQYRPITCLPTLYKILTSVIARKVNTHIEHNNIMAEEQKGCRRGHMGCKEQLVIDSTIHKHANTKNRNLHCTYIDYQKAFDSVPHSWLIHVLHIYKINPKIINFMRNVMMHWKTSLQLSSRNNTITTRQIIIRKGIYQGDSFSPLWFCLALNPLSKLLRDCQAGYTLKSTIDKTTISHLIYMDDIKLYSQTQKQMEQLINITREFSEDINMRFGLDKCKTLHIMKGKIRPGDHNLDENNTIRAMEPSELYKYLGYNQLKGLHHTQIKQTLITEYKKRVNAICKTQLTGKSIIKALNTYAIPILTYSFGVVKWSNTDIEHIERTTRTTLTKHNYLHPKSAVERLTIKRYHGGRGLIDVHNLWEKQIDNLRSFFHTKSLSSNIHKAICQNDHNFTPLNLSVNLTIPRTDNRDPHSYKIDNWKKKTLHGRHPHDLQQPHIDSVASNKWFTIGSLFPETEGFLIAIQVQIINTKNYRKFIIKDPPVTNDKCHTQPETIQHITGACTTLTQSDYIYGHNQIVNIIHQKLALKHNLIERTNSPYYKYAPSTVLENTTLKLYYDRAILTDRTIDYNRSDITLLDKINKITYLIDIAVPNTHKIQKTITEKINKYIELKEEIVRIWKQNKVYVVPIVLSTTGVIP

SEQ ID NO: 21691 - protein, 1035 aa, Vanessa cardui
MSTQTESVTIILENEVNTLNAQNPITETYIQEIYDKFSTTLLQYSGTDPLIRPRLPKIKYSKQLYNLIQIFNENILNRFISEDTQLIDIHTIIYCTALVITEEVNPKQIENMQRTKTKQTNKPPWQQRLERDIEKLRADCGRLTQYIYNNNRSNKVVKRVEEIFQNCNIHTKHDRNNKKPEEYLDTLKQKLALKVNRLRRYKKAEQRRNDNAIFTTNEKLFYRNLQKPHTPTNTVTDRNTDVPTKQDLEVFWSGIWEEQVSHNSKASWINDEKIEFSIIEEMEFVEVTETDITNITAKLHNWKSPGIDKIHNFWYKKLTSLHKCIAKNLTHIVLGQQKIPEFMTIGITYMLPKTKHSPQPSQYRPITCLPTIYKILTSVITNKISTHIEQHNIIAEEQKGCRRAHMGCKEQLVIDSTIHKHAATKNRNLHCTYIDYQKAFDSIPHSWLIEILEIYKINPKIIDFLRKIMSYWKTTLHLNYGQNTIVTRQIQTKKGIYQGDSLSPLWFCLALNPLSHLLHRCRVGYSLKSIEETIVSHLIYMDDIKLYAKSDKDMKKLIEVTKEFSTDINMQFGLDKGKTIHIIKGKIKPGNYAITSSDTITAMEPTDLYKYLGYNQLKGLDHTSIKHTLTIEYKRRINVICKTQLSGKNLIKAINTYAIPILTYSFGIIKWTKTDIEQIERNTRTILTKHNNLHPKSAIERLTLKRQNGGRGLIDIYNLWQKQINTLKTFFHLKSRTSDIHKAIVVNDNNYTPLNLSEQGYHMNDCIDDPQKQKLENWKKKVLHGRHPHDLEQPHINTIASNKWRTEGFIIAIQDQIINTKNYKKYIIKDPTITNDKCRKCHIQPETIQHITGACITLTQTDYTHRHNQVSNIVHQKLALKHKLIQNTKTPYYKYTPQTILENATHKIYYDRGILTDKTIHYNRPDITLQDKINKVTYLIDIAVPNTHNLQKTIAEKINKYNELKEEVTRIWKQEKVYIIPIVISTTGVVPNHLLHSLKLLDLNESLYIPIQKAAILNTCRIVRKFMQLEETDTT

SEQ ID NO: 21692 - protein, 1311 aa, Mimas tiliae
METRSKKKLRGPLPGGDRRGTPGADAGCYSIRTVSGKELNRRTPAGSPESVTADIDLPDRLTDSRTDSPIEPYSPSTVSYILSTDSSPSIPRSPPSNSYRDPSIPALDVAREVTAFLPASTKAGKPRVRMSWSKDVNLFIMRTYYYITKLETDMTIYRKQLHERFSRQYPDIKVTEQRVSDQRRAIERNKLLSQDTLDQLKEEVRKQLENEINNLDDGDDINLIDRDQNHLQPLSQLCTTHSNAQSIPLDPTSRVQHTHNLLYSQITQTSQISTQTESVTLTVENDIETLMEPNFITDTYTQELFEKFTTSLTLYSGLDPVARPKLPKLRYSPKLTKLTQIFNQNILTKFLSQDTKLIDIHTLIYCTAIVISEELGYKITESIRIQSRSRLNRKPPWQHRLETDIEKLRADCGRLTQYINKNRSKKVVKRVEEIFKSKTTHTRHENKNKTPEEFLDTLKQNLALKVHRIKRYKKAQQRKNDNILFTTNEKTFYRNLKKPRINAYNTENTQNIESPTKEQLETFWANLWEETIEHNNYADWIKEEENRWSTVGEMEFTEITESDIKCITNRLHNWKSPGVDKIHNFWFKKLTSLHKLIAKNITEIILNKQNIPHFIATGITYMLPKGEISSEPSQYRPITCLPTLYKIITAVNTHVEHHNIIAEEQKGCRRGHMGCKEQLVIDSTIHKHATTKNRNLHCTYIDYKKAFDSIPHSWLIKVLEIYKINNSLIKFLQNIMTHWKTTLHLNDHNNSITTRPISIKKGIYQGDSLSPLWFCLALNPLSHILQRCRAGYHLKDNTQETIISHLIYMDDIKLYAKTEKDMKKLIDATSNFSKDINMQFGLDKCRTLHIIRGKIRPGDYTVNNNDIITAMEPADLYKYLGYKQLKGLDHTNIKHTLFTEYQRRINLLSKTQLSAKHLIKAFNTYAIPILTYSFGIIKWTKTDIDKIERITRTTLTKHNHHHPKSAIERLTIKRQEGGRGLIDIYNLWQKQLYNLKTFFYSKSHISNIHKAITHNDYNFTPLNLHEQTDQQNLLSSDPQKQKIEDWKKKVLHGRHPHDLEQPHIDAIASNKWLNIGNLFPETEGFMLAIQDQVINTKNYRKYIIKDPTVTNDKCRRCHTQSETIQHITGACTSLTQTDYTHRHNQVANIIHQSLARKYTLIPNTNTPYYKYTPETILENSSYKLYFDRAILTDRTIHYNRPDIILQDKTNKITYLIDIAVPNTHNIHKIIIEKINKYTELREEVARIWRQQKVFVVPIVLSTTGVIPKHLRTSLDLLNLNNSIYISLQKAAILNTCRIVRKFLQVSDSGMI

SEQ ID NO: 21693 - protein, 1316 aa, Mimas tiliae
METRSKKKLRGPLPGGDRRGTPGADAGCYSIRTVSGKELNRRTPAGSPESVTADIDLPDRLTDSRTDSPIEPYSPSTVSYILSTDSSPSIPRSPPSNSYRDPSIPALDVAREVTAFLPASTKAGKPRVRMSWSKDVNLFIMRTYYYITKLETDMTIYRKQLHERFSRQYPDIKVTEQRVSDQRRAIERNKLLSQDTLDQLREEVRKQLENEINNLDDGDDINLIDRDQNHLQPLSQLCTTHSNAQSIPLDPTSRVQHTHNLSYSQITQTSQISTQTESVTLTVENDIETLMEPNFITDTYTQELSEKFTTSLTLYSGLDPVARPKLPKLRYSPKLTKLTQIFNQNILTKFLSQDTKLIDIHTLIYCTAIVISEELGYKITESIRIQSRSRLNRKPPWQHRLETDIEKLRADCGRLTQYINKNRSKKVVKRVEEIFKSKTTHTRHENNNKTPEEFLDTLKQNLALKVHRLKRYKKAQQRKNDNILFTTNEKTFYRNLKKPRINAYNTENTQNIESPTKEQLETFWANLWEETIEHNNYADWIKEEENRWSTVGEMEFTEITESDIKCITNRLHNWKSPGVDKIHNFWFKKLTSLHKLIAKNITEIILNKQNIPHFIATGITYMLPKGEISSEPSQYRPITCLPTLYKIITAVISFKINTHVEHHNIIAEEQKGCRRGHMGCKEQLVIDSTIHKHATTKNRNLHCTYIDYKKAFDSIPHSWLIKVLEIYKINNSLIKFLQNIMTHWKTTLHLNDHNNSITTRPISIKKGIYQGDSLSPLWFCLALNPLSHILQRCRAGYHLKDNTQETIISHLIYMDDIKLYAKTEKDMKKLIDATSNFSKDINMQFGLDKCRTLHVIRGKIRPGDYTVNNNDIITAMEPADLYKYLGYKQLKGLDHTNIKHTLFTEYQRRINLLSKTQLSAKHLIKAFNTYAIPILTYSFGIIKWTKTDIDKIERITRTTLTKHNHHHPKSAIERLTIKRQEGGRGLIEIYNLWQKQLYNLKTFFYSKSHISNIHKAITHNDYNFTPLNLHEQTDQQNLLSSDPQKQKIEDWKKKVLHGRHPHDLEQPHIDAIASNKWLNIGNLFPETEGFMLAIQDQVINTKNYRKYIIKDPTVTNDKCRRCHTQSETIQHITGACTSLTQTDYTHRHNQVANIIHQSLARKYTLIPNTNTPYYKYTPETILENSSYKLYFDRAILTDRTIHYNRPDITLQDKTNKITYLIDIAVPNTHNIHKTIIEKINKYTELREEVARIWRQQKVFVVPIVLSTTGVIPKHLRTSLDLLNLNNSIYISLQKAAILNTCRIVRKFLQVSDSGMI

SEQ ID NO: 21694 - protein, 976 aa, Xestia xanthographa
MALCVMSSNIYLFIYLFISEELNFKITQNTGNTRPKQNIKPAWQQRLEKDIEKLRADIGRLTQYINNNRSNKVVRRVEAIFRSHLIHTRHEHNNRKPEEFLDTIKQKLALKVHRLRRYKKAQQRKNDNAIFATNEKIFYRNLNKPNTDTNHDTNTDTPNQPTKEQLETYWSSIWEEQARHNDEATWITEEETKWRAIHEMEFVEITEADITHITGRLHNWKSPGIDKVHNFWFKKLTSLYKPIARNLTQIILGQQNIPEFIATGITYMLPKTKNSPHPSQYRPITCLPTIYKILTSAITAKINTHIEHHNIMAEEQKGCRRGHMGCKEQLIIDSTIHKHATTKSRNLHCTYIDYKKAFDSVPHSWLIQILKIYRVNSKIIDFLSNIMSQWKTTLHMNCNHNNVTTRQISIRKGIYQGDSLSPLWFCLALNPLSHLLQRCRAGYCLKHTTTQAQLQEQTTISHLIYMDDIKLYAQTEKEMKKLVEATAEFSQDINMQFGLDKCKTLHIIRGKIRPGNYVVNNTDTITAMEPSDLYKYLGYTQLKGLDHVRTKETLTAEYKRRLNAVCKTQLSGKNLIKALNTFAIPILTYSFGVIKWTKTDTEQLERTTRTTLTKNNNLHPKSAVERLTIKRQNGGRGLIDIQHLWRKQVCRLKTFFHTKSHTSNIHKAIAQNDHNYTPLNLYEQSDTSHIDNEDPQTQKIEDWKKKVLHGRHPHDLEQSHVNKIASNKWLKIGNLFPETEGFIIAIQDQIINTKNYRKFIIKDPSVTNDKCRKCHTQPETIQHITGACATLTQTDYTHRHNQVANIIHQRLAVKYTLIQDTNTPYYNYTPQATLENDTHKLYYDRAILTDRTIHYNRPDIILQDKINKVTYLIDIAVPNTHNIQKTITEKISKYADLKQEVTRIWRQEKVYVVPIVLSTTGVIPNHLLHSLKLLSLKETLYITLQKAAILNTCRIVRKFMQIEENEIGPHHNTPST

SEQ ID NO: 21695 - protein, 1277 aa, Apodemia duryi
METRLRKKLRGPLPGGNRRGTPGADAGCFSMRTISGEESNRRAPTDKNTTAEPYYRDDRHTDNTNNPEEPYSSTTISNTPSVQTLPFIHSLNLDSPTPTLDVARAVNTFLPASTKAGKPRIRMRWSNEVNMFIMRTYYYITKLESDFTTYRKQLHELFEKQYPEVKVSEQRISDQRRTIIKNKLLTEETLNQLKEEVQIQLQTEILNARNVEQLTPDNETEITSQPQLLSQNTQSTHVSTQTESMTLTIENDIETLIVDTTRNDITQQIYDRFRKTLLEFSGSDPKARPKLPKLKYSPQLDRLVHLFNNNILHHFVTEETQLIDIHTIMYSTALVISEELHYKIRYNTQNFRRENNKKPHWEIRLEKDIEKLRADCGRLTQYINNNRSRKLIKKVEAIFKHRLTHTRHENNNKNPQESLDTLKQKLALKVSRLKRYKKAQQNKIDNNMFATNEKQFYRNLQKAKINNENDPQIPTEEQLELFWAGIWEEQVEHNNNADWITIEKNKWSLAQEMEFSEITETDIRNITTRLHNWKSPGIDKIHNYWYKKLTFLHKTLAKNLTDLILGHQNIPDFFATGITYMLPKSHHSSQPSQYRPITCLPTIYKILTSAIATKISTHIEHHNILAEEQKGCRRGHMGCKEQLVIDSTIHKHATAKNKNLHCTYIDYKKAFDSIPHSWLIQILQIYKINPKIIDFLRNMMSQWKTTLQLNSHNKTLTTRQIFIKKGIYQGDSLSPLWFCLALNPLSHLLHSTQVGYYFKRNTKNTVISHLIYMDDIKLYSTSEKDMKTLIYTTTQFSRDIKMELGIEKCKTLHIMRGKVRPGDYTINQAETITAMESTDLYKYLGYKQLKGLDHMSIKHTLTNEYKKRLNVLCKTKLCSKFLIKSINTFAIPILTYSFGIIKWTKTDIEQIERITRTTLTKYNNLHPKSATERLTIKRQDGGRGLIDINHLWKKQIKKLQTFFYTKSQSSNIHEIITQNDQNYTPLNLLQNIITTNVDSDPQKQKIEEWKKKVLHGRHPHDLEQPHIDRLASNKWLKIGNLFPETEGFMIAIQDQVISTKNYQKYIIKDPAIINDKCRKCHTQPETIQHITGACTTLTQTDYTHRHNQVTNIIHQKLALKHKLIQNTNTPYYKYIPETILENDNYKLYYDRAILTDKTIHYNRPDITLQDKTTKTTYLIDIAVPNTHNLLKTITEKINKYADLKEEVLRIWRQEKVYIVPIVISTTGVIPKHLSHSLKLIELDNNTYIPLQKAAILNTCRIVRKFMQIDEKENAPFI

SEQ ID NO: 21696 - protein, 1278 aa, Apodemia zela
METRLRKKLRGPLPGGNRRGTPGADAGCFSMRTVSGEELNRRAPTEKNITAEPYGDDGHTDSTNNPEDYYSSTTISYTPSIQTSPSVNSLNSDSSIPALDVAREVNTFLPASTKAGKPRVRMRWSNQVNMFIMRTYYYITKLETDLTTYRKQLHELFEKQYPEIKVSEQRISDQRRTIIRNKLLTQEALNQLKEEVQTQLQTESENIRNVEPITPVHNEAEVTPQPQLPRQNTRLTHISTQTESMTLTVENDIETLIFYNVTTNDSTQQIHDRFRKTLLEYSGSDPKARPKLPELKYSPQLDRLVNLFNNNILNQFVTEETQLIDIHTIMYSTALVISEELHYKIRDNTQNVRRKHNKKPPWEIRLEKDIEKLRADCGRLTQYINNNRSRKLIKKVEAIFNNKLIHTRHENNNRKPQEFLDTLKQKLALKVNRLKRYKKAQQKKIDNHMFATNEKQFYRNLQNTKTDNEDDSEIPTEEQIELFWSGIWEEQLEHNDSAEWIKVEKNKWNFAQEMEFSEITESDIRNITTRLHNWKSPGIDKIHNYWYKKLTILHKSIAKNLTDLILGHQNIPEFFATGITYMLPKSHHSTQPSQYRPITCLPTIYKILTSAIATKINTHIERHNIIAEEQKGCRRGHMGCKEQLIIDSTIHKHATSKNKNLHCTYIDYKKAFDSIPHSWLIKILQIYKINPTLIEFLRNVMSQWKTTLQLNAHNKTLTTRQIFIKKGIYQGDSLSPLWFCLALNPLSHLLHSTQAGYYFKSSTKDAVISHLIYMDDIKLYSTSEKEMKRLIDTTTQFSRDIKMEFGIEKCKTLHIIRGKVRPGDYAINQAETITAMESTDLYKYLGYKQLKGLDHIPIKHTLTTEYKRRLNVLCKTKLSSKFLIQSINTFAIPILTYSFGIIKWTKTDIEQIERTTRTTLTKYNNLHPKSAIERLIIKRQDGGRGLIDIHHLWKKQIKKLQTFFYTKSQTSTIHEVITQNDQNYTPLNLIENINTSNIDSDPQKQKIEDWKKKVLHGRHPYDLEQSHIDRVASNKWLKIGNLFPETEGFIIAIQDQVISTKNYQKYIIKDPTIINDKCRKCHTQPETIQHITGACTTLTQTDYTHRHNQVANIVHQKLALRHKLIQNTNTPYYKYTPDTILENDNYKLYYDRAILTDKTIHYNRPDITLQDKRNKTTFLIDIAIPNTHNLLKTIAEKINKYADLKEEVLRIWRQEKVYIVPIVLSTTGIIPKHLHHSLKLLELDNSTYIALQKAAILNTCRIVRKFMQINEKENALSL

SEQ ID NO: 21697 - protein, 1320 aa, Zera sp.
METRSKKNRSGPLPGGNRRGTPGADAGCHSMRTVGGEELSRRTPTGSSENATAEIDIMTDRTTPIEPYSPSTSSYTPSIPTSPSLSSCLSTHSLTPTLDVAQAANAFLPTSTKAGKPRVRMSWSKEVNLFIMRTYYYITKLETDFTTYRKQLHELFSRQYPLINVTEQRIADQRRTIVKNKRLSQDTLNQLKEEVRVQLEAEIQIHSSGNDSTNQIENDFTPQNYSLQQSPSQSQLPVTSTHPSHTIIHSRIQSSHPTSPNTQSSHMSTQTNLSVTFMLENDINILESNNAITNNNIQEISNKFRTILTQYSGMDPALRPKLPKLRYSPLLFKLVNIFNQDILMQFISADTQLINIHTIIYCTALVISQELNYKIVDNTENIRPKHHNKPPWQIRLEKDVEKLRANCGRLTQYIKGNRSRKIVKHVEELFKNSNIHTRYEKENRKPEEVLDTLKQKLALKSSRLNRYKKAQKRKTDNTLFTTNEKIFYRNLRNLKDTTIENNPDLPTVEHLETFWSGIWEKQVQHNETADWIVEEKTKWNTIEEMAFVEITETDITNITNRLHNWKSAGVDKIHNFWYKKLSILHKFIAKNLTDIILGKQDAPEFLTTGITYMVPKIQHSQQPSQYRPITCLPTIYKILTSAITQKINKHIERYNIIAEEQKGCRSGHMGCKEQLIIDSTIHKHATSKNRNLHCTYIDYKKAFDSIPHSWLLEILHIYKISPKIIDFLRNIMTRWKTTLQLSTRHKSITTRQIFIRRGIYQGDALSPLWFCLALNPLSHMLHRCQVGYSLKHETIDTIISHLIYMDDIKLYAKTQKDMTKLLDSTTHFSRDINMEFGLDKCKILHIVRGKVRPGNYEINNTDIITAMESTDVYKYLGYKQLKRLDHTEIKSTLTSEYRKRINALCKTQLSAKHLIKSLNTYAIPILTYSFGIVKWTKTDIEKIERTTRTTLTKHNNLHPKSAVERLTIKRQDGGRGLINIHQLWQNQISRLRYFFYTKSITSDIHKAIVQTDSNYTPLNLKGETNIQFTQTSSNDDIHKQNIENWKKKVLHGRHPYDLEQPHIDKIASNKWLQIGNLFPETEGFMIAIQDQIINTKNYRKHIIKDSTIPNDKCRKCHTQPETIQHITGACITLTQTDYTHRHNQVANIIHQKLALKYKLIQNINTPYYNYTPQTILENDTHKLYYDRAILTDKTIYYNRPDIILRNKINKVTYLIDIAVPNTHNIQKTITEKISKYSELKEEVIRIWRQDKVFIVPIVLSTTGVIPKHLRHSLKQLNLKDSTYITLQKAAILNTCRIVRKFMQIDENDIVSHHNTPHTVT

SEQ ID NO: 21698 - protein, 1182 aa, Mamestra brassicae
METRSKRKRLGPLPGGDRRGAPGADAGCLSMRTVSGEELSRRAPTDKDTTAEISGDGDRLTNRTDTPVEPYSPSTVSYTPSRTSSPFVPSSPPLSSLNTVPPTPALNVAREVSTFLPASTKAGKARVRMRWSKDVNVFIMRTYLYITKLETDMTTYRQQLHAHFTRQYPEITVTEQRISDQRRIIVRNKLLSQELIDQVKEEVRTQLSQEESVNVADNITITQNINENTLQGQPQALNQSQPINNQSQPYHQSQLSTQTSHISTQTEYLTLTLENDIETLVVKNQNLTTDIYVQDIHDKFRSTIALYSGMDPAARPKLPKLKYTPNLFRLVNLFNEHILNQFLSDDAHLLDIHLLIYCTAVVISEELNFKITDHTQNTRVRQNTEPGWQQRLVNDIEKLRADCGRLTQYINGSRSNKVVKRVEAIFRNSFTHTRHENSNRKPEEFLDTLKQKLALKVHRLRRYKKAQQRKNDNAIFSTNEKIFYRNLNKPHTDTNDENSSDTSNLPTKEQLETYWSSIWEEPIQHNNEASWIADEDAKWRGIDEMEFIEVTESDITHITARLHNWKSPGIDRIHNFWYKKLTSLHKYLAKNLTDIILGKQHTPDFITTGITYMLPKTKNSPEPSQYRPITCLPTIYKILTSAITRKISSHIIHNNIIAEEQKGCRQGHMGCKEQLIIDSTIHKHASTKNRNLYCTYIDYKKAFDSVPHSWLIKILEIYRIDPKIIVVNNTDTIAAMEPTDLYKYLGYAQLKGLDHIRIKNTLTTEYKRRLNAICKTQLSSKYLIKAINTFAIPVLTYSFGVIKWTKTDTEQLERTTRTTLTKHNNLHPKSAIERLTIKRQHGGRGLIDIQHLWRKQVSRLKTFFYTKSRTSTIHKAIVINDLNYTPLNLSSQNESESTTNDDPQMQKIEEWKKKVLHGRHPHDLELSHINKLASNKWLKIGNLFPETEGFIIAIQDQIINTKNYRKFIIKDPTVTNDKCRKCHTQPETIQHITGACTTLTQTDYTHRHNQVANVIHQKLALKHALIQNTNTPYYNYTPQTILENTTHRLYYDRAILTDRTIHYNRPDITLQDKINKITYLIDIAVPNTHNIQKTITEKINKYAELKDEVMRIWRQEKVYVVPIVLSTTGVIPNHLLHSLKLLDLKENLYITLQKAAILNTCRIVRKFMQIEENEVGPHHTTN

SEQ ID NO: 21699 - protein, 1292 aa, Pyrgus malvae
METRSRKKRSEPLPGGDRRGTPGADAGCLSMRTVSGEELSRRAPTGKNATAETDTLTDMTTPVEPYSPSTSSYTPSVVTSPSSRSSASIPSPISTLDVAQVANAFLPASTKAGKPRVRMSWSNEVNLFIMRTYYYITKLETDLTTYRKQLHEYFSLKYPEIKVTEQRIADQRRTIIRNKRLSQKTLEKLKEEVRQQLEADEANENQASRNTNIALQHQTPLETQSCTQNTKTSQHVTPTQTEHESLTLENEIDIFEYRNSSTDKQIEEKLEKFTAAPTRYSSIDPGARPKLPKLQYSPKLSKLVHIFNHNILKQFIFKDTTLKDIHTIIYCTALVISQELNYKVTNPKQNIKSKDCNKPPWQIRLEKDIEKLRADCGRLTQYINGNKSSKVIKHIEAIFKSRYTHTRHENSNRKPEEFLDTIKQKLALKVNRLKRYKRALQRKNDSKIFSTNEKLFYRNIHKPIINTNIENNQELPTKEQLELFWSGIWENQIHHNHSADWIVEEEVKWSTIEEMDFIEITELDITNITARLHNWKSPGVDKVHNFWYKKLLSLHKSIAKNLTAIILGKQEVPEFMAKGITYMLPKTKYSSQPSQYRPITCLPTIYKILTSAITLKINKHIEQNNIIAEEQKGCRRGHMGCKEQLVIDSTIHKHATSKNRNLHCTYIDYKKAFDSIPHSWLIQILNIYKISPVIVDFLRNIMTNWKTTLQLYTGQNLITTREISIKKGIYQGDSLSPLWFCLALNPLSHLLHRCQVGYSFTRDITDTVISHLIYMDDIKLYAKTEKDMNKLLETTTMFSKDINMEFGLDKCRILHIKRGKILPGDYLINDTDTITAIEPNEMYKYLGYKQLKGLDHTSIKQTLTDEYKNRINKLCKTQLSGKHLIKSLNSYAIPVLTYSFGIVKWTKTDIQQIERTTRTTLTRHNHLHPKSAVERLTIKRKDGGRGLIDLYQLWQKQNSKLTLFFRNKSQSSNIHKSVAENDKNYTPLNLSNNTNTQTIQTTDSINQHTQTQKIQEWKKKVLHGRHPLDLEQTYIDKIASNKWLQIGNLFPETEGFMIAIQDQIVNTKNYRKFIIKDPKLSNDKCRKCHTQPETIQHITGACTTLTQTDYTHRHNQVANIIHQKIAIKYKLIQNTNTPYYNYTPQTVLENKSYKLYYDRAILTDKTIHYNRPDITFQDKLNKITYLIDIAVPNTHNIQKTISEKITKYTELKEEVTRIWKQDKVYIVPIVLSTTGVIPKHLRQSLKQLDLKDTTYITLQKAAILNTCRIVRKFMQIDENDIGPHNITSSISI

SEQ ID NO: 21700 - protein, 1292 aa, Pyrgus malvae
METRSRKKRSEPLPGGDRRGTPGADAGCLSMRTVSGEELSRRAPTGKNATAETDTLTDMTTPVEPYSPSTSSYTPSVVTSPSSRSSASIPSPISTLDVAQVANAFLPASTKAGNPRVRMSWSNEVNLFIMRTYYYITKLETDLTTYRKQLHEYFSLKYPEIKVTEQRIADQRRTIIRNKRLSQETLEKLKEEVRQQLEADEANENQASRNTNIALQHQTPLETQSCTQNTKTSQHVTPTQTEHESLTLENEIDIFEYRNSSTDKQTEEIHEKFTAALTRYSSIDPEARPKLPKLQYSPKLSKLVHIFNHNILKQFIFKDTTLKDIHTIIYCTALVISQELNYKVTNPKQNIKSKDCNKPPWQIRLEKDIEKLRADCGRLTQYINGNRSSKVIKHIEAIFKSRYTHTRHENSNRKPEEFLDTIKQKLALKVNRLKRYKRALQRKNDNKIFSTNEKLFYRNIHKPIINTNIENNQELPTKEQLELFWSGIWENQIHHNHSADWIVEEEVKWSTIDEMDFIEITELDITNITARLHNWKSPGVDKVHNFWYKKLLSLHKSIAKNLTAMILGKQEVPEFMAKGITYMLPKTKYSSQPSQYRPITCLPTIYKILTSAITLQINKHIEQNNIIAEEQKGCRRGHMGCKEQLVIDSTIHKHATSKNRNLHCTYIDYKKAFDSIPHSWLTQILNIYKISPVIVDFLRNIMTNWKTTLQLYTGHNLITTREISIKKGIYQGDSLSPLWFCLALNPLSNLLHRCQVGYSFTRDITDTVISHLIYMDDIKLYAKTEKDMNKLLETTTMFSKDINMEFGLDKCRILHIKRGKILPGDYLINDTDTITAIEPNEMYKYLGYKQLKGLDHTSIKQTLTDEYKNRINKLCKTQLSGKHLIKSLNSYAIPVLTYSFGIVKWTKTDIQQIERTTRTTLTRHNHLHPKSAVERLTIKRKDGGRGLIDLYQLWQKQTSKLTLFFHNKSQSSNIHKSVAENDKNYTPLNLSNNTNTQTIQTTDSINQHTQIQKIQEWKKKVLHGRHPLDLEQTYIDKIASNKWLQIGNLFPETEGFMIAIQDQIVNTKNYRKFIIKDPKLPNDKCRKCHTQPETIQHITGACTTLTQTDYTHRHNQVANIIHQKIAIKYKLIQNTNTPYYNYTPQTVLENKSYKLYYDRAILTDKTIHYNRPDITFQDKLNKITYLIDIAVPNTHNIQKTISEKITKYTELKEEVTRIWKQDKVYIVPIVLSTTGVIPKHLRQSLKQLDLKDTTYVTLQKAAILNTCRIVRKFMQIDENDIGPHNITSSISI

SEQ ID NO: 21701 - protein, 1188 aa, Orses cynisca
MTWSNDVNIFIMRTYYLITKLETDMTTYRKQLHELFSQKYPDIKVTEQRVSDQRRIIVRNKRLSQEVLTRLKEEVRAQLQDIDNNTDPSDVTNMQSQSNTPTQSYTQSQLQLPSQSHPNTESQRLAISQHTQTSHSYTQTESVTLTLVNDIEILDDSKLKTEAYVQEMLNKFKTALTLYSGMNPAARPKLPKLKYSAELTRLVNLFNNNLLKQFVSEDTQLIDIHTLMYCTALVISEELNYNITNHTINTRQKNNNKPPWQVRLEKDIAKLRADCGRLTQYINNNRSSKIVKKVEAIFKSRNIHTRHEDDNKKPEEFLDTLKQKLALKAHRLRRYMKAQQRKNDNITFVTNEKLFYRNLHKSQLNTTTQNNLDLDQIPTKEQLETFWSGIWEEQVLHNDKATWITDEQQKWKTIDEMDFVEITESDIAHITTRLHNWKSPGIDKIHNFWYKKIFSLHKAIARNLTDIILGKQTLPEFIATGITYMLPKTKYTPQPSQYRPITCLPTIYKILTSAITTKINAHIENHNIIAEEQKGCRRGHMGCKEQLVIDSTIHKHATTKNRNLHCTYIDYKKAFDSIPHSWLLQILEIYKINPKLIEFLRNIMTRWKTTLLLSNRHNTITTREIAIQKGIYQGDSLSPLWFCLALNPLSHLLRSCQVGYPLKHSTQETVISHLIYMDDIKLYSKTDKEMKTLIETTTKFSKDINMEFGLDKCKTVHIIKGKVRPGDYTLNDNEHIAALEPNDLYKYLGYNQLRGLDHTKIKFSLTTEYKRRVNGVCKSQLSGKNLIKALNTYAIPILTYSFGIIKWSKTDIEQIERTTRTTLTKHNNLHPKSAIERLTIRRQDGGRGLIDIHHLWQKQIIGLRTFFRTKSHTSDIHNAITENDINYTPLNLNDQINTQTITNNTDPQKQKVDNWKKKTLHGRHPHDLEQTHIDTTASNKWLKIGNLFPETEGFIIAIQDQIINTKNYRKYIIKDPTVSNDKCRKCHNQPETIQHITGACTTLTQTDYTHRHNQVTNVIHQKLALKHKLIQNTNTPYYKYTPQTVLENSTHKLYYDRAILTDRTIHYNRPDITLQDKLNKITYLIDIAVPNTHNLQKTITEKISKYSELKEEVTRIWKQDKVYIVPIVLSTTGVIPKHLHHSLKLIDLKDTTYITLQKAAILNTCRIVRKFMQIDETEITPPTQTPLR

SEQ ID NO: 21702 - protein, 1381 aa, Thisbe lycorias
MTNGAIVPQEYAMRLRNRNIPQAGTCKGESRPESSDSGSPTYSGGGNVSPNSAQITSVAVCNNTHTLSHSPISSTHSLFSSIPSSPNSYISQSSSSDTTSILSGDVVQEALELCSVPTTDNTSPTHITINDQTNRVDYNTQPLTLHSNTTASNVLQCITPVTSLASSSTTRHIPTTAMAVTREATAFFPVSTKAGKTRVRMKWSNDVNLFIMRTYYYITKLETDMTIYRKKLHEQFSLKYPSVNVSEQRLSDQRRAIERNKLLSLDTLNRLKNEIKIKLQNEEENTCNNQSTESYSQTYPVQLSQSSNMYSNALSLSNISLTQTTQTLSQTDSGTPLIENDIETSLTIPSVTDNCVQVLKDKFLKALTIYKEMDPKTRPKLPKLKYSPKLFELTRLFNQKILHEHTSTDLQLTDIHTIIYCTALVISVELNYKITEHIGNPYIKKDRVPAWQYRLERDIHKLRADIGKLTQYINNNRSKKVVDRVQQIFQNITIHTVHENNNKKPEEYLDTLKQKLALKAHRLKRYKKSQQRKNDNKLFATNEKMFYRNLKKTCSQPEENNNVEIPSREQLQEFWAGIWEEQTPHNCSANWISEETERWIDIEEMEFTEITEDEITIITSRLHNWKSPGVDKIHNFWYKKLTLLHKYLAKNLTEIIKGTQHIPEFLVTGISYMLPKNKYCPQPSQYRPITCLPTLYKILTSTITTKINSHITKNNILAEEQKGCRQNHMGCKEQLIIDATILKQATSKNRNLHCTYIDYKKAFDSIPHTWLIKILQIYKINPTIVKFLQNTMNHWKTTLQLNACGKTITSREIAINKGIYQGDSLSPLWFCLALNPLSRWLQSSRAGYRLKHNNSETIISHLIYMDDIKLYARNEKEMKELIDTTTNFSKDINMQFGFDKCRTVHILKGKIQPGDYEVNDSGTITAMESVDLYKYLGFHQLKGLDHTVIKHEITEEFKSRINTICKTKLSSKNLTKAINTYAIPVLTYSFGVIKWTKTDIDKLQRTIRTTLTKHNQLHPKSAIERLTIKRQDGGRGLIDIQHLWNKQIYSLKNFFRNKALTSIIHKAIVLSDKNYTPLNLEDTQTEIINPNSNNPQTNKINDWKTKVLHGRHPHDLHQNYVDSVASNVWLKVGSLFPETEGFLIAIQDQVINTRNYRKHIIKDRTVTDDKCRKCKAHPETIQHITGACPILTQTDYTHRHNQLANIIHQKLAIKHTLIQNTNTPYYNYKPQTVLENTSHKLYFDRAILTDRTIHYNRPDITLQDKRNKTTYLIDIAVPNTHNIQKTITEKITKYTELKEEILNIWKQEKVYIIPIVISTTGVIPKQIHTSLRLLDLKENTFIILQKAAILNTCRIVRKFLQIEEAELTQQSTLTVPITHML

SEQ ID NO: 21703 - protein, 1272 aa, Gorgopas trochilus
MRSVSGEELNRRTPTGSTENATAESDIPTDRNTPVEPYSPSTISYTPSFPASSTSSICSSNRNSPILTLDVAQVQHSFMPASTKAGKPRVRMSWSREMNLFIMRTYYYITKLETDLTTYRKQLHEHFSRRYPEMKVTEQRIADQRRTIVKNNRLNQETLNELKEEVKLQLEEDDKYILPPNTSITGEHQIVNSVNSNNTQTTQLLTKNTQLPSINESFINHHHNTCTQTDFVTHILENDINAVEYFNTQNPQDTNVQEQELFEKFRTAITQYSEIDPIIRPKLPKLRYSPQLFQLINIFNHEILNKVISEDSQLTHIHTVIYCTALIISQELNYRITNSTVHVTPKSTYKPPWQIRLEKDIEKLRAECGRLTQYIKGNRSNKVVKYVQTIFKTRIIHTTHENNNRKPEEYLDTLKQKLALKVNRLKRYKKAQRRRDDNITFSTNEKIFYRNLQKQQKDIEIEPVTPTEEQLEKFWSGIWENKLQHNEKAEWIKEEEMKWSTIEQMEFIEITETDITNITHRLHNWKSPGVDKIHNFWYKKLNSLHKPISKNLTDIILGRQSIPEFIATGVTYMLPKSKYTAEPSQYRPITCLPTIYKILTSAITVKINKHIEQHNILAEEQKGCRRGHMGCKEQLIIDSTIHKHATSKHRNLHCTYIDYKKAFDSIPHSWLLKILQIYKINPKVINFLHNIMQQWKTTLQLSAHNKYIKTREISIRKGIYQGDSLSPLWFCLALNPLSHLLHRCQVGYSFKRDTTDTIVSHLVYMDDIKLYAKNEIGMSKLLDTTTQFSKDINMEFGLDKCKLLHIKRGKILPGDYAINDTQKITALEATDLYKYLGYYQLRGLDHTTVKETLTTEYRKRMDTLCKTQLSGKHLIKSLNTYAIPILTYSFGIIKWTTTDIEKLERIARTTLTKHNKLHPKSAIERLTIKRQDGGRGLIDLRQLWKNQVSTLKTFFYEKGQTSDIHKAIVQNDHNYTPLNLLSQNHTITPNTQVNNKNAQEERVEEWKKKVLHGRHPHDLGQPHVDTLASNKWLQVGNLFPETEGFMIAIQDQIINTKNYRKYIMKDPTLSNDKCRKCHAQPETIQHITGACITLTQTDYTHRHNQVANVIHQKLAMKHKLINNSNTPYYNYTPQTVLESRTHKLYYDRAILTDKTIHYNRPDIILQDKIKRITFLIDIAVPNTHNLQKTITEKITKYTELKEEVTRIWKQEKVYIVPIILSSTGVIPHYLKHSLKLLDLKETTYIILQKAVILNTCRIVRKFMQIDESEVNS

SEQ ID NO: 21704 - protein, 1308 aa, Schrankia costaestrigalis
METRSKRKRIGPLPGGDRRGTPGADAGCYSMRTVSGEELSRRAPTPQYTTAEQHTHPPSEDPDNISLNSFMSIAEPYSPSTNSYIPTPVSSVDENSRETPTPTLAVAQEVNTFLPASTKAGKPRVRMRWSKDVNIFIMRTYYTITKLETDMTVYRKLLHEQFSLHYPDIKVTEQRISDQKRTIVRNKLLSEETLDQLKEEVRIQLKENTCNNSEVRALIQTENHSPLQLLSNTLTNIQPYTYTQSSHTSTQTSHTSTQTEFTTLILETEVETVRETAPFAETQSQNMLDKLKATLTLYSGMDPSARPRLPKLKYSIKLSHLTNLFNQNIITQLVSEDMELKDLHTLIYCTALVITEELGYKITDFSRTRPKRDNKPSWQIRLEKDIAKLRADCGRLTQYINNNRSIKVVKHVEAIFKNKLTHTRHENNNNKPEEFLDTLKQKLALKVHRLRRYTKAQQRKTDNILFSTSEKSFYRNLLKSHSTSTQSTDTPSQTQLETFWSNIWEEHVQHNDKAVWITEEQNRFSTIDEMEFDKITETDILSITSRLSNWKAPGIDKIHNYWYKKLTSLHKLIAQTLTDIVLGKQEIPEFIATELTYMLPKTSHSTQPGQYRPITCLPTIYKILTGVISRKITTHIEQHHIIAEEQKGCRQGHMGCKEQLIIDSTIHKHASSKNRNLHCTYIDYKKAFDSIPHSWLLQILKIYKINPKITNFLNKIMPYWKTTLQLNNQTSNITTRPISIKKGIYQGDSLSPLWFCLAMNPLSHMLHSCQVGYNLTNTSQETVISHLIYMDDIKLYSKTDKEMKKLIDVTSQFSKDINMEFGLDKCRTLHIVKGKVRPGSYEVDDSNIITALDSNEFYKYLGYRQLKGLDHTESKEILNKEYQKRINTICKTQLSSKNLIKAINTYAIPVLTYSFGIIKWSKTDIEQIERKTRTTLTKHNNLHPKSAIERLTIKRHNGGRGLIDILQLWQKQIHTLKNFFHMKSSSSNLHKAIVQNDHNYTPLNLAEPTTLQNHDNSNPQAQKLENWKKKALHGRHPHDLEQSHIDAIASNKWLQIGNLFPETEGFMIAIQDQIINTKNYRKFIIKDPSIANDKCRKCHTQSETIQHITGACTTLTQTDYTHRHNQIANIIHQKLAIKHNLIQESNTPYYKYTPQTILENTTHKLYYDRAILTDRTIHYNRPDITLQDKITKTTYLIDIAVPNTHNIQKTITEKISKYAELKDEVTRIWRQDKVYVVPIVLSTTGIIPKHLHHSITLLQLKDSVFIILQKAAILNTCRIVRKFMSLEENTVTTYNFTHHTLHLLGFGP

SEQ ID NO: 21705 - protein, 934 aa, Schrankia costaestrigalis
MLDKLKETITLYSGMDPSARPRLPKLKYSIKLSQLTNLFNQAIITQLVSEDMELKDLHTLIYCTALVITEELGYKITDFSRFRPKHDNKPSWQIRLEKDIAKLRADCGRLTQYINNNRSNKVVKHVEAIFKNKLTHTRHENNNNKPEEFLDTLKQKLALKVHRLRRYKKAQQRKTDNIVFSTSEKSFYRNLQKSQSTSTQSTDTPSQSQLETFWSNIWEEQVQHNDKAIWITEEQNRFSTIDEMEFDKITETDIISITSRLSNWKAPGVDKIHNYWYKKLTSLHKHIAQTLTDIVLGKQEIPEFVATGLTYMLPKTSHSTQPGQYRPITCLPTIYKILTGVISRKITTHIEQHHIIAEEQKGCRQGHMGCKEQLIIDSTIHKHASSKNRNLHCTYIDYKKAFDSIPHSWLLQILQIYRINPKITNFLNKIMPYWKTTLQLNNQTSNITTRPISIKKGIYQGDSLSPLWFCLAMNPLSHMLHSCQVGYNFKNTSEETVISHLIYMDDIKLYSKTDKEMKKLIDVTSQFSKDINMEFGLDKCRTLHIVKGKVKPGSYELDDSSIISALDSNEFYKYLGYRQLKGLDHTESKDILNKEYQKRINTICKTQLSSKNLVKAINTYAIPVLTYSFGIIKWSKTDIEQIERKTRTTLTKHNNLHPKSAIERLTIKRHNGGRGLIDILQLWQKQIHTLKTFFHMKSSSSNLHKAITQNDHNYTPLNLIEPTTSQNHDNANPHSQKIENWKKKALHGRHPHDLEQSHIDIIGSNKWLQIGNLFPETEGFMIAIQDQIINTKNYRKFIIKDPSIANDKCRKCHTQSETIQHITGACTTLTQTDYTHRHNQIANIIHQKLAIKHNLIQDSNIPYYKYTPQTILENTTHKLYYDRAILTDRTIHYNRPDITLQDKITKTTYLIVLQLKDSLYITLQKAAILNTIVG

SEQ ID NO: 21706 - protein, 1293 aa, Schrankia costaestrigalis
METRSKRKRIGPLPGGDRRGTPGADAGCYSMRTVSGEELSRRAPTPQYTTAEQHTHPPSEDPDNISLNSFMSIAEPYSPSTNSYIPTPVSSVDENSRETPTPTLAVAQEVNTFLPASTKAGKPRVRMRWSKDVNIFIMRTYYTITKLETDMTVYRKLLHEQFSLHYPDIKVTEQRISDQKRTIIRNKLLSEETLDQLKEEVRIQLEENTCNNSEVRALIQTENHSPLQLLSNTLTNIQPYTYTQSSHTSTQTSHTSTQTEFTTLILETEVETVRETAPFAETQSQNMLDKLKATLTLYSGMDPSARPRLPKLKYSIKLSHLTNLFNQNIITQLVSEDMELKDLHTLIYCTALVITEELGYKITDFSRTRPKRDNKPSWQIRLEKDIAKLRADCGRLTQYINNNRSIKVVKHVEAIFKNKLTHTRHENNNNKPEEFLDTLKQKLALKVHRLRRYKKAQQRKTDIILFSTSEKSFYRNLLKSHSTSTQSTDTPSQTQLETFWSNIWEEHVQHNDKAVWITEEQNRFSTIDEMEFDKITETDILSITSRLSNWKAPGIDKIHNYWYKKLTSLHKLIAQTLTDIVLGKQEIPEFIATGLTYMLPKTSHSTQPGQYRPITCLPTIYKILTGVISRKITTHIEQHHIIAEEQKGCRQGHMGCKEQLIIDSTIHKHASSKNRNLHCTYIDYKKAFDSIPHSWLLQILKIYKINPKITNFLNKIMPYWKTTLQLNNQTSNITTRPISIKKGIYQGDSLSPLWFCLAMNPLSHMLHSCQVGYNLKNTSQETVISHLIYMDDIKLYSKTDKEMKKLIDVTSQFSKDINMEFGLDKCRTLHIVKGKVRPGSYEVDDSNIITALDSNEFYKYLGYRQLKGLDHTESKEILNKEYQKRINTICKTQLSSKNLIKAINTYAIPVLTYSFGIIKWSKTDIEQIERKTRTTLTKHNNLHPKSAIERLTIKRHNGGRGLIDILQLWQKQIHTLKTFFHMKSSSSNLHKAITQNDYNYTPLNLIEPTTLQNHENANPHSQKLENWKKKALHGRHPHDLEQSHIDIIASNKWLQIGNLFPETEGFMIAIQDQIINTKNYRKFIIKDPSIANDKCRKCHTQSETIQHITGACTTLTQTDYTHRHNQIANIIHQKLAIKHNLIQDSNIPYYKYTPQTILENTTHKLYYDRAILTDRTIHYNRPDITLQDKITKTTYLIDIAVPNTHNIQKTITEKIPKYAELKDEVTRIWRQDKVYVVPIVLSTTGIIPKHLHHSITLLQLKDSVYITLQKAAILNTCRIVRKFMSLEENTVTT

SEQ ID NO: 21707 - protein, 1263 aa, Schrankia costaestrigalis
MRTVSGEELSRRAPTPQYTTAEQHTHPPSEDPDNISLNSFMSIAEPYSPSTNSYIPTPVSSVDENSRETPTPTLAVAQEVNTFLPASTKAGKPRVRMRWSKDVNIFIMRTYYTITKLETDMTVYRKLLHEQFSLHYPDIKVTEQRISDQKRTIIRNKLLSEETLDQLKEEVRIQLEENTCNNSEVRALIQTENHSPLQLLSNTLTNIQPYTYTQSSHTSTQTSHTSTQTEFTTLILETEVETVRETAPFAETQSQNMLDKLKATLTLYSGMDPSARPRLPKLKYSIKLSHLTNLFNQNIITQLVSEDMELKDLHTLIYCTALVITEELGYKITDFSRTRPKRDNKPSWQIRLEKDIAKLRADCGRLTQYINNNRSIKVVKHVEAIFKNKLTHTRHENNNNKPEEFLDTLKQKLALKVHRLRRYKKAQQRKTDNILFSTSEKSFYRNLLKSHSTSTQSTDTPSQTQLETFWSNIWEEHVQHNDKAVWITEEQNRFSTIDEMEFDKITETDILSITSRLSNWKAPGIDKIHNYWYKKLTSLHKLIAQTLTDIVLGKQEIPEFIATGLTYMLPKTSHSTQPGQYRPITCLPTIYKILTGVISRKITTHIEQHHIIAEEQKGCRQGHMGCKEQLIIDSTIHKHASSKNRNLHCTYIDYKKAFDSIPHSWLLQILKIYKINPKITNFLNKIMPYWKTTLQLNNQTSNITTRPISIKKGIYQGDSLSPLWFCLAMNPLSHMLHSCQVGYNLKNTSQETVISHLIYMDDIKLYSKTDKEMKKLIDVTSQFSKDINMEFGLDKCRTLHIVKGKVRPGSYEVDDSNIITALDSNEFYKYLGYRQLKGLDHTESKEILNKEYQKRINTICKTQLSSKNLIKAINTYAIPVLTYSFGIIKWSKTDIEQIERKTRTTLTKHNNLHPKSAIERLTIKRHNGGRGLIDILQLWQKQIHTLKTFFHMKSSSSNLHKAITQNDYNYTPLNLIEPTTLQNHENANPHSQKLENWKKKALHGRHPHDLEQSHIDIIASNKWLQIGNLFPETEGFMIAIQDQIINTKNYRKFIIKDPSIANDKCRKCHTQSETIQHITGACTTLTQTDYTHRHNQIANIIHQKLAIKHNLIQDSNIPYYKYTPQTILENTTHKLYYDRAILTDRTIHYNRPDITLQDKITKTTYLIDIAVPNTHNIQKTITEKISKYAELKDEVTRIWRQDKVYVVPIVLSTTGIIPKHLHHSITLLQLKDSVYITLQKAAILNTCRIVRKFMSLEENTVTT

SEQ ID NO: 21708 - protein, 1293 aa, Schrankia costaestrigalis
METRSKRKRIGPLPGGDRRGTPGADAGCYSMRTVSGEELSRRAPTPQYTTAEQHTHPPSEDPDNISLNSFMSIAEPYSPSTNSYIPTPVSSVDENSRETPTPTLAVAQEVNTFLPASTKAGKPRVRMRWSKDVNIFIMRTYYTITKLETDMTVYRKLLHEQFSLHYPDIKVTEQRISDQKRTIIRNKLLSEETLDQLKEEVRIQLEENTCNNSEVRALIQTENHSPLQLLSNTLTNIQPYTYTQSSHTSTQTSHTSTQTEFTTLILETEVETVRETAPFAETQSQNMLDKLKATLTLYSGMDPSARPRLPKLKYSIKLSHLTNLFNQNIITQLVSEDMELKDLHTLIYCTALVITEELGYKITDFSRTRPKRDNKPSWQIRLEKDIAKLRADCGRLTQYINNNRSIKVVKHVEAIFKNKLTHTRHENNNNKPEEFLDTLKQKLALKVHRLRRYKKAQQRKTDNILFSTSEKSFYRNLLKSHSTSTQSTDTPSQTQLETFWSNIWEEHVQHNDKAVWITEEQNRFSTIDEMEFDKITETDILSITSRLSNWKAPGIDKIHNYWYKKLTSLHKLIAQTLTDIVLGKQKIPEFIATGLTYMLPKTSHSTQPGQYRPITCLPTIYKILTGVISRKITTHIEQHHIIAEEQKGCRQGHMGCKEQLIIDSTIHKHASSKNRNLHCTYIDYKKAFDSIPHSWLLQILKIYKINPKITNFLNKIMPYWKTTLQLNNQTSNITTRPISIKKGIYQGDSLSPLWFCLAMNPLSHMLHSCQVGYNLKNTSQETVISHLIYMDDIKLYSKTDKEMKKLIDVTSQFSKDINMEFGLDKCRTLHIVKGKVRPGSYEVDDSNIITALDSNEFYKYLGYRQLKGLDHTESKEILNKEYQKRINTICKTQLSSKNLIKAINTYAIPVLTYSFGIIKWSKTDIEQIERKTRTTLTKHNNLHPKSAIERLTIKRHNGGRGLIDILQLWQKQIHTLKTFFHMKSSSSNLHKAITQNDYNYTPLNLIEPTTLQNHENANPHSQKLENWKKKALHGRHPHDLEQSHIDIIASNKWLQIGNLFPETEGFMIAIQDQIINTKNYRKFIIKDPSIANDKCRKCHTQSETIQHITGACTTLTQTDYTHRHNQIANIIHQKLAIKHNLIQDSNIPYYKYTPQTILENTTHKLYYDRAILTDRTIHYNRPDITLQDKITKTTYLIDIAVPNTHNIQKTITEKISKYAELKDEVTRIWRQDKVYVVPIVLSTTGIIPKHLHHSITLLQLKDSVYITLQKAAILNTCRIVRKFMSLEENTVTT

SEQ ID NO: 21709 - protein, 1293 aa, Schrankia costaestrigalis
METRSKRKRIGPLPGGDRRGTPGADAGCYSMRTVSGEELSRRAPTPQYTTAEQHTHPPSEDPDNISLNSFMSIAEPYSPSTNSYIPTPVSSVDENSRETPTPTLAVAQEVNTFLPASTKAGKPRVRMRWSKDVNIFIMRTYYTITKLETDMTVYRKLLHEQFSLHYPDIKVTEQRISDQKRTIIRNKLLSEETLDQLKEEVRIQLEENTCNNSEVRALIQTENHSPLQLLSNTLTNIQPYTYTQSSHTSTQTSHTSTQTEFTTLILETEVETVRETAPFAETQSQNMLDKLKATLTLYSGMDPSARPRLPKLKYSIKLSHLTNLFNQNIITQLVSEDMELKDLHTLIYCTALVITEELGYKITDFSRTRPKRDNKPSWQIRLEKDIAKLRADCGRLTQYINNNRSIKVVKHVEAIFKNKLTHTRHENNNNKPEEFLDTLKQKLALKVHRLRRYKKAQQRKTDNILFSTSEKSFYRNLLKSHSTSTQSTDTPSQTQLETFWSNIWEEHVQHNDKAVWITEEQNRFSTIDEMEFDKITETDILSITSRLSNWKAPGIDKIHNYWYKKLTSLHKLIAQTLTDIVLGKQEIPEFIATGLTYMLPKTSHSTQPGQYRPITCLPTIYKILTGVISRKITTHIEQHHIIAEEQKGCRQGHMGCKEQLIIDSTIHKHASSKNRNLHCTYIDYKKAFDSIPHSWLLQILKIYKINPKITNFLNKIMPYWKTTLQLNNQTSNITTRPISIKKGIYQGDSLSPLWFCLAMNPLSHMLHSCQVGYNLKNTSQETVISHLIYMDDIKLYSKTDKEMKKLIDVTSQFSKDINMEFGLDKCRTLHIVKGKVRPGSYEVDDSNIITALDSNEFYKYLGYRQLKGLDHTESKEILNKEYQKRINTICKTQLSSKNLIKAINTYAIPVLTYSFGIIKWSKTDIEQIERKTRTTLTKHNNLHPKSAIERLTIKRHNGGRGLIDILQLWQKQIHTLKTFFHMKSSSSNLHKAITQNDYNYTPLNLIEPTTLQNHENANPHSQKLENWKKKALHGRHPHDLEQSHIDIIASNKWLQIGNLFPETEGFMIAIQDQIINTKNYRKFIIKDPSIANDKCRKCHTQSETIQHITGACTTLTQTDYTHRHNQIANIIHQKLAIKHNLIQDSNIPYYKYTPQTILENTTHKLYYDRAILTDRTIHYNRPDITLQDKITKTTYLIDIAVPNTHNIQKTITEKISKYAELKDEVTRIWRQDKVYVVPIVLSTTGIIPKHLHHSITLLQLKDSVYITLQKAAILNTCRIVRKFMSLEENTVTT

SEQ ID NO: 21710 - protein, 1156 aa, Schrankia costaestrigalis
MRTSYTITKLETDMTVYRKLLHEQFLLHYPDIKVTEQRISDQKRTIIRNKLLSEETLDQLKEEVRIQLEENTCNNSEVRALIQTENHSPLQLLSNTLTNIQPYTYTQSSHTSTQTSHTSTQTEFTTLILETEVETVRETAPFAETQSQNMLDKLKATLTLYSGMDPSARPRLPKLKYGIKLSHLTNLFNPNIITQLVSEDMELKDLHTLIYCTALVITEELGYKITDFSRTRPKRDNKPSWQIRLEKDIAKLRADCGRLTQYINNNRSIKVVKHVEAIFKNKLTHTRHENNNNKPEEFLDTLKQKLALKVHRLRRYKKAQQRKTDNILFSTSEKSFYRNLLKSHSTSTQSTDTPSQTQLETFWSNIWEEHVQHNDKAVWITEEQNRFSTIDEMEFDKITETDILSITSRLSNWKAPGIDKIHNYWYKKLTSLHKLIAQTLTDIVLGKQEIPEFIATGLTYMIPKTSHSTQPGQYRPITCLPTIYKILTGVISRKITTHIEQHHIIAEEQKGCRQGHMGCKEQLIIDSTIHKHASSKNRNLHCTYIDYKKAFDSIPHSWLLQILKIYKINPKIINFLNKIMPYWKTTLQLNNQTSNITTRPISIKKGIYQGDSLSPLWFCLAMNPLSHMLHSCQVGYNLKNTSQETVISHLIYMDDIKLYSKTDKEMKKLIDVTSQFSKDINMEFGLDKCRTLHIVKGKVRPGSYEVDDSNIITALDSNEFYKYLGYRQLKGLDHTESKEILNKEYQKRINTICKTQLSSKKLIKAINTYAIPVLTYSFGIIKWSKTDIEQIERKTRTTLTKHNNLHPKSAIERLTIKRHNGGRGLIDILQLWQKQIHTLKTFFHMKSSSSNLHKAITQNDHNYTPLNLIEPTTLQNHENANPHSQKLENWKKKALHGRHPHDLEQSHIDIIASNKWLQIGNLFPETEGFMIAIQDQIINTKNYRKFIIKDPSIANDKCRKCHTQSETIQHITGACTTLTQTDYTHRHNQIANIIHQKLAIKHNLIQDSNIPYYKYTPQTILENTTHKLYYDRAILTDRTIHYNRPDITLQDKMTKTTYLIDIAVPNTHNIQKTITEKISKYAELKDEVTRIWRQEKVYVVPIVLSTTGIIPKHLHHSITLLQLKDSVYITLQKAAILNTCRIVRKFMSLEENTVTT

SEQ ID NO: 21711 - protein, 1293 aa, Schrankia costaestrigalis
METRSKRKRIGPLPGGDRRGTPGADAGCYSMRTVSGEELSRRAPTPQYTTAEQHTHPPSEDPDNISLNSFMSIAEPYSPSTNSYIPTPVSSVDENSRETPTPTLAVAQEVNTFLPASTKAGKPRVRMRWSKDVNIFIMRTYYTITKLETDMTVYRKLLHEQFSLHYPDIKVTEQRISDQKRTIIRNKLLSEETLDQLKEEVRIQLEENTCNNSEVRALIQTENHSPLQLLSNTLTNIQPYTYTQSSHTSTQTSHTSTQTEFTTLILETEVETVRETAPFAETQSQNMLDKLKATLTLYSGMDPSARPRLPKLKYSIKLSHLTNLFNQNIITQLVSEDMELKDLHTLIYCTALVITEELGYKITDFSRTRPKRDNKPSWQIRLEKDIAKLRADCGRLTQYINNNRSIKVVKHVEAIFKNKLTHTRHENNNNKPEEFLDTLKQKLALKVHRLRRYKKAQQRKTDNILFSTSEKSFYRNLLKSHSTSTQSTDTPSQTQLETFWSNIWEEHVQHNDKAVWITEEQNRFSTIDEMEFDKITETDILSITSRLSNWKAPGIDKIHNYWYKKLTSLHKLIAQTLTDIVLGKQEIPEFIATGLTYMLPKTSHSTQPGQYRPITCLPTIYKILTGVISRKITTHIEQHHIIAEEQKGCRQGHMGCKEQLIIDSTIHKHASSKNRNLHCTYIDYKKAFDSIPHSWLLQILKIYKINPKITNFLNKIMPYWKTTLQLNNQTSNITTRPISIKKGIYQGDSLSPLWFCLAMNPLSHMLHSCQVGYNLKNTSQETVISHLIYMDDIKLYSKTDKEMKKLIDVTSQFSKDINMEFGLDKCRTLHIVKGKVRPGSYEVDDSNIITALDSNEFYKYLGYRQLKGLDHTESKEILNKEYQKRINTICKTQLSSKNLIKAINTYAIPVLTYSFGIIKWSKTDIEQIERKTRTTLTKHNNLHPKSAIERLTIKRHNGGRGLIDILQLWQKQIHTLKTFFHMKSSSSNLHKAITQNDYNYTPLNLIEPTTLQNHENANPHSQKLENWKKKALHGRHPHDLEQSHIDIIASNKWLQIGNLFPETEGFMIAIQDQIINTKNYRKFIIKDPSIANDKCRKCHTQSETIQHITGACTTLTQTDYTHRHNQIANIIHQKLAIKHNLIQDLNIPYYKYTPQTILENTTHKLYYDRAILTDRTIHYNRPDITLQDKITKTTYLIDIAVPNTHNIQKTITEKISKYAELKDEVTRIWRQDKVYVVPVVLSTTGIIPKHLHHSITLLQLKDSVYITLQKAAILNTCRIVRKFMSLEENTVTT

SEQ ID NO: 21712 - protein, 1293 aa, Schrankia costaestrigalis
METRSKRKRIGPLPGGDRRGTPGADAGCYSMRTVSGEELSRRAPTPQYTTAEQHTHPPSEDPDNISLNSFMSIAEPYSPSTNSYIPTPVSSVDENSRETPTPTLAVAQEVNTFLPASTKAGKPRVRMRWSKDVNIFIMRTYYTITKLETDMTVYRKLLHEQFSLHYPDIKVTEQRISDQKRTIIRNKLLSEETLDQLKEEVRIQLEENTCNNSEVRALIQTENHSPLQLLSNTLTNIQPYTYTQSSHTSTQTSHTSTQTEFTTLILETEVETVRETAPFAETQSQNMLDKLKATLTLYSGMDPSARPRLPKLKYSIKLSHLTNLFNQNIITQLVSEDMELKDLHTLIYCTALVITEELGYKITDFSRTKPKRDNKPSWQIRLEKDIAKLRADCGRLTQYINNNRSIKVVKHVEAIFKNKLTHTRHENNNNKPEEFLDTLKQKLALKVHRLRRYKKAQQRKTDNILFSTSEKSFYRNLLKSHSTSTQSTDTPSQTQLETFWSNIWEEHVQHNDKAVWITEEQNRFSTIDEMEFDKITETDILSITSRLSNWKAPGIDKIHNYWYKKLTSLHKLIAQTLTDIVLGKQEIPEFIATGLTYMLPKTSHSTQPGQYRPITCLPTIYKILTGVISRKITTHIEQHHIIAEEQKGCRQGHMGCKEQLIIDSTIHKHASSKNRNLHCTYIDYKKAFDSIPHSWLLQILKIYKINPKITNFLNKIMPYWKTTLQLNNQTSNITTRPISIKKGIYQGDSLSPLWFCLAMNPLSHMLHSCQVGYNLKNTSQETVISHLIYMDDIKLYSKTDKEMKKLIDVTSQFSKDINMEFGLDKCRTLHIVKGKVRPGSYEVDDSNIITALDSNEFYKYLGYRQLKGLDHTESKEILNKEYQKRINTICKTQLSSKNLIKAINTYAIPVLTYSFGIIKWSKTDIEQIERKTRTTLTKHNNLHPKSAIERLTIKRHNGGRGLIDILQLWQKQIHTLKTFFHMKSSSSNLHKAITQNDYNYTPLNLIEPTTLQNHENANPHSQKLENWKKKALHGRHPHDLEQSHIDIIASNKWLQIGNLFPETEGFMIAIQDQIINTKNYRKFIIKDPSIANDKCRKCHTQSETIQHITGACTTLTQTDYTHRHNQIANIIHQKLAIKHNLIQDSNIPYYKYTPQTILENTTHKLYYDRAILTDRTIHYNRPDITLQDKITKTTYLIDIAVPNTHNIQKTITEKISKYAELKDEVTRIWRQDKVYVVPIVLSTTGIIPKHLHHSITLLQLKDSVYITLQKAAILNTCRIVRKFMSLEENTVTT

SEQ ID NO: 21713 - protein, 1301 aa, Lymantria dispar
MALETHSMEMLLRSKRIGSLPGGDRWGTSGADAGCDSMRTVSGQELNRRAPSGYPENITATHLEDTVNLNSTNSIPEPFSPSTSSYIPSSPFSVDQNSRGSPSPVLRVAQEVNTFLPVSTKAGKPRVRMSWNKEVNIFIMRTYFHVTKLETDLTTYRKQLHQLFSLQYPNVKVTEQRIADQRRTIVRNKLLSADTINQIKEEVRIHLQDYTENSIETDFNTATPNPLIEQADFPPHIHAQPNPQTRSIAETQIQPHTQISHISTQTEIETILLENDVGIITNHSPIEIPAQEICHKFKTALIQYSGMDPAARPKLPKLRYSFQLSQLIHLFNHNILNQFISHDTKLKDIHTLIYCTALVVCQELNYKIIEATNHTKIKNINKPPWQIRLERDIEMLRADCGRLTQFIRNNRSKKVVKRVEVIFKSKRMHTKHENDNTKPEEFLDTLKQKLALKVHRLRRYKKAQQRKNDNIVFQSNEKIFYRKLLTHQSKNATQIPTQTQLETFWSGIWEEKIQHKCEADWITEEERRWSKLKEMEFDGISETDIARITGKLHNWKSPGIDKIHNYWYKKLTSLHGSIAKNFTEIVLGKQDIPQFIATGITFMISKTETHSPQPSQYRPITCLPTIYKMLTSVLAEKISTHAENNHIIAEEQKGCRRGYMGCKEQLIIDSTIHKHAITKHRNLHCTYIDYRKAFDSVPHSWLLKILQIYKINTNIIEFMHKIIPLWKTTLQLQSHDKIVTTRQLSIRKGIYQGDSLSPLWFCLALNPLSHMLYRCRAGYNLKHLTDDTVISHLLYMDDIKLYAKTEKEMQKLIQVTTEFSKDINMEFGLDKCKTLHIVKGKVRPGNYIVDNSNIITAMDDNDLYKYLGYKQLKGIDHTAIKLTLTTEYKRRINTLCKTQLTGKNLIKALNTYAIPVLTYSFGIIKWSKTDIEHIERITRTTLTKHNYLHPKSAIERMTIKRQNGGRGLIDVCNLWQNQIHNLRTFFHNKANTSKIHNAIALNDYNYTPLNLNEHLRYDTNRYNNDPQIQKLEAWKKKSLHGRHPNDLQQVHIDSLASNKWLQIGSLFPETEGFITAIQDQVINTKNYRKYIIKDPSVIDDRCRKCHTQPETIQHITGACTTLTQTDYTHRHNQITNIIHLKLAIKHNLIENTNTPYYNYKPQTVLENTTHKLYYDRAILTDRTIHCNRPDITLKDKRNKITYLIDIAVPNTHNIQKTIAEKISKYSELKEEMTRIWKQDKVYIVPIVLSTTGIIPKHLKHSLKLLDLNENTYISLQKAAILNTCRLVRKFMAIDESDDKTL

SEQ ID NO: 21714 - protein, 1301 aa, Lymantria dispar
MALETHSMEMLLRSKRIGSLPGGDRWGTSGADAGCDSMRTVSGQELNRRAPSGYPENITATHLEDTVNLNSTNSIPEPFSPSTSSYIPSSPFSVDQNSRGSPSPVLRVAQEVNTFLPVSTKAGKPRVRMSWNKEVNIFIMRTYFHVTKLETDLTTYRKQLHQLFSLQYPNVKVTEQRIADQRRTIVRNKLLSADTINQIKEEVRIHLQDYTENSIETDFNTDTPNPLIEQADFPPHIHAQPNPQTRSIAETQIQPHTQISHISTQTEIETILLENDVGIITNHSPIEIPAQEICHKFKTALIQYSGMDPAARPKLPKLRYSFQLSQLIHLFNHNILNQFISHDTQLKDIHTLIYCTALVVCQELNYKIIEATHHTKIKNINKPPWQIRLERDIEMLRADCGRLTQFIRNNRSKKVVKRVEVIFKSKRMHTKHENDNTKPEEFLDTLKQKLALKVHRLRRYKKAQQRKNDNIVFQSNEKIFYRKLLTHQSKNATQIPTQTQLETFWSGIWEEKIQHKCEADWITEEERRWSKLKEMEFDGISETDIARITGKLHNWKSPGIDKIHNYWYKKLTSLHGSIAKNFTEIVLGKQDIPQFIATGITFMISKTETHSPQPSQYRPITCLPTIYKMLTSVLAEKISTHAENNHIIAEEQKGCRRGYMGCKEQLIIDSTIHKHAITKHRNLHCTYIDYRKAFDSVPHSWLLKILQIYKINTKIIEFMHKIIPLWKTTLQLQSHDKIVTTRQLSIRKGIYQGDSLSPLWFCLALNPLSHMLYRCRAGYNLKHLTDDTVISHLLYMDDIKLYARTEKEMQKLIQVTTEFSKDINMEFGLDKCKTLHIVKGKVRPGNYIVDNSNIITAMDDNDLYKYLGYKQLKGIDHTAIKLTLTTEYKRRINTLCKTQLTGKNLIKALNTYAIPVLTYSFGIIKWSKTDIEHIERITRTTLTKHNYLHPKSAIERMTIKRQNGGRGLIDVCNLWQNQIHNLRTFFHNKANTSKIHNAIALNDYNYTPLNLNEHLRYDTNRYNNDPQIQKLEAWKKKSLHGRHPNDLQQAHIDSLASNKWLQIGSLFPETEGFITAIQDQVINTKNYRKYIIKDPSVIDDRCRKCHTQPETIQHITGACTTLTQTDYTHRHNQITNIIHLKLAIKHNLIENTNTPYYNYKPQTVLENTTHKLYYDRAILTDRTIHCNRPDITLKDKRNKITYLIDIAVPNTHNIQKTIAEKISKYSELKEEMTRIWKQDKVYIVPIVLSTTGIIPKHLKHSLKLLDLNENTYISLQKAAILNTCRLVRKFMAIDESDDKTL

SEQ ID NO: 21715 - protein, 880 aa, Lymantria dispar
MDPAARPKLPKLRYSSQLSQLIHLFNHNILKQFISHDTQLKDIHTLIYCTALVVCQELNYKIIEATHHTKIKNINKPPWQIRLERDIEMLRADCGRLTQFIRNNRSKKVVKRVEVMFKSKRMHTKHENDNTKPEEFLDTLKQKLALKVHRLRRYKKAQQRKNDNIVFQSNEKIFYRKLLTHQSKNDTQIPTQTQLETFWSGIWEEKIQHKCEADWITEEKRRWSKLKEMEFDGISETDIARITGKLHNWKSPGIDKIHNYWYKKLTSLHGSIAKKFTEIVLGKQDIPQFIATGITFMISKTETHSPQPSQYRPITCLPTIYKMLTSVLAEKISTHAENNHIIAEEQKGCRRGFMGCKEQLIIDSTIHKHAITKHRNLHCTYIDYRKAFDSVPHSWLLKILQIYKINTKIIEFMHKIIPLWKTTLQLQSHDKIVTTRQLSIRKGIYQGDSLSPLWFCLALNPLSHMLYCCRAGYNLKHLTDDTVISHLLYMDDIKLYARTEKEMQKLIQVTTEFSKDINMEFGLDKCKTLHIVKGKVRPGNYIVDNSNIITAMDDNDLYKYLGYKQLKGIDHTAIKLTLTIEYKRRINTLCKTQLTGKTLIKALNTYAIPVLTYSFGIIKWSKTDIEHIERITRTTLTKHNYLHPKSAIERLTIKRQNGGRGLIDVCNLWQNQIHNLRTFFHNKANTSKIHNAIALNDYNFTPLNLNEHLRYDTNRYNNDPQIQKLEAWKKKSLHGRHPNDLQQAHIDSLASNKWLQIGSLFPETEGFITAIQDQVINTKNYRKYIIKDPSVIDDRCRKCHTQPETIQHITGACTTLTQTDYTHRHNQITNIIHLKLAIKHNLIENTNTPYYNYKPQTVLENTTHKLYYDSAILTDRNNTL

SEQ ID NO: 21716 - protein, 1302 aa, Lymantria dispar
MALETHSMEMLLRSKRIGSLPGGDRWGTSGADAGCDSMRTVSGQELNRRAPFGYPENITATHLEDTVNLNSTNSIPEPFSPSTSSYIPSSPFSVDQNSRGSPSPVLRVAQEVNTFLPLSTKAGKPRVRMSWNKEVNIFIMRTYFHVTKLETDLTTYRKQLHQLFSLQYPNVKVTEQRIADQRRTIVRNKLLSADTINQIKEEVRIHLQDYTENSIETDFNTATPNPLIEQADFPPHIHAQPNPQTRSIAETQIQPHTQISHISTQTEIETILLENDVGIITNHSPIEIPAQEICHKFKTALIQYSGMDPAARPKLPKLRYSFQLSQLIHLFNHNILNQFISHDTKLKDIHTLIYCTALVVCQELNYKIIEATNHTKIKNINKPPWQIRLERDIEMLRANCGRLTQFIRNNRSKKVVKRVEVIFKSKRMHTKHENDNTKPEEFLDTLKQKLALKVHRLRRYKKAQQRKNDNIVFQSNEKIFYRKLLTHQSKNATHTTPTQTQLETFWSGIWEEKIQHKCEADWITEEERRWSKLKEMEFDGISETDIARITGKLHNWKSPGIDKIHNYWYKKLTSLHGSIAKNFTEIVLGKQDIPQFIATGITFMISKTETHSPQPSQYRPITCLPTIYKMLTSVLAEKISTHAENNHIIAEEQKGCRRGYMGCKEQLIIDSTIHKHAITKHRNLHCTYIDYRKAFDSVPHSWLLKILQIYKINTNIIEFMHKIIPLWKTTLQLQSHDKIVTTRQLSIRKGIYQGDSLSPLWFCLALNPLSHMLYRCRAGYNLKHLTDDTVISHLLYMDDIKLYAKTEKEMQKLIQVTTEFSKDINMEFGLDKCKTLHIVKGKVRPGNYIVDNSNIITAMDDNDLYKYLGYKQLKGIDHTAIKLTLTTEYKRRINTLCKTQLTGKNLIKALNTYAIPVLTYSFGIIKWSKTDIEHIERITRTALTKHNYLHPKSAIERMTIKRQNGGRGLIDVCNLWQNQIHNLRTFFHNKANTSKIHNAIALNDYNYTPLNLNEHLRYDTNRYNNDPQIQKLEAWKKKSLHGRHANDLQQVHIDSLASNKWLQIGSLFPETEGFITAIQDQVINTKNYRKYIIKDPSVIDDRCRKCHTQPETIQHITGACTTLTQTDYTHRHNQITNIIHLKLAIKHNLIENTNTPYYNYKPQTVLENTTHKLYYDRAILTDRTIHCNRPDITLKDKRNKITYLIDIAVPNTHNIQKTIAEKISKYSELKEEMTRIWKQDKVYIVPIVLSTTGIIPKHLKHSLKLLDLNENTYISLQKAAILNTCRLVRKFMAIDESDDKTL

SEQ ID NO: 21717 - protein, 1006 aa, Duroca duroca
MKYSGMDPIARPKLPKLKYSYKLSNLIHIFNQKITNQFISNDTQTIDIHTLIYCIAVVISEELGFKIRENTNNTIRSKTQSKPPWQIRLEKDIEKLRVDIGRLTQYINNNRSKKIVRKVEEIFKRRIIHTRHENHNNKPEEYLDTLKQKLNLKANRLKRYNKAQQRKNDNSLFITNEKIFYRKLVTPNNSTSTTENIEIPTETQLETFWSGIWETQVQHNENAEWITQEENRWSSIAEMEFEAVTEVDIATITAKTHNWKAPGLDKIHNFWYKKLKSLHKCLAKNLTDIILGKQDIPKFITTGITYMLPKSTYSSDPSQYRPITCLPTIYKILTSAIATKINTHIEHNNIIAEEQKGCRKGHMGCKEQLVIDSTIHKHATTKNRNLHCTYIDYKKAFDSIPHSWLLQILRIYKINTKIINFMHNIMPNWKTSLQLNSHNHVITTRTITIKKGIYQGDSLSPLWFCLALNPLPNLLHQCCAGYSLSHGTEKIGISHLIYMDDIKLYSKTQKEMKILIEKTTEFSKDINMEFGLDKCKTLHIIRGKIKPGDYEVDENNTIKAMEATDMNKYLGYKQLKGLDHTQVKHTLSNEYKRRICTICNTQLSGRNFIKALNTYAIPILTYSFGIIKWTKTDIDHIERTTRTTLTKHNYLHPKSAIERLTIKRDRGGRGLIDIHHLWQKQIHNLKHFFHTKSLVSNIHKAISQNDLNYTPLNLNEYQNDINSDRDPQILKIENWKKKTLHGRHPHDLEQTHIDTIASSKWLQIGNIFPETEGFIIAIQDQIINTKNYRKFIIKDPSVTSDKCRKCHTQPETIQHITGACTTLTQTDYTHRHNQIVNIVHQKLAIKHNLIQNNNTPFYKYTPPTVLENASHKLYYDRAILTDKTICCNRPDITLQDKINKTTYLIDIAVPNTHNIQKTITEKISKYTELKEEVTRIWKQEKVYIVPIVLSTTGVIPKHLRHSLKLIGLKENLYTTLQKAAILNTCRIVRKFLQLDDNEHQHTALGN

SEQ ID NO: 21718 - protein, 1290 aa, Schrankia costaestrigalis
METRSKRKRIGPLPGGDRRGTPGADAGCYSMRTVSGEELSRRAPTPQYTTAEQHTHPPSEDPDNISLNSFISIAEPYSPSTISYIPTPVSSVNENSRETPTPTLSVAQEANAFLPASTKAGKPRVCMRWSKDVNIFIMRTYYTITKLETDMTVYRKLLHEQFSLHYPDVKVTEQRISDQKRTIIRNNLLSEETLNRLKEEVRMQLEENTFNHSEVRALIQTENHSSLQLQSNALTHIQPITQSSHTLTQTSHTSTQTEYTTLILETEVETLSENAPFAETQSQYILDTLKAAITLYSGMDPGARPRLPKLKYSLKLSHLINLFNQTILTQLVTEDMELTDLHTLIYCTALVITEELGYKITDYTRTRRKHDNKPSWQIRLEKDIAKLRADIGRLTQYINNNRSNRVVKQVEAIFKNRLTHTRHENNNNKPEEFLDTLKQKLALKVHRLRRYKKAQQRKTDNIVFSTSVKSFYRNLHKSHNTSTQSTDTPTQTQLETFWSNIWEEQVQHNDKAIWITEEENRFNTINEMEFDKITATDISGITSRLNNWKAPGMNKIHNYWYKKLTSLHKYIAQTLTEIVLGKQEIPEFIATGLTYMLPKTTHSTQPGQYRPITCLPTIYKILTGVISRKITTHIEQHHIIAEEQKGCRQGHMGCKEQLIIDSTIHKHASTKNRNLHCTYIDYKKAFDSIPHSWLLKILQIYKINPQITNFLNKIMPYWKTTLQLNYQTSNITTRPIAIKKGIYQGDSLSPLWFCLAMNPLSHMLHGCQVGYNFKSTAEETVFSHLNMDDIKLYSKTDREMKKLIDVTTQFSKDINMEFGLDKCRALHIVKGKIRPGSYEVDDNSIISALDPNEFYKYLGYRQLKGLDHTESKVILNKEYQKRINAICKTQLTSKNLIKAINTYAIPVLTYSFGIIKWSKTDIEQIERTTRTTLTRFNNLHPKSAIERLTIKRHNGGRGVIDIQQLWQKQIHSLKTFFHMKSSTSHLHKAITQNDHNYTPLNLTEPTTSQNHDNSNPQAQKLENWKRKALHGRHPHDLEQSHIDAIASNKWLQIGTLFPETEGFMIAIQDQIINTKNYRKYIIKDPSIGNDKCRRCHTQSETIQHITGACTTLTQTDYTHRHNQIANIIHQKLAIKYNLIQDSNTPYYKYTPQTILENTTHKLYYDRAILTDRTIHYNRPDITLQDKITKTTYLIDIAVPNTHNIQKTITEKISKYAELKDEVTRIWRQDKVYVVPIVLSTTGIIPKHLHHSITLLQLKDSVYITLQKAAILNTCRIVRKFMSLEENTVTT

SEQ ID NO: 21719 - protein, 1318 aa, Sericinus montela
MRLRSRQIPQAGPRERESRPGPEDPGSPNVSEGGNASLNTAQFRTVAETIPNADTLSGSSRQSKRRTFKKNTKKPTQQIQNSNRTPSPFSTTSSSSEIYNPSSISNSSTASSDYSLRRLVSPSSDVAREANAFLPVSTKAGKPRVRMTWSKDVNIFIMRTFYYITKLETDMTCYRKVLHEKFSNQYPDIKVTEQRVADQRRAIIRNKFLSPEILNNLIEETKSQLQIDINTEEPLLNTNRIETPHLTPLLQTTTITNSNITCTDFISSQNISVVSVEAENISLSNKNQTESLTNISQQIEPKHDLNKKFERALYIYSGMDPTQRPNLPKLKYSKNLTNLVNLFNIDILPPFLTIDSQLTDIHTLVYCTAVVISKELGYVINTNTVHSRSNKNKGKPQWQIRLEKNIEQLRIDIGRLTQYINNNRSKRIVDHVANIFKNAAIHTKHEETNRKPEEYLDTLKQKLALKAHRLARYKKGFERKSDNKLFTTNEKSFYRKLTVRNQNSANTVDETPSKEELERFWANIWEKEVQHNTEAEWIKQERSKWIDIEEMKYDDITEMDIKVTVGRLHNWKSPGIDKIHNYWFKYLHSIHRTLARELNKIVTGKQAIPYFITKGITYMLPKSGPSQLPSQYRPITCLPTVYKILTSVITNKINKHVEFNNIIAEEQKGCRRGHMGCKEQLIIDSTIHKHAANNNRNLHCSYIDYKKAFDSIPHSWLVHVLELYKVNPLIINFLQNIMQHWNTTLLLNTNNTTIKTREISIKNGIYQGDSLSPLWFCLALNPLSNILNSQKAGYRLKHDNTETVLSHLLYMDDIKLYSKTDKEMKILIDSTIQFSKDINMKFGLDKCKTVHIIKGKLHPGDYPVSDLDIIKAMEPGDLYKYLGYNQHKGLDHKAIRTSLENEYKRRIVNICKTRLTSKNLIKAINTFAIPVLTYSFGIIKWTKTDLQAIERKTRTTLTKYQNLHPKSAIERLTIKRQNGGRGLIDIESLWRKQLKNLQQFFNQKALTSNIHRAIQCNDVKCTPLNLKETCVNNPETINHTQQDQKIETWKSKSLHGRHPHDLQQSYVDSVASNKWLKIGSLYPETEGFIIAIQDQVINTKNYRKHIIKDPTVINDKCRRCHAQSETIQHITGACTTLTQTDYTHRHNQIVNIIHQKLTHKYQLTMDATYLPYYKYTPQPILESSSHKMYYDRAILTDKTIHYNRPDITLQDKLHKITYLIDISVPNSHNLVKTISDKIHKYTDLKEEIKRIWRQEKVYIVPIIISSTGVVPKQLFTALKLLGLPDNTFIQMQKAAILNTCRIVRKFLQDDSHLLGETP

SEQ ID NO: 21720 - protein, 1318 aa, Papilio alexanor
MRLRSRQIPQAGPRERESRPGPEDPGSPNVSEGGNASLNTAQFRTVAETIPNADTLSGSSRQSKRRTIKKNTRKPTQQIQNGNRTPSPFSTTSSSSEIYNPSSISNSSTASSDYSLRRLVSPSSDVAREANAFLPVSTKAGKPRVRMTWSKDVNIFIMRTFYYITKLETDMTCYRKVLHEKFSNQYPDIKVTEQRVADQRRAIIRNKFLSPEILNNLIEETKSQLQIDINTEEPLLNTNRIETPHLTPLLKTTTITNSNITCTDFISSQNISVVSVEAENISLSNKNQTESLTNISQQIEPKHDLNKKFERALYIYSGMDPTQRPNLPKLKYSKNLTNLVNLFNIDILPPFLTIDSQLTDIHTLVYCTAVVISKELGYVINTNTVHSRSNKNKGKPQWQIRLEKNIEQLRIDIGRLTQYINNNRSKRIVDHVANIFKNAAIHTKHEETNRKPEEYLDTLKQKLALKAHRLARYKKGFERKSDNKLFTTNEKSFYRKLTVRNQNSANTVDETPSKEELERFWANIWEKEVQHNTEAEWIKQERSKWIDIEEMKYDDITEMDIKVTVGRLHNWKSPGIDKIHNYWFKYLHSIHRTLARELNKIVTGKQAIPYFITKGITYMLPKSGPSQLPSQYRPITCLPTVYKILTSVITNKINKHVEFNNIIAEEQKGCRRGHMGCKEQLIIDSTIHKHAANNNRNLHCSYIDYKKAFDSIPHSWLVHVLELYKVNPLIINFLQNIMQHWNTTLLLNTNNTTIKTREISIKNGIYQGDSLSPLWFCLALNPLSNILNSQKAGYRLKHDNTETVLSHLLYMDDIKLYSKTDKEMKILIDSTIQFSKDINMKFGLDKCKTVHIIKGKLHPGDYPVSDLDIIKAMEPGDLYKYLGYNQHKGLDHKAIRTSLENEYKRRIVNICKTRLTSKNLIKAINTFAIPVLTYSFGIIKWTKTDLQAIERKTRTTLTKYQNLHPKSAIERLTIKRQNGGRGLIDIESLWRKQLKNLQQFFNQKALTSNIHRAIQCNDVKCTPLNLKETCVNNPETINHTQQDQKIETWKSKSLHGRHPHDLQQSYVDSVASNKWLKIGSLYPETEGFIIAIQDQVINTKNYRKHIIKDPTVINDKCRRCHAQSETIQHITGACTTLTQTDYTHRHNQIVNIIHQKLTHKYQLTMDATYLPYYKYTPQPILESSSHKMYYDRAILTDKTIHYNRPDITLQDKLHKITYLLDISVPNSHNLVKTISDKIHKYTDLKEEIKRIWRQEKVYIVPIIISSTGVVPKQLFTALKLLGLPDNTFIQMQKAAILNTCRIVRKFLQDDSHLLGETP

SEQ ID NO: 21721 - protein, 1308 aa, Furcula furcula
METRSNKKLRGPLPGGDRRGTPGADAGCFSIRTVSGEGLNRRTPTGYPENVTADNDQLNRLTDSRTNSPIEPYSPSTISYVPSIRSSPSISSSPPNSNIRESPTFGVTREANAFLPASTKAGKPRVRMSWSKDVNLFIMRTYYYITKLETDMTIYRKQLHELFLRQYPEVKVTVQRVSDQMRAIIRNKLLTQETLNQLKEETRRRLQEEINENTSLTVLPNISQSSSFPFTSDPQLLTQSQPCSQSETPTQIYTQNTQATHTSTLTENITILQENNSDISVNSNPVSEPYIQELCDKFRTILTKYSGIDPAARPKLPKLKYSIKFNQLIDIFNQKILNQFLSDDAQIKDIHTLIYCTAIAISEELNYKITENTTTHTRRRENYKPPWQHRLEKDIEKLRADCGRFTQYINNNRTNKVVNRVKDIMKDKCNHTRHEDSNKKPEEFLDTLKQKLALKAHRLKRYKKSQQRKSENILFATNEKTFYRNLQKPEIDTNREITEDVPTKEQLETFWSGIWEDNINHNDKADWIKEEEAKWSTLEEMEFINISELDIKNITARLHNWKAPGIDKIHNFWYKKLNSLHKLIAKNLTDIILGKQDIPEFFATGITFMLPKVKHSPQPSQYRPITCLPTIYKILTSAISLKINAHIEHHNIIAEEQKGCRRGHMGCKEQLVIDSTIHKHATTKNRNLHCTYIDYKKAFDSIPHSWLIQILHIYKINEKLIEFLQRTMKYWKTTLHLNNDNSSITTREICIKKGIYQGDSLSPLWFCLALNPLSHQLHGCRAGYHLKNNAEDTIISHLIYMDDIKLYANTEKNMKQLIETTTKFSNDINMQFGLDKCKTVHIVRGKIRAGDYTISDTDTITAMAPSDLYKYLGFRQLKGLDHTSIKHTLAVEFKRRVKSLCTTQLSAKHLIKAINTYAIPILTYSFGIIKWSKTDIQQLERTIRTTLTIYHHHHPKSAIERLTIKRQNGGRGLIDIYHLWHKQIYNLKTFFHTKSTTSDIHKAITHNDNNFTPLNLSEQTELQNFNVSDPEKQKLEDWKKKALHGRHPNDLEQSHIDRVASNKWLKIGNLFPETEGFIISIQDQIVNTKNYRKYIIKDPTITNDKCRRCHIQPETIQHITGACTSLTQTDYTHRHNQIANIIHQNLAFKYKLIENTNTPYYNYKPQTVLENTSHKLYYDRSILTDRTIHYNRPDITLQDKIHKTTYLIDIAVPNTHNIQKTITEKINKYAELKDEVSRIWKQQKVYVIPIVLSTIGIIPNHLHHSLQLLDLNKSLYITLQKAAILNTCRIVRKFMQTEELNHHSTTHT

SEQ ID NO: 21722 - protein, 1306 aa, Furcula furcula
METRSKKKLRGPLPGGDRRGAPGADAGCFSIRTVSGEGLNRRIPTGYPENVTADNDQFNKLIDSRTNSPIEPYSPSTISYVPSIRSSPSIPSSPPNSNIRDSPTLGVTREANAFLPASTKAGKPRVRMSWSNEVNLFIMRTYYYITKLETDMTIYRKRLHELFSRHYPEVKVTVQRVSDQMRAILRNKLLTQETLDRLKEETRRRLQEEINENTSLTVLPNISQSSSVPFTSEPQLLTQSQPFSQSETTTQTYNQNTQTTHTTTLTENVYILQENNSEISVDSNPVSETHIRELCDKFRSILIKYSEIDPVAWPKLPKLKYSIKLNQLLDIFNQKILNQFLSDDAQLKDIHSLVYCTAMAISEELNYKITENTTTHTRRRENYKPPWQHRLEKDIEKLRADCGRLTQYINNNRSNKVVNRVKDIMKDKFTHTRHEDSNKKPEEFLDTLKQKLALKAHRLKRYKKSQQRKSENILFATNEKSFYRNLQKPQTNINITEDVPTKEQLETFWSGIWEDNINHNDNADWIKEEEARWSTLEEMEFINISELDIKNITTRLHNWKAPGIDKIHNFWYKKLNSLHKLIAKNLTDIILGKQDTPEFLTTGITFMLPKVKHSTQPSQYRPITCLPTIYKILTSAISLKINAHIEQHNIIAEEQKGCRQGHMGGKEQLVIDSTIHKHATTRNRNLHCTYIDYKKAFDSIPHSWLIQILHIYKINEKIIEFLQRTMKDWKTTLHLNNHNSSITTREICIKKGIYQGDSLSPLWFCLALNPLSHQLHGCQAGYHLKNNAEDTIISHLIYMDDIKLYANTEKNMKQLIDTTTKFSNDINMQFGLDKCKTMHIVRGKIRPGDYTISDTDAITAMAPSDLYKYLGFRQLKGLDHTSIKHTLAVEFKRRVKSLCSTQLSAKHLIKAINTYAIPILTYSFGIIKWSKTDIQQLERTIRTTLTIYHHHHPKSAIERLTIKRQNGGRGLIDIYYLWHKQINNLKTFFHTKSTTSDIHKAITHNDNNFTPLNLSEQTDLQNVNVSDPEKQKLEDWKKKTLHGRHPHDLEQSHIDKVASNKWLKIGNLFPETEGFIISIQDQIVNTKNYRKYIIKDPTITNDKCRRCHIQPETIQHITGACTSLTQTDYTHRHNQIANIIHQNLASKYKLIENTNTPYYNYKPQTVLENTSHKLYYDRSILTDRTIHYNRPDIILQDKLHKTTYLIDIAVPNTHNIQKTITEKINKYAELKDEVSRIWKQQKVYVVPIVLSTTGIIPNHLHHSLQLLDLNKSLYITLQKAAILNTCRIVRKFMQTEELNHHSTTHI

SEQ ID NO: 21723 - protein, 1176 aa, Eurema mandarina
MRLRSRVIPQAGTGVSNNGESRPGPSSPGCPSYSGEGTVSQAAQSQAVAAQHDQMSTCFSPTPSLSPIPSSSATGGRLNRQVPPDDSNTSSDSPNSPVEPYSPSTVSYTLSRQSSPSIPSSPSDRSTQNDPPVPTLNATQGTSSFLPVSTKAGKPRVRMSWSKEVNTFIMRTYLYITKLETDMTTYRKQLHELFVQQYPEIRVTEQRISDQRRAIVRNKLLTHREIEQLKEEISLQIQENIVSNVYNSNTPNDEDDITTQTQPSTHLSTITQSHTHSQSTQASHMSTQTVVENEIEALIPQNHHQITQIRVQEIKDKFTTTLTLYSGMDPKNRPTLPKFKYTTTLFDLVNLFNRNILPQYLSEETQLVDIHTLIYCTAVTVAEELKFKIRVHTENVRTKDCIKPAWQQRLERDIEKLRADCGRLTQYINNNRSNKIVRKVEEIFKRYGTHTRHESNNTKPEEYLDTLKQKLALKVHRLRRYKKAQQRKDDNATFATNQKTFYRNLHKTNPNTEIENDTSSTPTQEQLETFWSRIWEEQTQHNDKAPWVDTEKTKWDTIDEMGFVEITETDVTNITARLHNWKSPGVDKIHNFWYKKLTVLHKPLAKNFTDIILEKQNIPEFIATGITYMLPKSTYSPQPSQYRPITCLPTIYKILTSAIASKINAHIEQHNIIAEEQKGCRRGHMGCKEQLIIDSTIHKHAATKNRNLHCTYIDYKKAFDSIPHSWLLQILDIYKINSKIVQFLRNIMHHWKTTLLLNHKNKIITTRQISIKKGIYQGDSLSPLWFCLALNPISHLLHSTRVGYNFKTTEDVLISHLIYMDDIKLYSKTEKEMKQLVDITAQFSRDINMQFGLDKCKTVHIIRGKIKSGDYVVNDTDTIKSLESNDLYKYLGYTQLKGLDHVRIKDTLTEEYKKRLNALCKTQLSGKNLIKAINTYSIPILTYSFGVIKWFKTDLEKIERVTRTTLTKHNKLHPKSAIERLTIKRQNGGRGLIDIHHLWQKQLMSLRSFFLTKSHTSQIHKAITQHDINCTPLNLSKHLNTQTPQPINTDPQIHKIEEWKKKVLHGRHPHDLQQPHINTIASNKWLQIGNLFPETEGFLIAIQDQIINTKNYRKVIIKDPTITDDKCRRCRTQPETIQHITGACPSLTQTDYTHRHNQLANIIHKKIALKYNLIQN

SEQ ID NO: 21724 - protein, 1289 aa, Chrysoteuchia culmella
METRSMRKLRGPLPGGDRRGAPGADAGCFSIRTVSGEELSRRAPTGESQPENTTAGDTLNRQTDATPEPYSPSTISYNPSVQSSPTTASSRATPVEDVARVANAFLPASTKAGKPRVRMQWSKDVNIFIMRSYYYITKLETDMTLYRQKLHEQFLLKYPNVKVTQQRLSDQKRAIERNKLLNTDILTTLKEEVRKQINEEENNSNNRDNTQVTEHTLTPTVSRFTLSPYASRTSTQTNHTSTQTDTVTTLLDNEIVTLENTIPANDAYIQVIMDKLRTTITQYSGMDPAARPKLPKLKYSPKLSKLLDIFNHSILNEFISSDAQLTDIHTLTYCTALVISEEVGYKVTENIGPYKSKQVKKPAWQHRLEKDIEKLRTDIGQLTQYINNNRSRKVVKRVEIIFRNTLIHTRHENNNKKPEEYLDTLKQKLALKAHRLKRYKKSEQRKDDNRVFATNEKLFYRNLGKPPITLPENRTRNIPTKEQLETYWASIWEEQISHNSNAGWIVEEEDRWRTLEAMQFPEISVDEIKNITARLHNWKSPGIDKVHNFWYKKLTTLHASIANILSKLITGQENIPEFITSGITYMLPKSDHTSLPSQYRPITCLPTIYKILTSVLAKRINTHIEQNNILAEEQKGCRRGHMGCKEQLIIDSTILKHATTKNRTLHCTFIDYKKAFDSIPHSWLIKVLEIYKISPIIVNFLLNIMPQWKTTLHLYNGDNDIVTRQIAIKKGIYQGDSLSPLWFCLALNPLSHRLRSDRVGYSFKHGTSETLLSHLIYMDDIKLYAKNDKEMKQLIKTTTDFSTDIKMQFGLDKCKTVHIIRGKIRLGDYAVDDTNNIAALDHTDYYKYLGFQQLKGLDHTSIKQNLIIDFKKRVNAVCKSQLSGRHLIKALNTFAIPILTYSFGIIKWTKTDIEQIERTTRTLMTKHNNLHPKSAIERLTIKREDGGRGLIDIQCLWQKQVHTLNIFFKTKAQTSDIHKAIVQNDNNYTPLKIDTEQTNTNIDPHKKKIEDWKKKTLHGRHPHDLNLPHIDKKASNMWLKTGSLFPETEGFLIAIQDQVINTRNHRKYIIRDPTVTNDKCRKCQTQPETIQHITGACTNLTQTDYTHRHNQLTHIIHQKLAIKHNLLTPEPNTPYYKYTPQTVLENTTHKLYYDRAILTDRTIHHNRPDIILQDKTNKTTYLIDIAVPNTHNLQKTISEKISKYGDLKEELTRIWKQQKVYIVPIVLSATGVVPNNLRQSLNIIDLKPNIINILQKAAILNTCRIVRKFLQMDENNQTTLNTPLTHLTL

SEQ ID NO: 21725 - protein, 1042 aa, Leptidea sinapis
MPTQTEFVTIMMENDIDTVLDHNPGTNTEIEEICYKFKTALTQYSGMDPLVRPKLPKLRYNSHLFQLVNMFNSDILSRFISDDTKLTDIHTIVYCVALVISEELNYKVTEYIRSTRPKDCYKPPWQIRLEKDIEKLRADCGRLTQYINNIRSRKIIKHVKAIFKTGNTHTKHENSNIKPEEFLDTLKQKLALKVHRLKRYKKAQERKNDNTMFSTNEKNFYRNLHKLKTDTVNNPNVPTQEQLETFWSGIWEQQVHHNDKADWIIEEENKWNAIEEMDFTEITETDINNITARLHNWKSPGIDKIHNFWYKKLFSLHKIMAKNITDIIIGKQKIPDFIATGITYMLPKLQISPLPSQYRPITCLPTIYKILTSAITTKINKHVEHYNIIAEEQKECRRGHMGCKEQLIIDSTIHKHATSKNRNLHCTYIDYKKAFDSIPHSWLIKILQIYKINPKIINFLHDIMSRWKTTLYLNTNQNTITTREIAIRKGIYQGDSLSPLWFCLALNPLSHLLRDCRAGYRLKHDIQETIVSHLIYMDDIKLYGKTEMEMKKLIDTTAQFSKDINMEFGLDKCRTLHVKRGKIRPGDYAVNDIDIIRAMEQTELYKYLGYKQLRGLDHTEIKNTLTIEFKKRINALCKTQLTSKHLIKSLNTYAIPILTYSFGIIKWTKTDIEQIERTIRTTLTKHNNLHPKSAIERLTIKREYGGRGLIDLNHLCQKQVGNLKVFFHLKSQTSEIHKAIVKNDINFTPLNLHEDISSQNTRRNDPQIQKLDSWKRKVLHGRHPHDLEQSHINTAASNKWLKIGNLFPETEGFIIAIQDQVVNTKNYRKFIIKDPSISNDKCRKCHVQPETIQHITGGCTTLTQTDYTHRHNQVVNIIHQKLALKHKLIQNTNTPYYKYKPQTVLENDTYKLYFDRAILTDRTIHYNRPDITLKDKLNEITYLIDIAVPNTHNLQKTISEKINKYTELKDEVARIWNQKKVYVIPIVLSTTGVIPNHLLHSLKLLELKETLYITLQKVAILNTCRIVRKFLQIDEHDISPYT

SEQ ID NO: 21726 - protein, 1295 aa, Ernsta colotes
MRSVSGEELNRRAPTGSSENATAEYDILTDRSSPIEPYSPSTISYTPSIRSSPSNSIISSNRNSPPLTLDVAQEANAFLPASTKAGKPRVRMRWSKEINLFIMRTYYYITKLETDLTTYRKQLYEKFTTQYPEVKVTEQRIADQRRTIVKNKLLNQKTLDELKEEVKFKLKEDNIHNTDTDINTSVDHQIVDIARSSRFERFSLSQNQSQSSLAIQNIHNTHIVTLNTELLQTPTHDNNLSNNTNTQTDFVITVSGNATHTEENIVTNTQIQILHDKFITTLRQYTEINPVVRPKLPKLRYCPQLFQLINIFNHDILNKFISENTHVSDLLTIIYCTALTISQELNYKIINDPQYIVPKERNKPAWQKRLEQDIEKLRVECGRLTQYIKGNRSKKVTKCVEIIFKSRLIHTTHENNNRKPEEYLDTLKQKLALKVNRLKRYKKALRRKNDNILFTTNEKLFYKKLHKPITVTEKEPDLPTKEQLEEFWSTIWEDEIQHNEKTDWIKEEERKWSTIEEMEFIEITETDITYITHKLHNWKSPGVDKIHNFWFKKLISLHKSIAKNITDIILGKQNIPEFIATGITYMLPKSEYTPHPDQYRPITCLPTIYKIITSAITIKINKHIEQHNILAEEQKGCRRGHMGCKEQLIIDSTIHKHAASNYRNLHCTYIDYKKAFDSIPHSWLLKILQIYKVNSKVIYFLQNVMTQWKTTLYLNTQNKSIKTRQISIRKGIYQGDSLSPMWFCLALNPLSHLLRRCKVGYSLKHNTTDSIISHLVYMDDIKLYAKTEVEMRKLLDTTIEFSNDISMEFGLDKCKTLHIKRGKIQPGDYTINNIGTIKAMEPNDLYKYLGYKQLKGLDHTSIKETLTTEYRNRMNILCKTQLSGKHLIKSINTYAIPILTYSFGIVKWTTTDLERLERMTRTTLTKHNNLHPKSAIERLTIKRQDGGRGLIDLCKLWRSQISSLKTFFYTKSQTSYMHKAIVENDRKYTPLNLFTPNQAITQSTQQGNSSQNSSNTQKEKIEKWKKKVLHGRHPHDLEQSHVDPIASNKWLQIGNLFPETEGFMIAIQDQIINTRNYRKHILKDSTLINDKCRKCHTQSETIQHITGACITLTQTDYTHRHNQLANIIHQKLALKHNLIQNSNTPYYNYTPQTVLESKSHKLYYDRAILTDKTIHYNRPDIVLQDKINKVTYLIDIAVPNTHNLQKTISEKITKYTELKQEVTRIWKQEKVFIVPIVLSSTGVIPKHLRHSLKQIDLNYSTYITLQKAAILNTCRIVRKFMEVDENEFTTNNITV

SEQ ID NO: 21727 - protein, 1028 aa, Muschampia nomas
MQVIHDKFKTALTKYSEMNPVARPKLPKVRYSPHLFQLINIFNKDILNNFITEDSQLVDVHNIIYCTAFVISQELNYKVTDDIQNIVPKHRNKPPWQMRLEKDIEKLRVECGRLTQYIKGNTSKKILKYIQNIFKSTLIHTTHENNNKKPEEFLDTLKQKLALKVNRLKRYKKAQQRKKDNIIFRTNEKIFYKELHKSQKTIVNEPDLPTEEHLEKFWSGIWEDKVQHNEKTDWIDEEEKKWNTIEEMEFNEITETDITYITHKLHNWKSPGVDKIHNFWYKKLVSLHKSIAKNITNIILGSQSIPEFIATGITYMLPKSEYTPHPAQYRPITCLPTIYKIITSAITLKISKHIERHNILAEEQKGCRRGHMGCKEQLIIDSTIHKHASSKNRNLHCTYIDYKKAFDSIPHSWLLKILKIYKINSKIITFLQNIMTQWKTSLNLTTQNKSIKTREISIRKGIYQGDSLSPLWFCLALNPLSHLLYRCQVGFPLKHDTTDTIISHLVYMDDIKLYANTEIGMKKLLDTTIKFSKDINMEFGLDKCKTLHIQRGKIQPGDYTINNIGTITAMEPNDLYKYLGYKQLKGLDHTAIKETLTTEYRNRMNKLCRTQLSGKNLIKSINTYAIPILTYSFGIVKWTSTDIERLERMARTTLTKHNNLHPKSAIERLTIKRQDGGRGLIDICKLWKSQISRLKEFFYTKSQTSLIHKAVVRNDRNYTPLNLFSPDQVITQYTQHNNSTQHNNNTQKDKIEDWKKKVLHGRHPHDLEQSHVDAIASNKWLQIGNLFPETEGFMIAIQDQVINTRNYRKYILKDPTLINDKCRKCHTQPETIQHITGACITLTQTDYTHRHNQIANIIHQKLALKHKLIQNTKTPYYQYTPQTILENKTHKLYYDRAILTDKTIHYNRPDITLQDKVNRVTYLIDIAVPNTHNLQKTITEKISKYTELQEEVARIWRQDKVLIVPVVVSTTGVIPNHLQHSLRQLHLSENTYITVQKAAILNTCRIVRKFLQIDETEVVPHHARQIQV

SEQ ID NO: 21728 - protein, 1294 aa, Ernsta delagoae
MRSVSGEELNRRTPTGSSENATAEYDTLTDRTSPTEPYSPSTISYTPSLRSSPSNSINSSNRNSPSLTFDVAQEANAFLPASTKAGKPRVRMRWSKEINLFIMRAYYYITKLETDLTTYRKQLYEQFSQKYPNINVTEQRIADQRRTIVKNKLLNQETLNKLKEEVKLQLEEDSKNNTDSDFSTQVDRDTVNVARSNHLISQIPQSSNIMQNTHTTPTLTNIQLSHTSTHNNNLSNDTYTQTDLELSILGDDAHSEENIVTNTHIEVIINKFRTSLAHYTDINPVIRPKLPKLRYSPQLFELINIFNHDILSKFISDDTQLSDIHTIIYCTALTISQELNYKILEDPQHVGPKEHNKPAWQRRLEQDIEKLRAECGRLTQYIKGNRSKKVTKHVEAIFKSRIIHTTHENHNRKPEEYLDTLKQKLALKVNRLKRYKKALRRKNDNVLFTTNEKIFYKKLQKPQTVTEKEPDLPTEEQFEEFWSSIWEDEVQHNEKADWIEEEERNWSTIEEMEFTEITEADIKYITHKLHNWKSPGVDKIHNFWYKKLVSLHKSIAKNITDIIFRKQNVPEFIATGITYMLPKSEEYTPHPDQYRPITCLPTIYKIITSAITIKINNHVDKHNILAEEQKGCRRGHMGCKEQLIIDSTIHKHAASKNRNLNCTYIDYKKAFDSIPHSWLLKILKIYKVNPNIIHFLQNVMTQWKTTLYIYTQHKTIKTRQLSIRKGIYQGDSLSPMWFCLALNPLSHLLHKCKVGYSLKHDMTDSIISHLVYMDDIKLYAKTEIGMKKLLDTTTEFSNDINMKFGLDKCKTLHIKRGKIQPGDYTINNIGTIKAMEANDFYKYLGYNQLKGLDHTSIKETLTTEYRNRINSLCKTQLSGKHLVKSINTYAIPILTYSFGIVKWSTTDIERLERMTRTTLTKHNNLHPKSAIERLTIKRQDGGRGLIDISKLWKSQIDGLKTFFYTKAQNSHIHKTIVQNDRNYTPLNLFAIDKVITEMTQHGNSTQNNNISQKEKIEQWKKKVLHGRHPLDLEQSHVDTVASNKWLQIGNLFPETEGFMIAIQDQIINTKNYRKHILKDSTLINDKCRKCHSQPETIQHITGACITLTQTDYTHRHNQLANIIHQKLALKHKLIQNSNTPYYNYRPQTVLESKSHKLYYDRAILTDKTIHYNRPDIVLQDKLNKVTYLIDIAVPNTHNLQKTITEKITKYSELKEEVKRIWKQEKVYIVPIVLSTTGVIPNHLRHSLKILNLKDSTYITLQKAAILNTCRIVRKFLEIGENEHATNHITPSNVD

SEQ ID NO: 21729 - protein, 1326 aa, Habrosyne pyritoides
MKMSNRRYNLRPLPGGRRGTPGAGAGCLSMRSTGDEELSWRALVDQNTTAEHQELNRRTTDENATAEHQELNRRTPAADATADQQHHQIGSGRRSSSSSPSLVEPYSPSTASYALSSPTLTYSSSSSQVSRATSNLNSVRDPTLDVARVANAFLPESTKAGKSRVRMTWNTEVNMFIMRTYYRITNLETDLTGYRQTLHQLFLRQYPGLNITEQRISDQRRIIIRNKRLSEEVLNRLKNEVRIELEQGTTEVVCPNDTAQVQISDIPRQTHSPYSQSFIESELDILLENNTQMSLTPIHNVDQENIVIHDPYPNILIQEVHDKLQTALSQFAEIHPEDRPKLPKLMYSKSLSKLVSLFNTNILKRFIHEDIQLNDIHTLIYCSAFIISQELGYKVKQNTEGLRAKHNNKQPWQMRLEKDIDRLRADIGKLTQYVNNNRSRKIVKRVEQIFRNSIIHTRHENNNNKLEEFLDTLKQKLALKAHRLARYKKSQERKDHNGLFKGNEKMFYRNLNSDKDNTTDNDLEIPTAEDLERFWSNIWETATYHNNDAKWIEEEEERWNTIDAMTFESISEIDLKNITSKLHNWKSPGIDSIHNFWYKHFYTLHNALAHSITNILHRKQDLPSFVTKGITYMIPKGKYTTDPSKYRPITCLPTIFKIITSALKLKINSHIEQNNIIAEEQKGCRPGHMGCKEQLVIDSTIHKQATSKHRNLHCTYIDYKKAFDSIPHTWLIRILEIYKIDPMIVRFFKDTMPLWKTKLYLRNKLDMVTTRQIAIKNGIYQGDSFSPMWFCLALNPLSHLLNRCQAGYRLKHTDNESTISHLVYMDDIKLYAKTEKEMKKLIDTTAEFSKDINMEFGLEKCKTLHIVKGKVRPGDYAVGETGNIASMDPNDLYKYLGYHQLKGLDHTTIKHQLTNEYKKRLTSLCKTQLTGKHLIKAINTYAIPILTYSFGIVKWTKTDIVNLERQTRTTLTRYNNLHPKSAVERLVIKRQNGGRGLINIHILWKKQIHNLNTFFKRKAQTSKIHRAVTQNDIGFTALNLAKQSDERTPSSREEENLKIEEWKKKVLHGRHPHDLEQPHIDAEASNKWLQIGSLFPETEGFIIAIQDQVINTKNYRKHIIKDNTVRDDKCRKCHVHSETIQHITGACPHLTQTDYTHRHNQIASIIHQKLALKNKLIQDTHTPYYKYKPSPIIENNSFKLYYDRAVLTDRTIHYNRPDIILIDKTNKITYLIDIAVPNTHNISKTITEKIHKYTELKDEVTRIWKQNKVYIVPVVLSTTGIIPKHLHHSLKLLDLKETLYITLQKAAILNTCRIVRKFLQSDDIIT

SEQ ID NO: 21730 - protein, 1326 aa, Habrosyne pyritoides
MKMSNRRYNLRPLPGGRRGTPGAGAGCLSMRSTGDEELSWRALVDQNTTAEHQELNRRTTDENATAEHQELNRRTPAADATADQQHHQIGSGRRSSSSSPSLVEPYSPSTASYALSSPTLTDSSSSSQVSRATSNLNSVRDPTLDVARVANAFLPESTKAGKSRVRMTWNTEVNMFIMRTYYRITNLETDLTGYRQTLHQLFLRQYPGLNITEQRISDQRRIIIRNKRLSEEVLNRLKNEVRIELEQGTTEVVCPNDTAQVQISDIPRQTHSPYSQSFIESELDILLENNTQMSLTPIHNVDQENIVIHDPYPNILIQEVHDKLQTALSQFAEIHPEDRPKLPKLMYSKSLSKLVSLFNTNILKRFIHEDIQLNDIHTLIYCSAFIISQELGYKVKQNTEGLRAKHNNKQPWQMRLEKDIDRLRADIGKLTQYVNNNRSRKIVKRVEQIFRNSIIHTRHENNNNKLEEFLDTLKQKLALKAHRLARYKKSQERKDHNGLFKGNEKMFYRNLNSDKDNTTDNDLEIPTAEDLERFWSNIWETATYHNNDAKWIEEEEERWNTIDAMTFESISEIDLKNITSKLHNWKSPGIDSIHNFWYKHFYTLHNALAHSITNILHRKQDLPSFVTKGITYMIPKGKYTTDPSKYRPITCLPTIFKIITSALKLKINSHIEQNNIIAEEEKGCRPGHMGCKEQLVIDSTIHKQATSKHRNLHCTYIDYKKAFDSIPHTWLIRILEIYKIDPMIVRFFKDTMPLWKTKLYLRNKLDMVTTRQIAIKNGIYQGDSFSPMWFCLALNPLSHLLNRCQAGYRLKHTDNESTISHLVYMDDIKLYAKTEKEMKKLIDTTAEFSKDINMEFGLEKCKTLHIVKGKVRPGDYAVGETGNIASMDPNDLYKYLGYHQLKGLDHTTIKHQLTNEYKKRLTSLCKTQLTGKHLIKAINTYAIPILTYSFGIVKWTKTDIVNLERQTRTTLTRYNNLHPKSAVERLVIKRENGGRGLINIHILWKKQIHNLNTFFKRKAQTSKIHRAVTQNDIGFTALNLAKQSDERTPSSREEENLKIEEWKKKVLHGRHPHDLEQPHIDAEASNKWLQIGSLFPETEGFIIAIQDQVINTKNYSKHIIKDNTVRDDKCRKCHVHSETIQHITGACPHLTQTDYTHRHNQIASIIHQKLALKNKLIQDTHTPYYKYKPSPIIENNSFKLYYDRAVLTDRTIHYNRPDIILIDKTNKITYLIDIAVPNTHNISKTITEKIHKYTELKDEVTRIWKQNKVYIVPVVLSTTGIIPKHLHHSLKLLDLKETLYITLQKAAILNTCRIVRKFLQSDDIIT

SEQ ID NO: 21731 - protein, 1326 aa, Habrosyne pyritoides
MKMSNRRYNLRPLPGGRRGTPGAGAGCLSMRSTGDEELSWRALVDQNTTAEHQELNRRTTDENATAEHQELNRRTPAADATADQQHHQIGSGRRSSSSSPSLVEPYSPSTASYALSSPTLTDSSSSSQVSRATSNLNSVRDPTLDVARVANAFLPESTKAGKSRVRMTWNTEVNMFIMRTYYRITNLETDLTGYRQTLHQLFLRQYPGLNITEQRISDQRRIIIRNKRLSEEVLNRLKNEVRIELEQGTTEVVCPNDTAQVQISDIPRQTHSPYSQSFIESELDILLENNTQMSLTPIHNVDQENIVIHDPYPNILIQEVHDKLQTALSQFAEIHPEDRPKLPKLMYSKSLSKLVSLFNTNILKRFIHEDIQLNDIHTLIYCSAFIISQELGYKVKQNTEGLRAKHNNKQPWQMRLEKDIDRLRADIGKLTQYVNNNRSRKIVKRVEQIFRNSIIHTRHENNNNKLEEFLDTLKQKLALKAHRLARYKKSQERKDHNGLFKGNEKMFYRNLNSDKDNTTDNDLEIPTAEDLERFWSNIWETATYHNNDAKWIEEEEERWNTIDAMTFESISEIDLKNITSKLHNWKSPGIDSIHNFWYKHFYTLHNALAHSITNILHRKQDLPSFVTKGITYMIPKGKYTTDPSKYRPITCLPTIFKIITSALKLKINSHIEQNNIIAEEQKGCRPGHMGCKEQLVIDSTIHKQATSKHRNLHCTYIDYKKAFDSIPHTWLIRILEIYKIDPMIVRFFKDTMPLWKTKLYLRNKLDMVTTRQIAIKNGIYQGDSFSPMWFCLALNPLSHLLNRCQAGYRLKHTDNESTISHLVYMDDIKLYAKTEKEMKKLIDTTAEFSKDINMEFGLEKCKTLHIVKGKVRPGDYAVGETGNIASMDPNDLYKYLGYHQLKGLDHTTIKHQLTNEYKKRLTSLCKTQLTGKHLIKAINTYAIPILTYSFGIVKWTKTDIVNLERQTRTTLTRYNNLHPKSAVERLVIKRQNGGRGLINIHILWKKQIHNLNTFFKRKAQTSKIHRAVTQNDIGFTALNLAKQSDERTPSSREEENLKIEEWKKKVLHGRHPHDLEQPHIDAEASNKWLQIGSLFPETEGFIIAIQDQVINTKNYRKHIIKDNTVRDDKCRKCHVHSETIQHITGACPHLTQTDYTHRHNQIASIIHQKLALKNKLIQDTHTPYYKYKPSPIIENNSFKLYYDRAVLTDRTIHYNRPDIILIDKTNKITYLIDIAVPNTHNISKTITEKIHKYTELKDEVTRIWKQNKVYIVPVVLSTTGIIPKHLHHSLKLLDLKETLYITLQKAAILNTCRIVRKFLQSDDIIT

SEQ ID NO: 21732 - protein, 997 aa, Protographium marcellus
MDLTLRPNLPKLNYCPKLFELIKIFNEHILNHFQTEDSQMSDINKLIYCTAMVVSKELKYKIIENHTFNNKPTKNTKPPWQLRLEKDIEKIRADCGRLTQYINNNRSNKILMKVKKFFQNTVIHTKHENNNKKPEEFLDTLKQKLALKAHRLKRYLKAQQRKNDNNLFRTSEKSFYRKLQKTKTTEITNENNEYIPNKEQLETFWANIWEDHVPHNDSAEWIKDEMSRWNAIDEMNFDEITEYDLSLTTNRLSNWKSPGVDKIHNFWYKKLISLHKIIAKNFTDIILGRQNIPEFFATGITYMLPKSIPSPEPSEYRPITCLPTIYKILTSIITSKINTHVEKHNIISEEQKGCRKGHMGCKEQLIIDSAIHKHAASKNRNLHCTYIDYKKAFDSIPHTWLLKVLQIYKINHKLINFLQIIMSHWKTTLQIRNHNQCITTRQISIRKGIYQGDSLSPLLFCLAINPLSHQLHRCQVGYNLKNINEPTVISHLIYMDDIKLYARTENEMKKLIDTVFMVSKDINMQFGLDKCKTLHIVKGKVQPGNYIINDTEIISAMGPSDVYKYLGYKQLKGLNHTTIKETLTNEYKRRLIAVCKTRLNGKNLIKAINTFAIPILTYSFGVIKWSKSDIEQLERLTRRMLTRHNYLHPKSAIERLTIKRPEGGRGLIDIQFLWQKQIFLLKTFFLTKSSTSNIHKSITQIDYNFTPLALKEQSHPTKLDNIEEYRQKLNNWKRKALHGRHPQDLEQPHIDAIASNTWLKIGNMFPETEGFIMAIQDQIINTKNYRKYIIKDPTITNDQCRKCHNKSETIQHITGACITLTQTDYTHRHNQIANIVHQNLALKHSLIQDTNTPYYKYSPENVLENNVYKLYYDRAILTDRTVHYNRPDIILQDKSTKTTYLIDIAVPNTHNIQTTITEKIHKYTELKDEITRIWKQEKVYIVPIVLSTTGVIPKHLHHSLKLLDIQKSLYITLQKAAILNTCRIVRKFMQIDDNNPG

SEQ ID NO: 21733 - protein, 1287 aa, Leptidea sinapis
METRSMKKRKIGPLPGGDRRGTPGAGAGCLSMRTVSGEELNRRAPTGSSENTTAENDRLTDRTTPTEPYSPCTISYTPSIPSSPLSSRYSPTPTLDAAREANAFLLASTKAGKPRVRMKWSKEMNLFIMRTYYYITKLETDLTTYRKQLHELFEQRIADQRRVIVKNKLLNQETLNQIKEEIKSQLEIENENQFHINISEPTNDVIPCSSTQTIPNTQHNQSLNTFTYNIQSLQTFSYITQTSHNMPTQTEFVTIMMENDIDTVLDHNPGTNTEIEEICYKFKTALTQYSGMDPLVRPILPKLRYNSHLFQLVNMFNSDILSRFISDDTKLTDIHTIVYCVALVISEELNYKVTEYIRSTRPKDCYKPPWQIRLEKDIEKLRADCGRLTQYINNNRSRKIIKHVKAIFKTGNTHTKHENSNIKPEEFLDTLKQKLALKVHRLKRYKKAQERKNDNTMFSTNEKNFYRNLHKLKTDTVNNPNVPTQEQLETFWSGIWEQQVHHNDKADWIIEEENKWNAIEEMDFTEITETDINNITARLHNWKSPGIDKIHNFWYKKLFSLHKIMAKNITDIIIGKQKIPDFIATGITYMLPKLQISPLPSQYRPITCLPTIYKILTSAITTKINKHVEHYNIIAEEQKGCRRGHMGCKEQLIIDSTIHKHATSKNRNLHCTYIDYKKAFDSIPHSWLIKILQIYKINSKIINFLHDIMSRWKTTLYLNTNQNTITTREIAIRKGIYQGDSLSPLWFCLALNPLSHLLRDCRAGYRLKHDIQETIVSHLIYMDDIKLYGKTEMEMKKLIDTTAQFSKDINMEFGLDKCRTLHIKRGKIRPGDYAVNDIDIIRAMEQTELYKYLGYKQLRGLDHTEIKNTLTIEFKKRINSLCKTQLTSKHLIKSLNTYAIPILTYSFGIIKWTKTDIEQIERTIRTTLTKHNNLHPKSAIERLTIKREYGGRGLIDLNHLCQKQVGNLKDFFHLKSQTSEIHKAIVKNDINFTPLNLHEDISSQNTRRNDPQIQKLDSWKRKVLHGRHPHDLEQSHINTAASNKWLKIGNLFPETEGFIIAIQDQVVNTKNYRKFIIKDPSISNDKCRKCHVQPETIQHITGGCTTLTQTDYTHRHNQVVNIIHQKLALKHKLIQNTNTPYYKYKPQTVLENDTYKLYFDRAILTDRTIHYNRPDITLKDKLNEITYLIDIAVPNTHNLQKTISEKINKYTELKDEVARIWNQKKVYVIPIVLSTTGVIPNHLLHSLKLLELKETLYITLQKVAILNTCRIVRKFLQIDEHDISPYT

SEQ ID NO: 21734 - protein, 1297 aa, Leptidea sinapis
METRSMKKRKIGPLPGGDRRGTPGAGAGCLSMRTVSGEELNRRAPTGSSENTTAENDRLTDRTTPTEPYSPCTISYTPSIPSSPLSSRYSPTPTLDAAREANAFLLASTKAGKPRVRMKWSKEMNLFIMRTYYYITKLETDLTTYRKQLHELFLQKYPDLNVTEQRIADQRRVIVKNKLLNQETLNQIKEEIKSQLEIENENQFHINISEPTNDVIPCSSTQTIPNTQHNQSLNTFTYNTQSLQTFSYITQTSHNMPTQTEFVTIMMENDIDTVLDHNPGTNTEIEEICYKFKTALTQYSGMDPLVRPKLPKLRYNSHLFQLVNMFNSDILSRFISDDTKLTDIHTIVYCVALVISEELNYKVTEYIRSTRPKDCYKPPWQIRLEKDIEKLRADCGRLTQYINNNRSRKIIKHVKAIFKTGNTHTKHENSNIKPEEFLDTLKQKLALKVHRLKRYKKAQERKNDNTMLSTNEKNFYRNLHKLKTDTVNNPNVPTQEQLETFWSGIWEQQVHHNDKADWIIEEENKWNAIEEMDFTEITETDKNNITARLHNWKSPGIDKIHNFWYKKLFSLHKIMAKNITDIIIGKQKIPDFIATGITYMLPKLQISPLPSQYRPITCLPTIYKILTSAITTKINKHVEHYNIIAEEQKGCRRGHMGCKEQLIIDSTIHKHATSKNRNLHCTYIDYKKAFDSIPHSWLIKILQIYKINPKIINFLHDIMSRWKTTLYLNTNQNTITTREIAIRKGIYQGDSLSPLWFCLALNPLSHLLRDCRAGYRLKHDIQETIVSHLIYMDDIKLYGKTEMEMKKLIDTTAQFSKDINMEFGLDKCRTLHIKRGKIRPGDYAVNDIDIIRAMEQTELYKYLGYKQLRGLDHTEIKNTLTIEFKKRINALCKTQLTSKHLIKSQNTYGIPILTYSFGIIKWTKTDIEQIERTIRTTLTKHNNLHPKSAIERLTIKREYGGRGLIDLNHLCQKQVDILKDFFHLKSQTSEIHKAIVKNDINFTPLNLHEDISSQNTRRNDPQIQKLDSWKRKVLHGRHPHDLEQSHINTAASNKWLKIGNLFPETEGFIIAIQDQVVNTKNYRKFIIKDPSISNDKCRKCHVQPETIQHITGGCTTLTQTDYTHRHNQVVNIIHQKLALKHKLIQNTNTPYYKYKPQTVLENDTYKLYFDRAILTDRTIHYNRPDITLKDKLNEITYLIDIAVPNTHNLQKTISEKINKYTELKDEVARIWNQKKVYVIPIVLSTTGVIPNHLLHSLKLLELKETLYITLQKVAILNTCRIVRKFLQIDEHDISPYT

SEQ ID NO: 21735 - protein, 1182 aa, Timochares trifasciata
MRPATTLAGKTRQRMKWSDEINRELLRTYYIVTNNETDLTAWRTRLHRKLSENIPELCHLSEQRLADQIRVIHRNNRIPAAEREQIRQSLTLLSSHSNYKPSATENIEHEDNLNNTITADQNYVNNNTQVEVRDITQFTPISHASTQTESSNILMTNDIEILESITTTDPSELKLKENLQATLIEYAGTDPTLRPKLPKLKHNYKLNQLTDLFNRKILGYFFSDDSQLTDIHTLIYCSAIVISRELDYKIEEVSAPKFRSEARKPSWQIRIENDIAQLRSDIGRLTQYIKNNNRSEKVVRRVEAIFRNIKIHSVHERNNKKPEEFLDTLKQKLTLKANRLARYKKALKRKNDNKLFNRNEKLFYRLLTSETVSPDNNKSNLDLNQVEQYWAGIWEVGEKHNEDAEWIGEEEKRWGALNEMEFEQITEIDVKYVTSRLNNWKSPGIDKIHNFWYKKFNSLHKILAKNLTEIVIGKQTIPKFIAQGITYMLPKEKYVTQPSQYRPITCLPTIYKILTSVLTHKITAHIENNNILSQEQKGCRRGHMGCKEQLIIDTVVLRHAISNNRNLHCTYIDYKKAFDSVPHSWLLKILKIYKINPILIDFLSNIMNLWQTKLFLGTTITRAIPIKKGIYQGDSLSPLWFCLALNPISFILNRNNAGYRLKSQNDNTSISHLIYMDDIKIYSKNEKEMQNLINSTAQFSKDINMTFGLEKCRTIHIKKGKIQPGDYVVNDEQKILAMETNELYKYLGYYQSKGLDHSKLKVSLTQEYKNRTNLICKSLLTGKSLIKAINTYAIPVLTYSFGILKWTKTDINNIEILTRTSLTKHNYLHPKPAIERLSIKRQNGGRGLIHLTDLWKKQIHNLRSFFHLKSKDSHIHKAIVENDNNYTPLNLKDNIESSRFQCSEPCRIDQWKKKVLHGRHPHDLEQSHIDEVASNKWLTTGSLFPETEGFIVAIQDQVINTRNYRKHIIKDPTLTDDRCRKCHSQPENIQHITGACPNLTQTDYTHRHNQIAYIIHQNLAHKHKLIPNTSYTPYYNYNPSPVLENKTHKMYFDRAILTDKTIHYNRPDITLLDKTNKITYLIDIAVPNTHNIQKTIAEKIHKYTDLKDEISRLWKQEKVYIVPIVLSTTGVIPRYLHHSLNLIGLPNSYIPAQKAAILNTCRIVRKFMQIEDETTETDRKTD

SEQ ID NO: 21736 - protein, 1294 aa, Cycloglypha thrasibulus
MTTQPCAVVVDKSSSSSPLQITSGSSSPTSSVHSIFQSPSSSPHSLQSSISTTLTTQSCDVAQGASAIFPVPTADDITDPTRETQDAQNSRVDQNSQSYSSPITARNILKKMLPTTTLAGKTRQRMKWSDEINRELLRTYYIVTNNETDVTAWRTQLHRKFSQNIPELCHLSEQRLADQIRVIHRNNRIPATEREQIKQSLTLLSSHNIYKPSTTQNTEHENNSHNITTINQINVNNDTQIEITNITPFTPISHVSTQTDSLNILMTNDIEILESITTSEPSELNLKEKLQTALIEYAGTDPTLRPKLPKLKHNYKLNNLTDLFNKKILSYFFSDDSQLIDIHTLIYCSALVISRELEYKIEDASATNPRSEAQKPKWQSRIESDIAQLRSDIGRLTQYIKNNNRSKKVVRAVEAIFQNIKLHSVHERNNKKPEEFLDTLKQKLALKANRLARYKKALKRKNDNKLFNTNEKLFYRHLNSDTEITVKNSTNSLDVNQIEQYWARIWEAGEKHNEGAEWIAEEEKRWEALNEMEFEQITEIDVKYATARLNNWKSPGIDKVHNFWFKKFHSLHKILAKNFTQIVTGKQTIPKFLAQGITYMLPKEKCVTQPSQYRPITCLPTIYKILTSVLTNKITTHIENNNILSEEQKGCRRGHMGCKEQLIIDSVVHRHAISNNRNLHCTYIDYKKAFDSVPHSWLLKILQIYKINPIVIDFLSNIMNLWETKLYLGTAITHTIPIKKGIYQGDSLSPLWFCLALNPISFILNRNEAGYRLKRQKDNTCISHLIYMDDIKLYSKNEKEMVTLINSTAQFSKDINMTFGLEKCRTIHIKKGKIQPGDYVVYDEQKILAMETNELYKYLGYYQSKGLDHNKLKVSLTQKYKNRINLICKSLLSGKSLIKAINTYAIPVLTYSFGILKWTKTDINNIEILTRTSLTKNNYLHPKSAIERMTIKRQNGGRGLIYLTDLWKNQINNLRSFFHQKSINSDIHKAIVENDSNYTPLNLKDNVESHKDEYSESCRTEQWKKKVLHGRHPHDLEQPHIDKVASNKWLTTGSLFPETEGFIIAIQDQVINTRNYRKHIIKDPKVIDDRCRKCHSQPENIQHITGACPNLTQTDYTHRHNQIAYIVHQNLAHKHNLIPNTSYIPYYNYNPSPVLENKTHKMYFDRAILTDKTIHYNRPDITLIDKKNKTTYLIDIAVPNTHNIQKTIADKIHKYTDLKDEISRLWKQEKVYIVPIVLSATGVIPKYLHHSLNLIGLPNSYIPAQKAAILNTCRIVRKFMQIEDETTEFNRQTD

SEQ ID NO: 21737 - protein, 1315 aa, Potamanaxas melicertes
MRLRNRVIPQAGTGANRNGESGPGPSSSGCPTYSGGGNVSHTTTQPSSAVVEKSVSPPQMSSSTSSPTSSTHSLFQTPNTSPLSFRSSSTTSMKSLSCDVAQEAYAISSVPTADDHIDTTREPKNKQNGSVGQNTSSYSSTIPARNILKKMLPATTLAGKTRQRMKWTDEINRELLRTYYIVTNKETDLTAWRTQLHRKFSENTPELGHLSEQRLADQIRVIHRNSRISTAERERIKQSIPLVVSPLSPQSTTTNNTERQPNSNNTQITDITLHAPISHASTQTESINILMTNDIEILEPKMTSEPVAQKLREHLQTALIEYSGTDPALRPRLPKLRHNSKLNQLTDLFNNKILFHFFSDDSQLIDVHTLIYCSALVISQELEYKIKPASAPKPRCGTRKPSWQYRIEKDIAQLRSDIGRLTQYINNNRSKKVISRIETIFQNIKIHSVHEKNNIKPEEFLDTLKQKLALKANRLARYKKALKRKSDNMLFKSNEKLFYRQLTSRTISNNNNNNNSCINVDRVEQFWAGIWEIDETHNDDAKWIAEETKRWEALKEMEFEQITEIDIKYVTGRLNNWKSPGTDKVHNFWYKKFHSLHNILAKNLTEIVIGKQTIPKFFAQGITYMLPKEKFVTQPSQYRPITCLPTIYKILTSVITNKITAHVENNNILAEEQKGCRRGHMGCKEQLVIDSLVHRHSMSNNRNLHCTYIDYKKAFDSVPHSWLLKILQIYKINPTLIEFLNKIMTFWETKLYLGNVVTRAISIKKGIYQGDSLSPLWFCLALNPISFMLNKSEAGYRLKNQNGNTCVSHLIYMDDIKLYGKSEKEMQTLINTTAQFSKDINMTFGLEKCKTIHIKKGKIQPGDYVVNSEEKITAMESHDLYKYLGYYQSKGLDHSKLKTSLIQEYKHRINLICKSLLAGKSLIKALNTYAIPVLTYSFGVLKWTKTDINNIEILTRTSLTKHNYLHPKSAIERMAIKRQNGGRGLIHLTDLWKNQIINLRSFFHQKAKDSHIHKAIVENDSNYTPLNLKNSIEINRDQYSERVRAECWKKKVLHGRHPHDLEQPYIDTMASNKWLTIGSLFPETEGFIVAIQDQVINTRNYRKHIIKDPTVIDDRCRKCHGQAENIQHITGACPNLAQTDYTYRHNQIAYIIHQNLAHKHNLLPNTSYTPYYKYNPSPVLENKTHKIYFDRAILTDKTIHYNRPDITLLDKINKTTYLIDIAVPNTHNVQKTIAEKIHKYTDLKDEVTRIWKQDKVYIVPIVLSTTGVIPKYLHHSLKLIGLPNSYIPAQKAAILNTCRIVRKFMQIDDDTNQTE

SEQ ID NO: 21738 - protein, 1325 aa, Tagiades gana
MLIIIIISPSKPNFTSGLTILRHVGGGHWQHCANHLPMTNEALVIIQAMRLRNRNIIPQAGTSNGESRPEPSSGSPSYSGVGNMSQPLTQSQTAVNGTQNQQKDRVTPLPTSTDSTDVTSLNSTNSTLCATQEANAFQPASTKAGKPRVRMKWSPEVNLFIMRTYYRVTKLETDLTIYRKVLYEHFKRQYPETNVTEQRVSDQMRAILRNKMIPDKILNEIKQEVKSELQQIDQSHKAHSSNILQPEPSQLLTLHTSNPTNTLPIPQPSLAPHTIPIYNTQTQTTNSSQFSLHACTQTETTTILIANDIEILKPVKLSNSEEKRIMNNLQSILIKYSGIDPTLRPKLPKLRYSVKLNQLVELFNTEILTQFISDDCQLTDVHTLIYCSALIISQELGYKVGGIRQTQPICEKPKPEWQVRLEKDVIKLRSDIGRLTQYINNNRSKKILNVVEKIFKNTKIHSSHENNNRKPEQFLDTLKQKLALKSNRLARYNKALKRKNENKLFNTNEKCFYRNLTVDSDCTIPKQPELPDKKHLEQFWAGIWEVAEQHNEQASWIEEEENRWAAIEGMKLEQITEIDIAYVTSRINNWKSPGIDKIHNFWYKKFHFLHKSIAKNFTQIIFGQQNTPQFIAQGITYMLPKGKYTTQPSLYRPITCLPTIYKILTSVITHKITTHIEENNILSEEQKGCRRGHMGCKEQLIIDSLIHRHAKSNKKNLHCTYIDYKKAFDSIPHSWLLRILKVYKINPILIEFLKNIMNLWKTKLNLNQITTREIAIKKGLYQGDSLSPLWFCLALNPISHMLHQCKAGYHLKHVNGNYNFSHLIYMDDIKLYAGSQRDMKSLIDTTVKFSKDINMQLGLDKCKAIHIVKGKLKPGDYPISDKDKITAMDTDELYKYLGYNQSKGLDHTKLKKTLLLEYKRRVKSICKSQLNGKNLIKAINTYAIPVLTYSFGIIKWTKTDINNIEIGTRTSLTKHNYLHPKSAIERMTLKRQNGGRGLINVHQLWKNQIINLRAFFYQKASNSDIHKTIVHNDYNYTPLNLADDTEINKDDNSEQARTESWKKKVLHGRHPHDLEQTHIDAIASNKWLTSGTLFPETEGFMVAIQDQVINTRNYRKHIIKDPTLRDDRCRKCHSHPENIQHITGACPNLTQTDYTHRHNQIANIIHQNLAHKHHLIPNTYTPYYKYKPNPVLENTTHKMYFDRAILTDKTIHYNRPDITLLDKKNKTTYLIDVAIPNTHNLQKTIAEKVHKYTDLKDEVTRIWKQQKVYIVPIVLSTTGVIPKYLHHSLKLIHLHKLTYIQMQKAAILNTCRLVRKFLQHNDEQE

SEQ ID NO: 21739 - protein, 1315 aa, Butleria elwesi
MRLRSRQLPQAGTREGESRPEPPGSGCPSYSGGGTASHTTQSQTVGVDKSPSHTSFPSSPISSTHSLFQSPNSSPHSYENPSTSRSTTISPMSFNVAQEPSANTLVPINSVNSALCATQGANAFQPVSTKAGKPRVRLKWSNDVNIFIMRTYYRVTKLETDLTIYRKLLHEHFTREYPDANVTEQRVSDQMRVILRNKMIPDKVLSEIKEEIKLELQQTDHVATEPMNISSTNGTNTYTVNILPEQNSYSQPQPNNNTQFTPNIHVSTQAETTSILMTNDNTNDIETLQIPQPSPLSDSIETKVKTNLQSSLIEFADTDPTLRPKLPRLKHSAKLNQIIELFNTKILDHFISSDSKLTDIHTLIYCSAVVISRELGYKIEETYSSPRKHKAQKQPWQTRLEENITQLRADIGRLTQYIHNNRSKKIVNKVKVIFRNAKIHSTHEGDNKTPQEYLDTLKQKLALKVNRLARYKKALKRKNDNILFKSNEKIFYRKLNTDTHTSITQNREVPDKKDLEQFWAGIWEIEEQHNTKATWIEKEENKWKAVEEMNLALIEESDIKNITLRLNNWKSPGIDKIHNFWYKKFHSLHKILAKNFTEIIFGQQNTPHFITHGITYMIPKGKYTIQPSHYRPITCLPTIYKILTSVITQKITVHIEENNILSEEQKGCRRGHMGCKEQLVIDSLIHRHATAKKRNLHCTYIDYKKAFDSIPHSWLIHILEIYKISPVIIEFLKNIMKLWKTTLQLNNITTREINIRKGIYQGDSLSPLWFCLALNPISNMLREHKAGYHLKHENGDTRVSHLIYMDDIKLYARTEKEMKTLIDTTVKFSKDINMQFGLDKCKTIHIIKGKVRPGDYAVSNEEKITAMEPNDVYKYLGYHQAKGLDHTKLKTSLIQEYKRRVKSICKTQLAGKSLIKAINTYAIPILTYSFGIIKWTKTDINNIEITTRTLLTTYNYLHPKSAIERMTLKRHTGGRGLINIDQLWKNQICNLRSFFYKKTTNSNIHKAIVHNDTNYTPLNLAENTEVNMDSNSEQARTEQWKKKVLHGRHPHDLEQLHIDTTASNKWLTSGSLFPETEGFMIAIQDQVINTRNYRKHIVRDPTLKDDRCRKCHSHPENIQHITGACPYLAQTDYTHRHNQIANIIHQSLARKHHLIPNTHTPYYKYKPNPVLNNNTHKMYFDRAILTDRTIHYNRPDIMLQDKRNKTTYLIDIAVPNTHNLQKTIAEKIHKYTDLKEEVIRIWKQEKVYIVPIVLSTTGVIPKHLHHSLKLLNLPNFTYTQIQKAAILNTCRIVRKFLQIDDETHSQTYLPRTYTT

SEQ ID NO: 21740 - protein, 1065 aa, Camptopleura auxo
MNSFNNENQIEIIGTQFTPISHASTQTESSNILMTNDIEILESKTTTEPLELKLKENLQTTLIEYAGTDPTFRPKLPKLKHNYKLNQLTELFNGKILSHFFSDDSQLTDIHTLIYCSALVISRELEYKILDASAPRSKTEPRKPNWQSRIENDIAQLRSDIGRLTQYIKNNNRSKKVVETVETIFRNITVHSVHEKNNKKPEEFLDTLKQKLALKANRLARYKKALKRKNDNNLFNRNEKLFYRQLTSETANPVKNNKNLDINQVEQFWAGIWGVGEKHNEEAEWIAEEEKRWESLKEMEFDKITEIDVKYVTARLNNWKSPGIDKVHNFWYKKFHSLHKILAKNLTQIVTGKQTIPNFIAQGITYMLPKEKCVTQPSQYRPITCLPTIYKILTSVITHKITAHIETNNILSEEQKGCRRGHMGCKEQLIIDSVVHRHAMLNNRNLHCTYIDYKKAFDSIPHSWLLKILQIYKINPVLIHFLSNIMNFWETKLYLGTFITRAIPIKNGIYQGDSLSPLWFCLALNPISFILNKNNAGYRLKYENDSTSISHLIYMDDIKLYSKNEKEMQTLINSTTQFSKDINMTFGLEKCRTIHLKKGKVQPGDYVVNEQKILAMETHELYKYLGYFQSKGLDHSKLKESLTQEFKSRINLICKSLLTGKSLIKAINTYAIPVLTYSFGILKWTKTDINNIEILTRTSLTKHNYLHPKSAIERMSIKRQNGGRGLIYVTDLWKNQINNLRTFFYRKSQDSYIHKAIVENDSNYTPLNLKDNIESNRDQCSESNRIEQWKKKVLHGRHPHDLDQPHIDKIASNKWLTVGSLFPETEGFIVAIQDQVINTRNYRKHIIKDPTLTDDKCRKCHTQPENIQHITGACPNLTQTDYTHRHNQIAYIIHQNLALKHKLIPNTSYTPYYNYSPNPVLENMTHKLYFDRAILTDKTIHYNRPDITLLDKLNKTTYLIDIAVPNTHNIQKTIADKIHKYTDLKDEISRLWKQNKVYIVPIVLSTTGVIPKYLHHSLNLIGLPNSYIPAQKAAILNTCRIVRKFMQIEDETTETDRQTDTYAHT

SEQ ID NO: 21741 - protein, 1317 aa, Pyrgus malvae
MRLRSRQLPQAGTREGESRPGPTGLGCPSYSGVGNVSRMSAQPCAVAVNEEPQHPSSHSSSPLSSTHSLFQSPNSSPHSSVYHPSATSSSTTSPLSRDVVQEAFAISPVPTVDNTYPTRVNKNNVSNRVDHHTPPSTHITKSILQDMLAATTKAGKNRQRMKWSDEVNRELLRCYYVVTNKETNLTAWRPQLHQMFVSEFPELSHLSEQRLADQIRVIHKNNRISTLERENIKQSVNVLLSTSIGPMEQNNTNNSVETHITSNIQVSLNSFTCTQTETTAIVMANNIEVPFITLPDTIEEKIKEALQTAIIEYAGTDPTLRLKLPKLKCSTKLYQLTDLFNSKILRHFISDDSQLIDLHTLIYCSALVISRELGYKSGTNSQPQRSRLGKKPEWQIRIEKDITLLRSDIGRLTQYIKNNNRSRKVVNRIEIIFRNTKVHSTHENNNRKPEEYLDTLKQKLALKANRLARYKKALKRKNDNKLFNTNEKIFYRTLFSNTDTEVRKQKDIPQTKDLEDFWAGIWETNEKHNEEAEWIAEEENKWEALEEMEFEEVTETDVRYTTMRLHNWKASGPDKVHNFWFKKFHSLHKLLAKNFTQIIKGQQVIPQFLAQGITYMLPKQEYTTQPAHYRPITCLPTIYKILTAIITHKITIHIETNNILSEEQKGCRRGHRGCKEQLVIDSLIHRHATTHNRNLNCTYIDYKKAFDSVPHSWLLRILEIYKINPSIIEFLKNIMKIWKTKLQLDRIITREITIKQGIYQGDSLSTLWFCLALNPLSRMLRKNKVGYSFNQTVKSGQVRSEHQNNSTHISHLIYMDDIKLYTRTEKEMQSLINTTVQFSKDINMNFGLDKCRTIHINKGKIRPGDYAVSQEEKIIAMEPSELYKYLGFHQSKGLDHIKLKTSLIQEYKKRIKILCKSLLTGKNLIKAINTYAIPILTYSFGIIKWTKTDINKIEICTRTSLTNNNYLHPKSAIERMILRRQNGGRGLININNLWRNQIANLRQFFFEKASNSDIHASVVKHDFNYTPLNLAVDTEINRNNDSDPATIEKWKQKALHGRHPHDLEQPHIDSTASNKWLTKGYLFPETEGFIIAIQDQVINTRNYRKHIIKDPSVKDDRCRKCHIYTENIQHITGACPNLAQTDYTHRHNQIANIIHQNLAIKHHLIEDNHIPYYKYTPSPVLENKFYKMYYDRAILTDKTIHYNRPDITLQDKKNKITYLIDIAVPNTHNLQKTIAEKINKYMDLKDEVARMWKQDKVYIVPIVLSTTGIIPKYLHHSLKLIDLPYSYIPAQKAAILNTCRIVRKFLQIDDDFSDINR

SEQ ID NO: 21742 - protein, 1337 aa, Heliopetes ericetorum
MIIKTTNTISVYPSEQTAPSTQYAMRLRSRQIPQAGTQEGESRPGPSGLGCPSYSGVGNVSRMTAQPCAVAINEEPEHLSSHSSSPLSSTHSLFRSPSSSPNASVYHPSSTSSSTTSPLSRDVVQEAYAISPVPTVDSTNPTRTNENNTVNCVDHHITPTTLTRCILQDMHPATTKAGKNRQRMKWSNEVNRELLRCYYVVTNKETNLTAWRPQLHQKFIARFPDLSHLSEQRLADQIRVIHKNNRISASERENLKQAIDLLLPTSNNPECHTQNKCSTNDSQTYSHIQTHIPNNSQVSLNSLAFTQIETTARLLVNDIEVPSITLPDAIEEKLKEDIQRALIEYTGTDPSLRPKLPKLKCNARLYQLIDLFNTRVLNHFIADESQLIDLHTLIYCSALVISRELGYKIGTNFRPQQSREEKKPEWQIRIEKDITLLRSDIGRLTQYIQNNNRSRKIVNRIEIILKNAAVHSTHENNNRKPEEYLDTLKQKLALKANRLARYKKALKRKNDNNLFQNNEKIFYRSLFSNTDTEVRKQKEIPEAKDLEDFWAGIWETSEKHNEQAKWIVDEENRWNKLHEMEFEEITEIDVRYTTTRLNSWKASGTDKVHNFWFKKFHSLHKLLAKNFTEIIKGQQAIPEFIAQGITYMLPKQEYTTQPANYRPITCLPTIYKILTSVIAQKITTHIETNNILSEEQKGCRRGHRGCKEQLVIDSLIHRHATTNNRNLNCTYIDYKKAFDSVPHSWLLKILKIYKINPSIIEFLKNMMKLWKTKLQLDKTVTREITINKGIYQGDSLSPLWFCLALNPLSRMLREKNIGYPLKHHNNSTNISHLIYIDDIKLYSRTEKDMQSLINTTVQFSKDINMNFGLDKCRTIHINKGKIRPGDYAVSQEEKIKAMEPNELYKYLGFYQSKVLDHSKLKTTLTQVYKNRIKILCKSLLTGKNLIKAINTYAIPILTYSFGIIKWTKTDINKIEICTRTSLTKYNYLHPKSAIERMTLRRQNGGRGLININSLWRNQIGNLRQFFLEKASNSDIHASIVQNDLNYTPLNLSVVTEINRHNDSEQVKIEKWKQKALHGRHPHDLEQPHIDSTASNKWLTKGYLFPETEGFIMAIQDQIINTRNYRKHIIKDPSIKDDRCRKCHIHTENIQHITGACPNLTQTDYTHRHNQIANIIHQNLAIKHSLIQHNHTPYYKYTPSSVLENKFYKMYYDRAILTDKTIHYNRPDITFQDKKKKITYLIDIAVPNTHNLQKTIAEKINKYMDLKDEVARMWKQEKVYIVPIVISTTGVIPKYIHHSLKLIDLPYSYIPAQKAAILNTCRIVRKFLQIDDLIETNR

SEQ ID NO: 21743 - protein, 1330 aa, Doberes anticus
MRLRSRQIPQAGTREGESRPEPLGSGSPSYSGGGNVSHMTAQACTVAVNKSQSQNISDSSSPTSSTHNLFQSPRSSLHSFEFQQSSSRSTTITPLSCDVAQEAHAISPVPIDDINNTTLAPQIILHNRVDHNTHPTLSSNITSKSVLKDMLPATTLAGKSRQRMKWTDQINRELLRCYYLVTENETNLTAWRPLLHQKFSESVSELSHLSEQRLADQIRVIHRNNRIPASEREHIKQSVSLLISTSNRLNEHNTTSNSEYYSTINTQPITSNHQPNIDTQTNTINSLQFTLNAHAFTQTETTNIFVENDIEILQLTPPLDTTEEKLKEALQTALIEYGGTDPILRPTLPKLKHTTKLNHFTDLFNKKILNDFYSEDSQLNDLHTLIYCSALVISRELGYKIGDACRMQRNSDTRKPDWQNRIETDILHLRSDIGRLTQYINNNRSRKVVNRIETIFRNVKVHSVHENNNKTPEEYLDTLKQKLALKAKRLSRYKKALKRKSDNKLFSTNEKLFYRKLNTDTDRLAPKPNEIPDVKDLEQFWAGIWEMGEKHNEKATWIDDEELRWKNLEQMKFEKITDIDIQKVTARLHNWKSPGIDKVHNFWYKKLHALHKIIAINFTQIILGQQNTPQFIAQGITYMLPKGKYTTAPSQYRPITCLPTIYKILTSTIANKITVHIEENNILSEEQKGCRRGHMGCKEQLIIDSLVHRHAIANKRNLHCTYIDYKKAFDSIPHSWLLRILQIYKINPLLIEFLKKTMNLWKTKLQLGKITTREINIKNGIFQGDSLSPMWFCLALNPISHMLHKQKSGYSLKHHNNNTYISHLIYMDDIKLYTKTEKEMKTLIDTTVEFSRDINMNFGLEKCKTIHIIKGKIRPGDYAVNEDGMITAMEPNDLYKYLGYYQSKGLDHTKLKTSLIQEYKHRVNIICKSLLTSKSLIKAINTYAIPILTYSFGIVKWTKTDINNIEINTRTSLTKHNYLHPKSAIERMTLKRQNGGRGLINIYNLWKNQIVNLRQFFYQKSNNSDIHKAIVKNDLKFTPLNLSEETEQNRDDSEHARTEQWKRKVLHGRHPHDLEQQHIDTTASNKWLTVGGLFPETEGFMIAIQDQVINTRNYRKHIIKDPTITDDRCRKCHIHPENIQHITGACPNLTQTDYTHRHNQIAHIIHQNLALKHKLIPNTYTPYYKYSPSPVLENITHKMYFDRAILTDKTVHYNRPDITLQDKKNKITYLIDIAVPNTHNLQKTVAEKIHKYMDLKDEVTRIWKQEKVYIVPIVLSTTGIIPKYMHHSLKLLDLPNSYIPAQKAAILNTCRIVRKFMQIDDDNNEIDRRT

SEQ ID NO: 21744 - protein, 1320 aa, Pyrgus malvae
MRLRSRQIPQAGTREGESRPRPSGSGCPSYSGEGNVSHMIAQPSAVAVNIESSHITSSSPATPTQSLLQSRRSSSCSSIYCPSSSSSFTSSHLSCDVAQAAYADNLVPTAGITIPTCDPLNNVNNHVGHHTPSLSLNTRNKSILQDMLPATTLAGKTRQRMKWSDQVNRELLRCYYLVTNNETNLSAWRPQLKQMFSESIPELCHLSEQRLADQIRVIHKNNRVPASEREAIKQSISSLLISPSSILYEEIDTRNIPLDSQRTISNNTPDNNIRLSNTDTPTNITLLTHTNTQHRLNAHASTQTVPTTILLENDIEILQPIPLPDATEQKLKGALQTALIEYGGSNPALRPRLPKLKYNTRLFQIIHLIDIHTLIYCSALVISTELGYRIGETSLPQRNIDVKKPKWQIRLEKDIAQLRSDIGRLTQYINNNRSQKVVSRVEIIFRNTKVHSTHESYNKKPEEYLDTLKQKLALKANRLARYKKALKRKEDNRLFNTNEKLFYRKLTNNTDEQASKQKEIPDVKDLEDFWAGIWETDEKHNEDAQWITNEENRWKATEEMKFEGITEFDIQNITGRLSNWKSPGIDKVHNFWYKKLNSLHRPLAKNLTQIITGQQNTPHFLGQGITYMLPKEKYTTQPSQYRPITCLPTLYKILTSVIAYKITAHLESNNILAEEQKGCRRGHRGCKEQLIIDSLIHRHATSNKRNLHCTFIDYKKAFDSIPHSWLIRTLEIYRINSSLIEFLKKIMNLWKTKIHLDQITTREIAIRSGIYQGDSLSPLWFCLALNPISNLLREQRAGYCLRNHNENTYISHLIYMDDIKLYSRTEKEMKSLIDTTLEFSKDIRMNFGLDKCKTIHITKGRIQPGDYAVGNVDKIKAMEPDEVYKYLGFYQSKGLDHTTLKSNLTHQYKQRIKLICRTLITGKSLIKAINTYAIPILSYSFGIVKWTKTDINSIEICTRTSLTKHNCLHPKSAIERMSIKRENGGRGLINIVNLWINQIQNLRQFFYEKSADSAIHKAVVLNDTNYTPLNLSIVTNPSRDIADSEHARIEQWKKKVLHGRHPHDLEQLHVDSTASNKWLTKGSLFPETEGFIIAIQDQVINTRNFRKHVVKDPSVTNDKCRKCHSHPENIQHITGACPNLAQTDYTHRHNQIVNIIHQNLAIKHHLIPNIYTPYYKYTPNPVLENNTHKMYFDRAILTDKTIHYNRPDITLKDKKHKITYLIDIAVPNTHNLQKTIAEKIHKYTDLKDEITRVWKQEKVYIVPIVLSTTGVIPKSLHHSLKLIDLPYSYIPAQKAAILNTCRIVRKFLQIEEDSNDPYKM

SEQ ID NO: 21745 - protein, 893 aa, Pyrgus malvae
MTQYMKNNRSRKVVNRVEIIFKNMKTHSTHENNNRCPEEYLDTLKQKLALKANRLARYKKALKRKSDNKLFSTNEKLFYRKLSNGTENLITEQKEIPDVKDLEDFWAGIWEKNEKHNETAEWIAEEENRWRELEEMKFEEVTETDINYITGKLNNWKSPGIDKIHNFWFKKFRSLHQILAKNITQIIKGKQRTPQFIAQGITYMLPKSKHTTDPSQYRPITCLPTIYKIITSVITNKINIHVENNNIISEEQKGCRRGHRGCKEQLIIDSLIHKHAMTHKRNLHCTYIDYKKAFDSIPHSWLLRVMEIYKINPYIVEFLKNTMHLWKTRLILDEMITREMSIKKGIYQGDSLSPLWFCLALNPISHILHKHKAGYHLKHESRDIYITHLIYMDDIKLYTKTDKEMQTLIKITSEFSQDINMKFGLDKCKTIHIVKGKLRPGDYTVNNGDIITAMEPNEVYKYLGFYQSIGIDHTKLKTTLVQEYKRRIRIICNTLITAKSLIKAINTFAIPILTYSFGIIKWTKTDINRIEIATRTSLTKYNYLHPKSAIERLTLKRENGGRGLIKIDNLWKKQISGLRQFFHQKANESDIHKVIVNNDFNYTPLNLSDNIELPNLDNYLQQVEQWKKKVLHGRHPHDLDQSHIDSVASNKWLTKGYLFPETEGFMVAIQDQVINTRNYRKHIIKDPTVLDDRCRKCHSHPENIQHITGACPNLTQSDYTHRHNQIANIIHQNLALKHHLIPSNKHTPYYKYIPSPVLENKTHRMYFDRAILTDKTIHHNRPDITLQDKIKKTTYLIDVAVPNTHNLQKTISEKIQKYMDLKDEITRIWKQEKVYIVPVVLSTTGVIPKYLHHSLRLIDLPYSYIPAQKAAILNTCRIVRKFLQIEDDTNNTQ

SEQ ID NO: 21746 - protein, 1335 aa, Pyrgus malvae
MRLRSRQLPQAGTRKGESRPGPSGSGCPSYSGVGNVSRMTAQHCAVAINEEPQHPFSQSSSPLSSTHSLFQSPSSSPHSFQYQPSTSTSSTASPMSCDVAQEAFATYPVPTIDIFHSTSTQSSNVNDRVENNSLSITHDARVKGILQDMLPPTTLAGKSRQRMKWSDQINRELLRCYYIVTQNETNLSAWRPQLKQKFAEHIPELSHLSEQRLADQIRVIHRNNRITKEDREHIKNSVSSSILFSNHNDHNISNNNHVNSIEDPDTPLNDINATQTTTNNQSIMNTLTRATNRTPITQNSHAFTQTDTTTILLENDIEILQPTQLSDVAEEKLKEDLQTVLIEYAGTDPTLRPKLPKLKYSTQLFKLINLFDTKILSNFYSNESQLTDIHTLIYCTALVISRQLGYSIGESARPHHNRDIKKPRWQIRIEKDIVQLRSDIGRMTQYMKNNRSRKVVNRVEIIFKNMKTHSTHENNNRCPEEYLDTLKQKLALKANRLARYKKALKRKSDNKLFSTNEKLFYTKLSNGTENLITEQKEIPDVKDLEDFWAGIWEKNEKHNETAEWIAEEENRWRELEEMKFEEVTEIDINYITGKLNNWKSPGIDKIHNFWFKKFRSLHQILAKNITQIIKGKQRTPQFIAQGITYMLPKSKHTTDPSQYRPITCLPTIYKIITSVITNKINIHVENNNIISEEQKGCRRGHRGCKEQLIIDSLIHKHAMTHKRNLHCTYIDYKKAFDSIPHSWLLRVMEIYKINPYIVEFLKNTMHLWKTRLILDEMITREMSIKKGIYQGDSLSPLWFCLALNPISHILHKHKAGYHLKHECRDIYITHLIYMDDIKLYTKTDKEMQTLIKITSEFSQDINMKFGLDKCKTIHIVKGKLRPGDYTVNNGDIITAMEPNEVYKYLGFYQSIGIDHTKLKTTLVQEYKRRIRIICNTLITAKSLIKAINTFAIPILTYSFGIIKWTKTDINRIEIATRTSLTKYNYLHPKSAIERLTLKRENGGRGLIKIDNLWKKQISGLRQFFHQKANESDIHKVIVNNDFNYTPLNLSDNIELPNLDNYLQQVEQWKKKVLHGRHPHDLDQSHIDSVASNKWLTKGYLFPETEGFMVAIQDQVINTRNYRKHIIKDPTVLDDRCRKCHSHPENIQHITGACPNLTQSDYTHRHNQIANIIHQNLALKHHLIPSNKHTPYYKYIPSPVLENKTHRMYFDRAILTDKTIHHNRPDITLQDKIKKTTYLIDVAVPNTHNLQKTISEKIQKYMDLKDEITRIWKQEKVYIVPVVLSTTGVIPKYLHHSLRLIDLPYSYIPAQKAAILNTCRIVRKFLQIEDDTNNTQ

SEQ ID NO: 21747 - protein, 1335 aa, Pyrgus malvae
MRLRSRQLPQAGTRKGESRPGPSGSGCPSYSGVGNVSRMTAQHCAVAINEEPQHPFSQSSSPLSSTHSLFQSPSSSPHSFQYQPSTSTSSTASPMSCDVAQEALATYPVPTIDIFNSTSTQSSNVNDRVENNSLSITHDARVKGILQDMLPPTTLAGKSRQRMKWSDQINRELLRCYYIVTQNETNLSAWRPQLKQKFAEHIPELSHLSEQRLADQIRVIHRNNRITKEDREHIKNSVSSSILFSNHNDHNISNNNHVNSIEDTDTPLNDIHATQTTTNNQSIMNTLTRATNRTPITQNSHAFTQTDTTTILLENDIEILQPTQLSDVAEEKLKEDLQIVLIEYAGTDPTLRPKLPKLKYSTQLFKLINLFDTKILSNFYSNESQLTDIHTLIYCTALVISRQLGYSIGESARPQHNRDIKKPRWQIRIEKDIVQLRSDIGRMTQYMKNNRSRKVVNRVEIIFKNMKTHSTHENNNRCPEEYLDTLKQKLALKANRLARYKKALKRKSDNKLFSTNEKLFYRKLSNGTENLITEQKEIPDVKDLEDFWAGIWEKNEKHNETAEWIAEEENRWRELEEMKFEEVTETDINYITGKLNNWKSPGIDKIHIFWFKKFRSLHQILAKNITQIIKGKQRTPQFIAQGITYMLPKSKHTTDPSQYRPITCLPTIYKIITSVITNKINIHVENNNIISEEQKGCRRGHRGCKEQLIIDSLIHKHATTHKRNLHCTYIDYKKAFDSIPHSWLLRVMEIYKINPYIVEFLKNTMHLWKTRLILDEMITREMSIKKGIYQGDSLSPLWFCLALNPISHILHKHKAGYHLKHESRDIYITHLIYMDDIKLYTKTDKEMQTLIKITSEFSQDINMKFGLDKCKTIHIVKGKLRPGDYTVNNGDIITAMEPNEVYKYLGFYQSIGIDHTKLKTTLVQEYKRRIRIICNTLITAKSLIKAINTFAIPILTYSFGIIKWTKTDINRIEIATRTSLTKYNYLHPKSAIERLTLKRENGGRGLIKIDNLWKKQISGLRQFFHQKANESDIHKVIVNNDFNYTPLNLSDNIELPNLDNYLQQVEQWKKKVLHGRHPHDLDQSHIDSVASNKWLTKGYLFPETEGFMVAIQDQVINTRNYRKHIIKDPTVLDDRCRKCHSHPENIQHITGACPNLTQSDYTHRHNQIANIIHQNLALKHHLIPSNKHTPYYKYIPSPVLENKTHRMYFDRAILTDKTIHHNRPDITLQDKIKKTTYLIDVAVPNTHNLQKTISEKIQKYMDLKDEITRIWKQEKVYIVPVVLSTTGVIPKYLHHSLRLIDLPYSYIPAQKAAILNTCRIVRKFLQIEDDTNNTQ

SEQ ID NO: 21748 - protein, 1326 aa, Nerula fibrena
MRLRSRQLPQAGTREGQSRPGPSGPGCPTYSGGGNVSHMAAQPSAVAVNNKPSRTISNTSSPTTSLNSIFQSPDSSPRSYEFQPSSVSSTSTSPMSCDVAQEARALSPMPITDISNPTCTLQNTFSNYVGHITHSSPLNPQTRSFLQDMLPATTLAGKSRQRMKWSDQINRELLRCYYIVTHNETNLTAWRTQLQQKFAERIPELSHLSAQRLSDQIRAIHKNNRIAPSEREQIKQSLLSHANTPNNNTLTSNVIHHTPIHSTIPDNYEMNTQIHIQNYTQFTSNSNAFTQTEATTILVENDIEILQYIKPLDIAAEEKLKQDLQTALIKYAGTDPTLRPKLPKLNYSKKLFQLIDLFNNKILSYFVSEDSQLIDIHTLIYCSALVISLEVGYKIGENTRPQVSNEIRQPKWQIRIEKDIAQLRSDIGRLTQYLKNNRSRKVVNRVEIIFRNTKVHSSHENYNRKPEEYLDTLKQKLALKAKRLARYKKATKRKNDNKLFNRNEKLFYSKLKNIEHTEPKENDIPDVKDLEKFWSEIWETDEKHNEDATWIAEEQNRWEMLEEMQFEEITEIELQQVTGRLHNWKSPGIDKIHNFWFKKFHTLHKSIAKNFTQIILGHQNTPKFIAQGITYMIPKNIHTSRPSQYRPITCLPTIYKILTSIITLRITVHVEKNNILAEEQKGCRRGHMGCKEQLVIDSLIHRHAATNKRNLHCTYIDYKKAFDSIPHSWLLRILQIYKINHNLIKFLKNTMYYWKTRLQLNNITTREIAIKKGIYQGDSLSPMWFCLALNPISHLLQQRNAGYRLQHLDSNINISHLIYMDDIKLYSKSEDEMRGLIDTTVKFSEDINMKFGLEKCKTIHIIKGKIRPGDMEVNEKDKITAMEPNEFYKYLGYHQSKGLDHSKLKIALLEEYKDRVKLICKSLLTSKSLIKAINTYAVPILTYSFGIIKWSKTDINNIEICTRTSLTKYNYLHPKSAIERMTIKRQNGGRGLINIATLWKNQIVNLRLFFYQKANNSSIHKAVVQNDKNYTPLNLCENSEQNREDDLEQIRTERWKMKTLHGRHPHDLDESHIDASASNKWLTKGSLFPETEGFMLAIQDQVINTRNYRKHIIKDPTITDDRCRKCHRHPENIQHITGACPNLTQTDYTHRHNQVANIIHQNLARKHHLIPNTYTPFYKYIPTPVLENNTHKMYFDRAILTDKTIHYNRPDITLQDKKNKTTYLIDIAIPNTHNLQKTIAEKIHKYTDLKDEITKMWKQEKVYIVPIVLSTTGVIPKYLHHSLKLIDLPYSYIPAQKAAILNTCHIVRRFLQIDEDTPETDHNTQI

SEQ ID NO: 21749 - protein, 1325 aa, Erynnis tages
MRLRNRDIPQAGTGANRTGESGPGPSSPGCPTYSGGGNVSHITAQTSSAAADPSSPSYITSDPLSPTSSTSLFQTPNSSPHSYQYQPSSSRSSTTSPLSIDVAQKSLVSTSVPTTDSTIHTRPNINESSMEIRVNHNTQSSSSHNPSNGVLKDMFPATTQAGKDRKRMKWTDEINMELLRCYYLVTHNETNLTAWRTLLHQKFIQYIPELGHLSEQRLSDQIRVIHRNNRIPAIERERLKQSVALILTSSDCQDDDSTPSINDQLINNDTQTHITHLSLTSNSQDMFTQTESSHILITNDIEVLQTNSQPDNTNLKIVENLHTALTKFAGTDPTLRPKLPKLKYSNRLNQLITIFNRDILKNFISDNSQLIDIHTLIYCSALVITQELGYTILGDIRSHRNNEIRKPHWQNRLEEDIVQLRSDIGKLTQYIKNNNRSKKVVDRVETIFRNTKIHSTHGNINRKPEEFLDTLKQKLALKAKRLARYKKALKRKDDNRLFNNNEKLFYKKLRSGTVSSVADQYEVPEVKDLEQFWAGIWEVEKEHNEEAAWIKEEESRWSMLEEMEFEEITEKDVSIVTARLNNWKSPGVDKVHNFWYKKFQYLHKILAKNLTQIILGHQNTPQFIAQGITFMLPKGKHTTEPSQYRPITCLPTLYKILTSLITHKITTHVEKNKILSEEQKGCRRGHMGCKEQLIIDSLVHRHATTNKRNLHCTYIDYKKAFDSIPHSWLLRILQIYKINPVIITFLKNTMEQWKTKLHLHNITTREICIKKGIYQGDSLSPLWFCLALNPISHMLHKLEVGYRLKHENNETDVSHLIYMDDIKLYSRTEKEMHKLIETTAMFSKDINMEFGLDKCKTIHIKKGKIQPGDYVVNEEERITAMEPNEVYKYLGYYQSKGIDHSKLKASLKQEYISRINTICKSLLTGKSLIKAINTYAIPILTYSFGIIKWTKTDINNIAISTRTTLTKHNFLHPKSAIERMSLKRKDGGRGLINVAKLWKDQIINLRTFFHQKANSSNIHKAVVENDINLTPLNLSDKTELIRDGDLEQTPIEQWKAKTLHGRHPYDLEQSHVDAAASNKWLTRGSLFPETEGFMVAIQDQVINTKNYRKHIIKDPTLTDDRCRKCHTHPENIQHITGACPNLAATDYTHRHNQIVNIIHQNLAIKHHLIPNTHTPYYNYQPSPVLENKSHKIFYDRAILTDKTTHHNRPDIILVDKKNKTTYLIDIAVPNTHNLQKTIAEKIHKYTDLKDEVIRLFNQKKVYIVPIVLSTTGVIPKYLHHSLKLIDLPYAYVTAQKAAILNTCRIVRKFLQIDYDNNETIRRTDI

SEQ ID NO: 21750 - protein, 1329 aa, Cycloglypha thrasibulus
MRLRNRVIPQAGTSPTSEEESGPGPSGLGCPTYSGGGNVSHMTAQTSSVVVNESPSSHVITNPSSPTSSTHSLFQSPSSSPYSFQFQQSSSRSSTTTLLSVDVAQEALVLNSVPTSGISNLTRLNIDENNMHVRVNHDTQSYSSTIPVTGVLKDMLPATTQAGKYRKRMKWTDEINLELLRCYYIVTHNESNLTAWRTLLHRKFTEIVPELSHLSEQRLADQIRVIHKNNRISPIERERLKQSITLTTSSTHNHDEYTTHNTPTLVNDHCLGTDTQIHTTHRTSPASNTHTYTQTETTHILITNDIEILQPTTQPEITYPKIIEDLRTTLIKFAGTDPTLRPKLPKLKYSKKLNQLINIFNNNVLSNFISDDSQLTDVHTLVYCSAFLISQELGFTIGENIRPNHCNGIRVPSWQGRIEEDIKQLRSDIGKLTQYIKNNRSKKVVDRVEAIFRNMKIHSTHEKSNKKPEEFLDTLKQKLTLKAKRLARYKKALKRKNDNSQFKNNEKFFYNKLRSNTVRPPTDEIEIPDVKDLELFWAGIWEVEKHHNEEASWIKEEENRWSMLDEMKFEEITERDVNIVTSRLNNWKSPGIDRIHNFWYKKLHCLHKIIAKNLTQIIVGHQTPPKFIAQGSTFMLPKEKYSNQPSQYRPITCLPTIYKILTSLITHKITTHIERNKILSEEQKGCRRGHMGCKEQLVIDSLIHKHANSNKRNLHCTYIDYKKAFDSIPHSWLLRVLEIYKINSVIISFLRNIMEHWKTKVHLDKITTREISIKTGIYQGDSLSPLWFCLALNPISHMLNELRVGYCFKHENNETRMSHLIYMDDIKLYSRSEKEMQHLIDTTAKFSKDINMTFGLDKCKTINILKGKIQPGNFTVSDKEVITAMEPNELYKYLGFCQSKGLDHCKLKANLKRAYINRVNAICKSLLTGKSIIKAINTYAIPVLTYSFGIIKWSKTDINGITISTRTLLTKHNFLHPKSAIERMSLKRINGGRGLINIIDLWSNQIVNLRKFFYQKANSSNIHKAVIQNDFNFTPLNLADRTEPSRGCDTDEANTVQWKSKTLHGRHPYDLEQANVDAAASNKWLTRGSLFPETEGFMVAIQDQVINTKNYRKYIIKDPTLTDDRCRKCHTHPETIQHITGACPNLAQTEYTHRHNQIANIIHQNLALKHYLIPNTHTPYYNYKPSSVLENNYYKMYFDRAILTDKTIHYNRPDITLQDKKKKITYLIDIAVPNTHNLQKTIAEKIHKYTDLKDEVTRIWKQDKVYIVPIVISTTGVIPKYLHHSLKLIGLPYAYIIAQKAAILNTCRIVRKFLQIDHENHETNGMTDI

SEQ ID NO: 21751 - protein, 1285 aa, Cycloglypha thrasibulus
MTAQTSAVVVDTYTSLSHVISEPSSPISSTHSLFQTPSSSAHSYELQQSSSRSSTITPLSFDVAPEALISNSVPTNDITNFTRLNVNENNSEIRGNHNTPSHSPTATARGVLKDMLPSTTQAGKTRKRMKWTDEINKKLLYCYYSVTNNETNLTTWRTLLHHKFIECVPELSHLSEQRLADQIRVIHRNNRIPHIERERLKQSITLAISTTDNNEEHPIPIANRHYTNTDTQSHTTYRSPHTSHSHTCTQTETSHMLISNDIEIIQPAILPEMTNSKLVEDLQTALIKFAGTDPTLRPKLPKLKYGYKLNQLVNTFNNNILPSFFSVDSQLTDIHTLVYCCALVISQELGFTVGDNIKKQRNNEPKAPLWQKRLEHDIVQLRSDIGKLTQYIKNNRSKKVVDRVQEIFRNVKIHSTHENYNRNPVEFLDTLKQKLALKAKRLARYKKTLKRKNDNNLFNSNEKIFYRKLRCGTATPSTDQSQIPDVKDLEQFWAGIWEVEKEHNEEAAWIKDEENRWSMLEEMKFEEITETDLNIVTSRLSNWKSPGIDRVHNFWYKKLHCLHKILAKNLTEIIRGHQNPPQFIAQGITFMLPKEKYTYQPSQYRPITCLPTIYKILTSLITYKITTHVEQNKIISEEQKGCRRGHMGCKEQLVIDSLIHRHASSNKRNLHCTYIDYKKAFDSIPHSWLLRVLQIYKISPVIITFLKNIMVQWKTKLQLNNITTREITIKKGIYQGDSLSPMWFCLALNPISHMLNKLKAGYRLKHGNDETHITHLIYMDDIKLYSTTEKEMKHLIDITANFSKDINMTFGLDKCKTIHIIKGKIQHGNITLNDEEHITAMEPNELYKYLGYYQSKGLDHCKLKASLKQAYINRVNTICKSLLTGKSLIKAINTYAVPILTYSFGIIKWSKTDINNIAISTRTLLTKHNFLHPKSAIERMSIKRINGGRGLINVTKLWNNQIVNLRNFFYQKSNSSNIHRAVVQNDINFTPLNLGDRTELIRGCDLDQTSTVQWKAKTLHGRHPYDLEQAHVDAAASNKWLTRGSLFPETEGFMLAIQDQIINTKNYRKHIIKDPTLKDDKCRKCHIHPETIQHITGACPNLAQTEYTHRHNQIANIIHQNLALKHHLTLNTHTPYYNYNPSSVLENYSYKMYFDRAILTDKTIHYNRPDITLQDKKNKITYLIDIAVPNTHNLQKTIAEKIHKYTELKDEITRIWKQEKVYIVPIVISTTGVIPKYLHHSLKLIDLPYAYITAQKAAILNTCRIVRKFLQIDYDTTETIRMTDN

SEQ ID NO: 21752 - protein, 1269 aa, Bombyx mori
METRLKSKRIGPLHGGDRRGAPGADAGCGSIRTVSGEELNRRAPSGSLENATANLNSDQQTAPIATPALDVAQGVNTLLPASTKAGKPRVRMRWTKDVNIFIMRTYYRVTKLETDMTTYRKLLHEHFLRQYPHVMVSEQRVSDQRRVIIRNRMLTNEKLEQIKEEVRLELEQVDISLQTQPSLAELQIINSIDQTPRQTVVTSTQSPYNYLNATEIQTPFSTHVSTQTETTILLMETEIETLQTSVLPDSSTEKFKESLQTAIIEFAGLDPTLRPRLPKLKYSLRLAKLTQFFNNTLLPVFFTDESQLTDIHTLIYCSALVITRELGYNTEPQPKPQRINKKPAWQDRLERDITQLRSNIGRLTQYLNNNRSKKIVDTVNKIITNNRIHTGHDNNNKRPEDALDTLKQKLALKSHRLARYKKALQRKNDNKLFHTNEKIFYRNLNTNKENLTNSNIETPAIHDLEEFWAGIWETEVHHNEEAPWITEEERKWEGIDEMQFKDITESDLRFVTSRLHNWKSPGIDRIHNYWYKKFTTLHKIIAKNFTSIIHGQQSTPPFIAKGITYMLPKGKYTSQPSQYRPITCLPTIYKILTSAIAQKLTTHIEQHSILAEEQKGCRRDNMGCKEQLIIDSVIHRHAATNKRNLHCTYIDYKKAFDSIPHSWLLYILKIYKINPVIIDFLKNIMPLWKTTLHLNTITSREIVIKKGIYQGDSLSPLWFCLALNPISQILQNCKAGYRLKHDSTETCISHLIYMDDIKLYSKTAKEMKSLIDATANFSKNIGMQFGLDKCKTIHIAKGKIQPGNYTVSRDEIITAMEPNDLYKYLGYQQSKGIDHNKLKSSLRDEYKRRVHILSKSNLAAKNLIKAINTYAIPILTYSFGIIKWTKTDINNIQIATRTILTKHNCLHPKSAIERVTIKRQDGGRGLIDIFTLWTTQISKLRSFFFEKASSSQIHKAIVSNDLNHTPLNLTQNLEVGNVENNSENCKIEQWKKKTLHGRHPQDLEQPHIDKSASNKWLTLGFLFPETEGFIIAIQDQIINTKNYKKHIIKDSTVTDDRCRKCHNQPETIQHITGACPNLAQTDYTHRHNQIANIIHQRLALKYKLIPDTHTPYYQYTPKTVLENSTHKIYYDRAILTDRTIHYNRPDITVRDKINKITYLVDIAVPNTHNLQKTIAEKIHKYADLRDEVLRIWKQQKVYIVPLVLSTTGVIPKHIHHGLKLLDLKPSTYILLQKAAILNTCRIVRKFLQIEYDQPHNAIVSQPQETVTFT

SEQ ID NO: 21753 - protein, 1300 aa, Spilosoma lubricipeda
METRLKSKRIWPLPGGDRRGTPGADAGCDSIRTVGGVELSRRAPSGSPENTTANLTLDRQTDNMDRISSPCPSTEEPYSPSTVSYTPSEVSTRTPTPIDTPALDVAQGVNTLLPASTKTGKPRVRMRWTEDVNIFIMRTYYRITKLETDMTTYRKLLHEHFLKQYPHVTVSEQRVSDQRRVIIRNKMLTNEKLEQIKEEVRVELEQENISLQSQPLLREPQTINTTSPTTQQTILTNTQSSHNYLNTTEYGIYNTQTPLSTNISTQTETALLLMETEIETVQSNDLLDPSEKKLKEHLQTAIIEFSGLDPTLRPRLPKLKYSLYLSKLTHFFNNTLLHEFFSDESQLTDIHTLIYCSALVISRELGYNTEPLARPQHIYKKPAWQDRLERDITQLRSNIGRLTQFLNNNRSKKVVDTANKIISNNRIHSSHENNNKRPEDVLDTLKQKLALKSHRLARYKKALQRKNDNKLFHTNEKTFYRNLNKNKEKPTNNIIETPAVHDLEEFWAGIWETEIHHNGETQWIAEEERKWADLDEMEFKEISESDIKYVTSRLHNWKSPGIDKIHNYWYKKFTTLHKIIAKNLTSIIHGQQNTPPFIAKGITYMLPKGQYTPQPSQYRPITCLPTIYKILTSAITQKLTTHIEQHNILAEEQKGCRRGHMGCKEQLIIDSLIHKHATTNKRNLHCTYIDYKKAFDSIPHSWLLHILKIYKISPVLIEFLKNIMPLWKTTLHLNNITSREIAIKKGIYQGDSLSPLWFCLALNPISQILQSCKAGYRLKNNSTETSISHLIYMDDIKLYSKTAKEMKALIDATTKFSKDISMQFGLDKCKTIHIIKGKIQPGDYAVSHDETITAMEPNELYKYLGYQQSKGIDHSKLKMALKDEYKHRVNILSKSNLASKNLVKAINTYAIPILTYSFGIIKWTKTDIQNIQITTRTTLTKHNCLHPKSAIERITIKRQEGGRGLIDISTLWTTQISKLKSFFFEKANSSEIHKVIVSNDLNHTPLNLTQEIEIDNVETNSQTCKIEQWKKKALHGRHPHDLEQPHIDKTASNKWLTLGSLFPETEGFIIAIQDQIINTKNHRKHIIRDPTVTDDRCRKCHNQSETIQHITGACPNLAQTDYTHRHNQIANIIHQRLAVKHKLIPDTHTPYYQYTPKAVLESNTHKIYYDRAILTDRTIHYNRPDITVQDKINKTTYLIDIAVPNTHNIQKTIAEKVHKYTDLKDEVLRIWKQQKVYIVPIVLSTTGIIPKHIHHSLKLLDLKPNTYILLQKAAILNTCRIVRKFLQIDEQTHNAIDSHT

SEQ ID NO: 21754 - protein, 1300 aa, Spilosoma lubricipeda
METRLKSKRIWPLPGGDRRGTPGADAGCDSIRTVGGVELSRRAPSGSPENTTANLTLDRQTDNMDRISSPCPSTEEPYSPSTVSYTPSEVSTRTPTPIDTPALDVAQGVNTLLPASTKTGKPRVRMRWTEDVNIFIMRTYYRITKLETDMTTYRKLLHEHFLKQYPHVTVSEQRVSDQRRVIIRNKMLTNEKLEQIKEEVRVELEQENISLQSQPLLREPQTINTTSPTTQQTILTNTQSSHNYLNTTEYGIYNTQTPLSTNISTQTETALLLMETEIETVQSNDLLDPSEKKLKEHLQTAIIEFSGLDPTLRPRLPKLKYSLYLSKLTHFFNNTLLHEFFSDESQLTDIHTLIYCSALVISRELGYNTEPLARPQHIYKKPAWQDRLERDITQLRSNIGRLTQFLNNNRSKKVVDTANKIISNNRIHSSHENNNKRPEDVLDTLKQKLALKSHRLARYKKALQRKNDNKLFHTNEKTFYRNLNKNKEKPTNNIIETPAVHDLEEFWAGIWETEIHHNGETQWIAEEERKWADLDEMEFKEISESDIKYVTSRLHNWKSPGIDKIHNYWYKKFTTLHKIIAKNLTSIIHGQQNTPPFIAKGITYMLPKGQYTPQPSQYRPITCLPTIYKILTSAITQKLTTHIEQHNILAEEQKGCRRGHMGCKEQLIIDSLIHKHATTNKRNLHCTYIDYKKAFDSIPHSWLLHILKIYKISPVLIEFLKNIMPLWKTTLHLNNITSREIAIKKGIYQGDSLSPLWFCLALNPISQILQSCKAGYRLKNNSTETSISHLIYMDDIKLYSKTAKEMKALIDATTKFSKDISMQFGLDKCKTIHIIKGKIQPGDYAVSHDETITAMEPNELYKYLGYQQSKGIDHSKLKMALKDEYKHRVNILSKSNLASKNLVKAINTYAIPILTYSFGIIKWTKTDIQNIQITTRTTLTKHNCLHPKSAIERITIKRQEGGRGLIDISTLWTTQISKLKSFFFEKANSSEIHKVIVSNDLNHTPLNLTQEIEIDNVETNSQTCKIEQWKKKALHGRHPHDLEQPHIDKTASNKWLTLGSLFPETEGFIIAIQDQIINTKNHRKHIIRDPTVTDDRCRKCHNQSETIQHITGACPNLAQTDYTHRHNQIANIIHQRLAVKHKLIPDTHTPYYQYTPKAVLESNTHKIYYDRAILTDRTIHYNRPDITVQDKINKTTYLIDIAVPNTHNIQKTIAEKVHKYRDLKDEVLRIWKQQKVYIVPIVLSTTGIIPKHIHHSLKLLDLKPNTYILLQKAAILNTCRIVRKFLQIDEQTHNAIDSHT

SEQ ID NO: 21755 - protein, 1300 aa, Spilosoma lubricipeda
METRLKSKRIWPLPGGDRRGTPGADAGCDSIRTVGGVELSRRAPSGSPENTTANLTLDRQTDNMDRNSSPCPSIEEPYSPSTVSYTPSEVSTRTPTPIDTPALDVAQGVNTLLPASTKTGKPRVRMRWTEDVNIFIMRTYYRITKLETDMTTYRKLLHEHFLKQYPHVTVSEQRVSDQRRVIIRNKMLTNEKLEQIKEEVRVELEQENISLQSQPLLREPQTINTTSPTTQQTILTNTQSSHNYLNTTEYGIYNTQTPLSTNISTQTETALLLMETEIETVQSNDLLDPSEKKLKEHLQTAIIEFSGLDPTLRPRLPKLKYSLYLSKLTQFFNNTLLHEFFSDESQLTDIHTLIYCSALVISRELGYNTEPLARPQHIYKKPAWQDRLERDITQLRSNIGRLTQFLNNNRSKKVVDTANKIISNNRIHSSHENNNKRPEDVLDTLKQKLALKSHRLARYKKALQRKNDNKLFHTNEKTFYRNLNKNKEKPTNNIIETPAVHDLEEFWAGIWETEIHHNGETQWIAEEERKWADLDEMEFKEISESEIKYVTSRLHNWKSPGIDKIQNYWYKKFTTLHKIIAKNLTSIIHGQQNTPPFIAKGITYMLPKGQYTPQPSQYRPITCLPTIYKILTSAITQKLTTHIEQHNILAEEQKGCRRGHMGCKEQLIIDSLIHKHATTNKRNLHCTYIDYKKAFDSIPHSWLLHILKIYKISPVLIEFLKNIMPLWKTTLHLNNITSREIAIKKGIYQGDSLSPLWFCLALNPISQILQSCKAGYRLKNNSTETSISHLIYMDDIKLYSKTAKEMKALIDATTKFSKDISMQFGLDKCKTIHIIKGKIQPGDYAVSHDETITAMEPNELYKYLGYQQSKGIDHSKLKMALKDEYKHRVNILSKSNLASKNLVKTINTYAIPILTYSFGIIKWTKTDIQNIQITTRTTLTKHNCLHPKSAIERITIKRQEGGRGLIDISTLWTTQISKLKSFFFEKANNSEIHKVIVSNDLNHTTLNLTQEIEIDNVETNSQTCKIEQWKKKAPHGRHPHDLEQPHIDKTASNKWLTLGSLFPETEGFIIAIQDQIINTKNHRKHIIRDPTVTDDRCRKCHNQSETIQHITGACPNLAQTDYTHRHNQIANIIHQRLAVKHKLIPDTHTPYYQYTPKAVLESNTHKIYYDRAILTDRTIHYNRPDITVQDKINKTTYLIDIAVPNTHNIQKTIAEKVHKYTDLKDEVLRIWKQQKVYIVPIVLSTTGIIPKHIHHSLKLLDLKPNTYILLQKAAILNTCRIVRKFLQIDEQTHNAIDLHT

SEQ ID NO: 21756 - protein, 1300 aa, Spilosoma lubricipeda
METRLKSKRIWPLPGGDRRGTPGADAGCDSIRTIGGVELSRRAPSGSPENTTANLTLDRQTDNMDRISSPCPSTEEPYSPSTVSYTPSEVSTRTPTPIDTPALDVAQGVNTLLPTSTKTGKPRVRMRWTEDVNIFIMRTYYRITKLETDMTTYRKLLHEHFLKQYPHVTVSEQRVSDQRRVIIRNKMLTNEKLEQIKEEVRVELEQENISLQSQPLLREPQTINTTSPTTQQTILTNTQSSHNYLNTTEYGIYNTQTPLSTNISTQTETALLLMETEIETVQSNDLLDPSEKKLKEHLQTAIIEFSGLDPTLRPRLPKLKYSLYLSKLTQFFNNTLLHEFFSDESQLTDIHTLIYCSALVISRELGYNTEPLARPQHIYKKPAWQDRLERDITQLRSNIGRLTQFLNNNRSKKVVDTANKIISNNRIHSSHENNNKRPEDVLDTLKQKLALKSHRLARYKKALQRKNDNKLFHTNEKTFYRNLNKNKEKPTNNIIETPAVHDLEEFWAGIWETEIHHNGETQWIAEEERKWADLDEMEFKEISESDIKYVTSRLHNWKSPGIDKIHNYWYKKFTTLHKIIAKNLTSIIHGQQNTPPFIAKGITYMLPKGQYTPQPSQYRPITCLPTIYKILTSAITQKLTTHIEQHNILAEEQKGCRRGHMGCKEQLIIDSLIHKHATTNKRNLHCTYIDYKKAFDSIPHSWLLHVLKIYKISPVLIEFLKNIMPLWKTTLHLNNITSREIAIKKGIYQGDSLSPLWFCLALNPISQILQSCKAGYRLKNNSTETSISHLIYMDDIKLYSKTAKEMKALIDATTKFSKDISMQFGLDKCKTIHIIKGKIQPGDYAVSHDETITAMEPNELYKYLGYQQSKGIDHSKLKMALKDEYKHRVNILSKSNLASKNLVKAINTYAIPILTYSFGIIKWTKTDIQNIQITTRTTLTKHNCLHPKSAIERITIKRQEGGRGLIDISTLWTTQISKLKSFFFEKANNSEIHKVIVSNDLNHTPLNLTQEIEIDNVETNSQTCKIEQWKKKALHGRHPHDLEQPHIDKTASNKWLTLGSLFPETEGFIIAIQDQIINTKNHRKHIIRDPTVTDDRCRKCHNQSETIQHITGACPNLAQTDYTHRHNQIANIIHQRLAVKHKLIPDTHTPYYQYTPKAVLESNTHKIYYDRAILTDRTIHYNRPDITVQDKINKTTYLIDIAVPNTHNIQKTIAEKVHKYTDLKDEVLRIWKQQKVYIVPIVLSTTGIIPKHIHHSLKLLDLKPNTYILLQKAAILNTCRIVRKFLQIDEQTHNAIDLHT

SEQ ID NO: 21757 - protein, 1300 aa, Spilosoma lubricipeda
METRLKSKRIWPLPGGDRRGTPGADAGCDSIRTVGGVELSRRAPSGSPENTTANLTLDRQTDNMDRISSPCPSTEEPYSPSTVSYTPSEVSTRTPTPIDTPALDVAQGVNTLLPASTKTGKPRVRMRWTEDVNIFIMRTYYRITKLETDMTTYRKLLHEHFLKQYPHVTVSEQRVSDQRRVIIRNKMLTNEKLEQIKEEVRVELEQENISLQSQPLLREPQTINTTSPTTQQTILTNTQSSHNYLNTTEYGIYNTQTPLSTNISTQTETALLLMETEIETVQSNDLLDPSEKKLKEHLQTAIIEFSGLDPTLRPRLPKLKYSLYLSKLTQFFNNTLLHEFFSDESQLTDIHTLTYCSALVISRELGYNTEPLARPQHIYKKTAWQDRLERDITQLRSNIGRLTQFLNNNRSKKVVDTANKIISNNRIHSSHENNNKRPEDVLDTLKQKLALKSHRLARYKKALQRKNDNKLFHTNEKTFYRNLNKNKEKPTNNIIETPAVHDLEEFWAGIWETEIHHNGETQWIAEEERKWADLDEMEFKEISESDIKYVTSRLHNWKSPGIDKIHNYWYKKFTTLHKIIAKNLTSIIHGQQNTPPFIAKGITYMLPKGQYTPQPSQYRPITCLPTIYKILTSAITQKLTTHIEQHNILAEEQKGCRRGHMGCKEQLIIDSLIHKHATTNKRNLHCTYIDYKKAFDSIPHSWLLHILKIYKISPVLIEFLKNIMPLWKTTLHLNNITSREIAIKKGIYQGDSLSPLWFCLALNPISQILQSCKAGYRLKNNSTETSISHLIYMDDIKLYSKTAKEMKALIDATTKFSKDISMQFGLDKCKTIHIIKGKIQPGDYAVSHDQTITAMEPNELYKYLGYQQSKGIDHSKLKMALKDEYKHRVNILSKSNLASKNLVKAINTYAIPILTYSFGIIKWTKTDIQNIQITTRTTLTKHNCLHPKSAIERITIKRQEGGRGLIDISTLWTTQISKLKSFFFEKANNSEIHKVIVSNDLNHTPLNLTQEIEIDNVETNSQTCKIEQWKKKALHGRHPHDLEQPHIDKTASNKWLTLGSLFPETEGFIIAIQDQIINTKNHRKHIIRDPTVTDDRCRKCHNQSETIQHITGACPNLAQTDYTHRHNQIANIIHQRLAVKHKLIPDTHTPYYQYTPKAVLESNTHKIYYDRAILTDRTIHYNRPDITVQDKINKTTYLIDIAVPNTHNIQKTIAEKVHKYTDLKDEVLRIWKQQKVYIVPIVLSTTGIIPKHIHHSLKLLDLKPNTYILLQKAAILNTCRIVRKFLQIDEQTHNAIDLHT

SEQ ID NO: 21758 - protein, 1151 aa, Spilosoma lubricipeda
MTTYRKLLHEHFLKQYPHVTVSEQRVSDQRRVIIRNKMLTNEKLEQIKEEVRVELEQENISLQSQPLLREPQTINTTSPTTQQTILTNTQSSHNYLNTTEYGIYNTQTPLSTNISTQTETALLLMETEIETVQSNDLLDPSEKKLKEHLQTAIIEFSGLDPTLRPRLPKLKYSLYLSKLTQFFNNTLLHEFFSDESQLTDIHTLIYCSALVISRELGYNTEPLARPQHIYKKPAWQDRLERDITQLRSNIGRLTQFLNNNRSKKVVDTANKIISNNRIHSSHENNNKRPEDVLDTLKQKLALKSHRLARYKKALQRKNDNKLFHTNEKTFYRNLYKNKEKPTNNIIETPAVHDLEEFWAGIWETEIHHNGETQWIAEEERKWADLDEMEFKEISESDIKYVTSRLHNWKSPGIDKIHNYWYKKFTTLHKIIAQNFTSIIHGQQNTPPFIAKGITYMLPKGQYTPQPSQYRPITCLPTIYKILTSAITQKLTTHIEQHNILAEEQKGCRRGHMGCKEQLIIDSLIHKHATTNKRNLHCTYIDYKKAFDSIPHSWLLHILKIYKISPVLIEFLKNIMPLWKTTLHLNNITSREIAIKKGIYQGDSLSPLWFCLALNPISQILQSCKAGYRLKNNSTETSISHLIYMDDIKLYSKTAKEMKALIDATTKFSKDISMQFGLDKCKTIHIIKGKIQPGDYAVSHDETITAMEPNELYKYLGYQQSKGIDHSKLKMALKDEYKHRVNILSKSNLASKNLVKAINTYAIPILTYSFGIIKWTKTDIQNIQITTRTTLTKHNCLHPKSAIERITIKRQEGGRGLIDISTLWTTQISKLKSFFFEKANSSEIHKVIVSNDLNHTPLNLTQEIEIDNVETNSQTCKIEQWKKKALHGRHPHDLEQPHIDKTASNKWLTLGSLFPETEGFIIAIQDQIINTKNHRKHIIRDPTVTDDRCRKCHNQSETIQHITGACPNLAQTDYTHRHNQIANIIHQRLAVKHKLIPDTHTPYYQYTPKAVLESNTHKIYYDRAILTDRTIHYNRPDITVQDKINKTTYLIDIAVPNTHNIQKTIAEKVHKYTDLKDEVLRIWKQQKVYIVPIVLSTTGIIPKHIHHSLKLLDLKPNTYILLQKAAILNTCRIVRKFLQIDEQTHNAIDLHT

SEQ ID NO: 21759 - protein, 1269 aa, Bombyx mori
METRLKSKRIGPLPGGDRRGAPGADAGCGSIRTVSGEELNRRAPSGSLENATANLNSEQQTAPIASPALDVAQGVNTLLPASTKAGKPRVRMRWTEDVNIFIMRTYYRVTKLETDMTTYRKLLHEHFLRQYPHVMVSEQRVSDQRRVIIRNRMLTNEKLKQIKEEVRLELEQVDISLHTQPSLAELQIINSTDQTPRQTVVTSTQSPYNYLNATETQTPFSTHVSTQTETTILLMETEIETLQTSVLPDSSTEKFKENLQTAIIEFAGLDPTLRPRLPKLKYSLRLAKLTQFFNNTLLPEFFTDESQLTDIHTLIYCSALVITRELGYNTESQPKPQRINKKPAWQDRLERDITQLRSNIGRLTQYLNNNRSKKIVDTVNKIITNNRIHTGHDNNNKRPEDALDTLKQKLALKSHRLARYKKALQRKNDNKLFHTNEKIFYRNLNTNKENLTNSNIETPAIHNLEEFWAGIWETEVHHNEEAPWITEEERKWEGIDEMQFKDITESDIRFVTSRLHNWKSPGIDRIHNYWYKKFTTLHKIIAKNFTSIIHGQQRTPPFIAKGITYMLPKGKYTSQPSQYRPITCLPTIYKILTSAIAQKLTTHIEQHSILAEEQKGCRRDNMGCKEQLIIDSVIHRHAATNKRNLHCTYIDYKKAFDSIPHSWLLYVLKIYKINPVIIDFLKNIMPLWKTTLHLNTITSREIVIKKGIYQGDSLSPLWFCLALNPISQILQNCKAGYRLKHDSTETCISHLIYMDDIKLYSKTAKEMKSLIDATANFSKNIGMQFGLDKCKTIHIAKGKIQPGNYTVSRDEIITAMEPNELYKYLGYQQSKGIDHNKLKSSLRDEYKHRVHILSKSNLAAKNLIKAINTYAISILTYSFGIIKWTKTDINNIQIATRTILTKHNCLHPKSAIERVTIKRQDGGRGLIDIFTLWTTQISKLRSFFFEKASSSQIHKAIVSNDLNHTPLNLTQNLEVGNVENNSENCKIEQWKKKTLHGRHPQDLEQPHIDKSASNKWLTLGFLFPETEGFIIAIQDQIINTKNYKKHIIKDSTVTDDRCRKCHNQPETIQHITGACPNLAQTDYTHRHNQIANIIHQRLALKYELIPDTHTPYYQYTPKTVLENSTHKIYYDRAILTDRTIHYNRPDITVRDKINKITYLIDIAVPNTHNLQKTIAEKIHKYADLRDEVLRIWKQQKVYIVPLVLSTTGVIPKHIHHGLKLLDLKPNTYILLQKAAILNTCRIVRKFLQIEYDQPHNAIVSQPQETVTFT

SEQ ID NO: 21760 - protein, 764 aa, Spilosoma lubricipeda
MEFKEISESDIKYVTSRLHNWKSPGIDKIHNYWYKKFTTLHKIIAKNLTSIIHGQQNTPPFIAKGITYMLPKGQYTPQPSQYRPITCLPTIYKILTSAITQKLTTHIEQHNILAEEQKGCRRGHMGCKEQLIIDSLIHKHATTNKRNLHCTYIDYKKAFDSIPHSWLLHILKIYKISPVLIEFLKNIMPLWKTTLHLNNITSREIAIKKGIYQGDSLSPLWFCLALNPISQILQSCKAGYRLKNNSTETSISHLIYMDDIKLYSKTAKEMKALIDATTKFSKDISMQFGLDKCKTIHIIKGKIQPGDYAVSHDETITAMEPNELYKYLGYQQSKGIDHSKLKMALKDEYKHRVNILSKSNLASKNLVKAINTYAIPILTYSFGIIKWTKTDIQNIQITTRTTLTKHNCLHPKSAIERITIKRQEGGRGLIDISTLWTTQISKLKSFFFEKANNSEIHKVIVSNDLNHTPLNLTQEIEIDNVETNSQTCKIEQWKKKALHGRHPHDLEQPHIDKTASNKWLTLGSLFPETEGFIIAIQDQIINTKNHRKHIIRDPTVTDDRCRKCHNQSETIQHITGACPNLAQTDYTHRHNQIANIIHQRLAVKHKLIPDTHTPYYQYTPKAVLESNTHKIYYDRAILTDRTIHYNRPDITVQDKINKTTYLIDIAVPNTHNIQKTIAEKVHKYTDLKDEVLRIWKQQKVYIVPIVLSTTGIIPKHIHHSLKLLDLKPNTYILLQKAAILNTCRIVRKFLQIDEQTHNAIDLHT

SEQ ID NO: 21761 - protein, 1300 aa, Spilosoma lubricipeda
METRLKSKRIWPLPGGDRRGTPGADAGCDSIRTVGGVELSRRAPSGSPENTTANLTLDRQTDNMDRISSPCPSTEEPYSPSTVSYTPSEVSTRTPTPIDTPALDVAQGVNTLLPASTKTGKPRVRMRWTEDVNIFIMRTYYRITKLETDMTTYRKLLHEHFLKQYPHVTVSEQRVSDQRRVIIRNKMLTNEKLEQIKEEVRVELEQENISLQSQPLLREPQTINTTSPTTQQTILTNTQSSHNYLNTTEYGIYNTQTPLSTNISTQTETALLLMETEIETVQSNDLLDPSEKKLKEHLQTAIIEFSGLDPTLRPRLPKLKYSLYLSKLTQFFNNTLLHEFFSDESQLTDIHTLIYCSALVISRELGYNTEPLARPQHIYKKPAWQDRLERDITQLRSNIGRLTQFLNNNRSKKVVDTANKIISNNRIHSSHENNNKRPEDVLDTLKQKLALKSHRLARYKKALQRKNDNKLFHTNEKTFYRNLNKNKEKPTNNIIETPAVHDLEEFWAGIWETEIHHNGETQWIAEEERKWADLNEREFKEISESDIKYVTSRLHNWKSPGIDKIHNYWYKKFTTLHKIIAKNLTSIIHGQQNTPPFIAKGITYMLPKGQYTPQPSQYRPITCLPTIYKILTSAITQKLTTHIEQHNILAEEQKGCRRGHMGCKEQLIIDSLIHKHATTNKRNLHCTYIDYKKAFDSIPHSWLLHILKIYKISPVLIEFLKNIMPLWKTTLHLNNITSREIAIKKGIYQGDSLSPLWFCLALNPISQILQSCKAGYRLKNNSTETSISHLIYMDDIKLYSKTAKEMKALIDATTKFSKDISMQFGLDKCKTIHIIKGKIQAGDYAVSHDETITAMEPNELYKYLGYQQSKGIDHSKLKMALKDEYKHRVNILSKSNLASKNLVKAINTYAIPILTYSFGIIKWTKTDIQNIQITTRTTLTKHNCLHPKSAIERITIKSQEGGRGLIDISTLWTTQISKLKSFFFEKANNSEIHKVIVRNDLNHTPLNLTQEIEIDNVETNSQTCKIEQWKKKALHGRHPHDLEQPHIDKTASNKWLTLGSLFPETEGFIIAIQDQIINTKNHRKHIIRDPTVTDDRCRKCHNQSETIQHITGACPNLAQTDYTYRHNQIANIIHQRLAVKHKLIPDTHTPYYQYTPKAVLESNTHKIYYDRAILTDRTIHYNRPDITVQDKINKTTYLIDIAVPNTHNIQKTIAEKVHKYTDLKDEVLRIWKQQKVYIVPIVLSTTGIIPKHIHHSLKLLDLKPNTYILLQKAAILNTCRIVRKFLQIDEQTHNAIDLHT

SEQ ID NO: 21762 - protein, 1269 aa, Bombyx mori
METRLKSKRIGPLPGGDRRGAPGADAGCGSIRTVSGEELNRRAPSGSLENATANLNSEQQTAPIATPALDVAQGVNTLLPASTKAGKPRVRMRWTEDVNIFIMRTYYRVTKLGTDMTTYRKLLHEHFLRQYPHVMVSEQRVSDQRRVIIRNRMLTNEKLEQIKEEVKLELEQVDISLHTQPSLAELQIINSTDQTPRQTVVTSTQSPYNYLNATETQTPFSTHVSTQTETTILLMETEIETLQTSVLPDSSTEKFKENLQTAIIEFAGLDPTLRPRLPKLKYSLRLAKLTQFFNNTLLPEFFTDESQLTDIHTLIYCSALVITRELGYNTESQPKPQRINKKPAWQDRLERDITQLRSNIGRLTQYLNNNRSKKIVDTVNKIITNNRIHTGHDNNNKRPEDALDTLKQKLALKSHRLARYKKALQRKNDNKLFHTNEKIFYRNLNTNKENLTNSNIETPAIHNLEEFWAGIWETEVHHNEEAPWITEEERKWEGIDEMQFKDITESDIRFVTSRLHNWKSPGIDRIHNYWYKKFTTLHKIIAKNFTSIIHGQQSTPPFIAKGITYMLPKGKYTSQPSQYRPITCLPTIYKILTSAIAQKLTTHIEQHSILAEEQKGCRRDNMGCKEQLIIDSVIHRHAATNKRNLHCTYIDYKKAFDSIPHSWLLYVLKIYKINPVIIDFLKNIMPLWKTTLHLNTITSREIVIKKGIYQGDSLSPLWFCLALNPISQILQNCNAGYRLKHDSTETCISHLIYMDDIKLYSKTAKEMKSLIDATANFSKNIGMQFGLDKCKTIHIAKGKIQPGNYTVSRDEIITAMEPNELYKYLGYQQSKGIDHNKLKSSLRDEYKHRVHILSKSNLAAKNLIKAINTYAIPILTYSFGIIKWTKTDINNIQIATRTILTKHNCLHPKSAIERVTIKRQDGGRGLIDIFTLWTTQISKLRSFFFEKSSSSQIHKAIVSNDLNHTPLNLTQNLEVDNVENNSENCKIEQWKKKTLHGRHPQDLEQPHIDKSASNKWLTLGFLFPETEGFIIAIQDQIINTKNYKKHIIKDSTVTDDRCRKCHNQPETIQHITGACPNLAQTDYTHRHNQIANIIHQRLALKYELIPDTHTPYYQYTPKTVLENSTHKIYYDRAILTDRTIHYNRPDITVRDKINKITYLIDIAVPNTHNLQKTIAEKIHKYADLRDEVLRIWKQQKVYIVPLVLSTTGVIPKHIHHGLKLLDLKPNTYILLQKAAILNTCRIVRKFLQIEYDQPHNAIVSQPQETVTFT

SEQ ID NO: 21763 - protein, 1300 aa, Spilosoma lubricipeda
METRLKSKRIWPLPGGDRRGTPGADAGCDSIRTVGGVELSRRAPSGSPENTTANLTLDRQTDNMDRISSPCPSTEEPYSPSTVSYTPSEVSTRTPTPIDTPALDVAQGVNTLLPASTKTGKPRVRMRWTEDVNIFIMRTYYRITKLETDMTTYRKLLHEHFLKQYPHVTVSEQRVSDQRRVIIRNKMLTNEKLEQIKEEVRVELEQENISLQSQPLLREPQTINTTSPTTQQTILTNTQSSHNYLNTTEYGIYNTQTPLSTNISTQTETALLLMETEIETVQSNDLLDPSEKKLKEHLQTAIIEFSGLDPTLRPRLPKLKYSLYLSKLTQFFNNTLLHEFFSDESQLTDIHTLIYCSALVISRELGYNTEPLARPQHIYKKPAWQDRLERDITQLRSNIGRLTQFLNNNRSKKVVDTANKIISINRIHSSHENNNKRPEDVLDTLKQKLALKSHRLARYKKALQRKNDNKLFHTNEKTFYRNLNKNKEKPTNNIIETPAVHDLEEFWAGIWETEIHHNGETQWIAEEERKWADLDEMEFKEISESDIKYVTSRLHNWKSPGIDKIHNYWYKKFTTLHNIIAKNLTSIIHGQQNTPPFIAKGITYMLPKGQYTPQPSQYRPITCLPTIYKILTSAITQKLTTHIEQHNILAEEQKGCRRGHMGCKEQLIIDSLIHKHATTNKRNLHCTYIDYKKAFDSIPHSWLLHILKIYKISPVLIEFLKNIMPLWKTTLHLNNITSREIAIKKGIYQGDSLSPLWFCLALNPISQILQSCKAGYRLKNNSTETSISHLIYMDDIKLYSKTAKEMKALIDATTKFSKDISMQFGLDKCKTIHIIKGKIQPGDYAVSHDETITAMEPNELYKYLGYQQSKGIDHSKLKMALKDEYKHRVNILSKSNLASKNLVKAINTYAIPILTYSFGIIKWTKTDIQNIQITTRTTLTKHNCLHPKSAIERITIKRQEGGRGLIDISNLWTTQISKLKSFFFEKANSSEIHKVIVSNDLNHTPLNLTQEIEIDNVETNSQTCKIEQWKKKALHGRHPHDLEQPHIDKTASNKWLTLGSLFPETEGFIIAIQDQIINTKNHRKHIIRDPTVTDDRCRKCHNQSETIQHITGACPNLAQTDYTHRHNQIANIIHQRLAVKHKLIPDTHTPYYQYTPKAVLESNTHKIYYDRAILTDRTIHYNRPDITVQDKINKTTYLIDIAVPNTHNIQKTIAEKVHKYTDLKDEVLRIWKQQKVYIVPIVLSTTGIIPKHIHHSLKLLDLKPNTYILLQKAAILNTCRIVRKFLQIDEQTHNAIDLHT

SEQ ID NO: 21764 - protein, 1175 aa, Spilosoma lubricipeda
MRWTEDVNIFIMRTYYRITKLETDMTTYRKLLHEHFLKQYPHVTVSEQRVSDQRRVIIRNKMLTNEKLEQIKEEVRVELEQENISLQSQPLLREPQTINTTSPTTQQTILTNTQSSHNYLNTTEYGIYNTQTPLSTNISTQTETALLLMETEIETVQSNDLLDPSEKKLKEHLQTAIIEFSGLDPTLRPRLPKLKYSLYLSKLTQFFNNTLLHEFFSDESQLTDIHTLIYCSALVISRELGYNTEPLARPQHIYKKPAWQDRLERDITQLRSNIGRLTQFLNNNRSKKVVDTANKIISNNRIHSSHENNNKRPEDVLDTLKQKLALKSHRLARYKTALQRKNDNKLFHTNEKTFYRNLNKNKEKPTNNIIETPAVHDLEEFWAGIWETEIHHNGETQWIAEEERKWADLDEMEFKEISESDIKYVTSRLHNWKSPGIDKIHNYWYKKFTTLHKIIAKNLTSIIHGQQNTPPFIAKGITYMLPKGQYTPQPSQYRPITCLPTIYKILTSAITQKLTTHIEQHNILAEEQKGCRRGHMGCKEQLIIDSLIHKHATTNKRNLHCTYIDYKKAFDSIPHSWLLHILKIYKISPVLIEFLKNIMPLWKTTLHLNNITSREIAIKKGIYQGDSLSPLWFCLALNPISQILQSCKAGYRLKNNSTETSISHLIYMDDIKLYSKTAKEMKALIDATTKFSKDISMQFGLDKCKTIHIIKGKIQPGDYAVSHDETITAMEPNELYKYLGYQQSKGIDHSKLKMALKDEYKHRVNILSKSNLASKNLVKAINTYAIPILTYSFGIIKWTKTDIQNIQITTRTTLTKHNCLHPKSAIERITIKRQEGGRGLIDISTLWTTQISKLKSFFFEKANNSEIHKVIVSNDLNHTPLNLTQEIEIDNVETNSQTCKIEQWKKKALHGRHPHDLEQPHIDKTASNKWLTLGSLFPETEGFIIAIQDQIINTKNHRKHIIRDPTVTDDRCRKCHNQSETIQHITGACPNLAQTDYTHRHNQIANIIHQRLAVKHKLIPDTHTPYYQYTPKAVLESNTHKIYYDRAILTDRTIHYNRPDITVQDKINKTTYLIDIAVPNTHNIQKTIAEKVHKYTDLKDEVLRIWKQQKVYIVPIVLSTTGIIPKHIHHSLKLLDLKPNTYILLQKAAILNTCRIVRKFLQIDEQTHNAIDLHT

SEQ ID NO: 21765 - protein, 1300 aa, Spilosoma lubricipeda
METRLKSKRIWPLPGGDRRGIPGADAGCDSIRTVGGVELSRRAPSGSPENTTANLTLDRQTDNMDRISSPCPSTEEPYSPSTVSYTPSEVSTRTPTPIDTPALDVAQGVNTLLPASTKTGKPRVRMRWTEDVNIFIMRTYYRITKLETDMTTYRKLLHEHFLKQYPHVTVSEQRVSDQRRVIIRNKMLTNEKLEQIKEEVRVELEQENISLQSQPLLREPQTINTTSPTTQQTILTNTQSSHNYLNTTEYGIYNTQTPLSTNISTQTETALLLMETEIETVQSNDLLDPSEKKLKEHLQTAIIEFSGLDPTLRPRLPKLKYSLYLSKLTQFFNNTLLHEFFSDESQLTDIHTLIYCSALVISRELGYNTEPLARPQHIYKKPAWQDRLERDITQLRSNIGRLTQFLNNNRSKKVVDTANKIISNNRIHSSHENNNKRPEDVLDTLKQKLALKSHRLARYKKALQRKNDNKLFHTNEKTFYRNLNKNKEKPTNNIIETPAVHDLEEFWAGIWETEIHHNGETQWIAEEERKWADLDEMEFKEISESDIKYVTSRLHNWKSPGIDKIHNYWYKKFTTLHKIIAKNLTSIIHGQQNTPPFIAKGITYMLPKGQYTPQPSQYRPITCLPTIYKILTSAITQKLTTHIEQHNILAEEQKGCRRGHMGCKEQLIIDSLIHKHATTNKRNLHCTYIDYKKAFDSIPHSWLLHILKIYKISPVLIEFLKNIMPLWKTTLHLNNITSREIAIKKGIYQGDSLSPLWFCLALNPISQILQSCKAGYRLKNNSTETSISHLIYMDDIKLYSKTAKEMKALIDATTKFSKDISMQFGLDKCKTIHIIKGKIQPGDYAVSHDETITAMEPNELYKYLGYQQSKGIDHSKLKMALKDEYKHRVNILSKSNLASKNLVKAINTYAIPILTYSFGIIKWTKTDIQNIQITTRTTLTKHNCLHPKSAIERITIKRQEGGRGLIDISTLWTTQISKLKSFFFEKANSSEIHKVIVSNDLNHTPLNLTQEIEIDNVETNSQTCKIEQWKKKALHGRHPHDLEQPHIDKTASNKWLTLGSLFPETEGFIIAIQDQIINTKNHRKHIIRDPTVTDDRCRKCHNQSETIQHITGACPNLAQTDYTHRHNQIANIIHQRLAVKHKLIPDTHTPYYQYTPKAVLESNTHKIYYDRAILTDRTIHYNRPDITVQDKINKTTYLIDIAVPNTHNIQKTIAEKVHKYTDLKDEVLRIWKQQKVYIVPIVLSTTGIIPKHIHHSLKLLDLKPNTYILLQKAAILNTCRIVRKFLQIDEQTHNAIDLHT

SEQ ID NO: 21766 - protein, 1300 aa, Spilosoma lubricipeda
METRLKSKRIWPLPGGDRRGTPGADAGCDSIRTVGGVELSRRAPSGSPENTTANLTLDRQTDNMDRISSPCPSTEEPYSPSTVSYTPSEVSTRTPTPIDTPALDVAQGVNTLLPASTKTGKPRVRMRWTEDVNIFIMRTYYRITKLETDMTTYRKLLHEHFLKQYPHVTVSEQRVSDQRRVIIRNKMLTNEKLEQIKEEVRVELEQENISLQSQPLLREPQTINTTSPTTQQTILTNTQSSHNYLNTTEYGIYNTQTPLSTNISTQTETALLLMETEIETVQSNDLLDPSEKKLKEHLQTAIIEFSGLDPTLRPRLPKLKYSLYLSKLTQFFNNTLLHEFFSDESQLTDIHTLIYCSALVISRELGYNTEPLARPQHIYKKPAWQDRLERDITQLRSNIGRLTQFLNNNRSKKVVDTANKIISNNRIHSSHENNNKRPEDVLDTLKQKLALKSHRLARYKKALQRKNDNKLFHTNEKTFYRNLNKNKEKPTNNIIETPAVHDLEEFWAGIWETEIHHNGETQWIAEEERKWADLDEMEFKEISESDIKYVTSRLHNWKSPGIDKIHNYWYKKFTTLHKIIAKNLTSIIHGQQNTPPFIAKGITYMLPKGQYTPQPSQYRPITCLPTIYKILTSAITQKLTTHIEQHNILAEEQKGCRRGHMGCKEQLIIDSLIHKHATTNKRNLHCTYIDYKKAFDSIPHSWLLHILKIYKISPVLIEFLKNIMPLWKTTLHLNNITSREIAIKKGIYQGDSLSPLWFCLALNPISQILQSCKAGYRLKNNSTETSISHLIYMDDIKLYSKTAKEMKALIDATTKFSKDIGMQFGLDKCKTIHIIKGKIQPGDYAVSHDETITAMEPNELYKYLGYQQSKGIDHSKLKMALKDEYKHRVNILSKSNLASKNLVKAINTYAIPILTYSFGIIKWTKTDIQNLQITTRTTLTKHNCLHPKSAIERITIKRQEGGRGLIDISTLWTTQIAKLKSFFFEKANNSEIHKVIVSNDLNHTPLNLTQEIEIDNVETNSQTCKIEQWKKKALHGRHPHDLEQPHIDKTASNKWLTLGSLFPETEGFIIAIQDQIINTKNHRKHIIRDPTVTDDRCRKCHNQSETIQHITGACPNLAQTDYTHRHNQIANIIHQRLAVKHKLIPDTHTPYYQYTPKAVLESNTHKIYYDRAILTDRTIHYNRPDITVQDKINKTTYLIDIAVPNTHNIQKTIAGKVHKYTDLKDEVLRIWKQQKVYIVPIVLSTTGIIPKHIHHSLKLLDLKPNTYILLEKAAILNTCRIVRKFLQIDEQTHNAIDLHT

SEQ ID NO: 21767 - protein, 1302 aa, Spilosoma lubricipeda
METRLKSKRIWPLPGGDRRGTPGADAGCDSIRTVGGVELSRRAPSGSPENTTANLTLTLDRQTDNMDRISSPCPSTEEPYSPSTVSYTPSEVSTRTPTPIDTPALDVAQGVNTLLPASTKTGKPRVRMRWTEDVNIFIMRTYYRITKLETDMTTYRKLLHEHFLKQYPHVTVSEQRVSDQRRVIIRNKMLTNEKLEQIKEEVRVELEQENISLQSQPLLREPQTINTTSPTTQQTILTNTQSSHNYLNTTEYGIYNTQTPLSTNISTQTETALLLMETEIETVQSNDLLDPSEKKLKEHLQTAIIEFSGLDPTLRPRLPKLKYSLYLSKLTQFFNNTLLHEFFSDESQLTDIHTLIYCSALVISRELGYNTEPLARPQHIYKKPAWQDRLERDITQLRSNIGRLTQFLNNNRSKKVVDTANKIISNNRIHSSHENNNKRPEDVLDTLKQKLALKSHRLARYKKALQRKNDNKLFHTNEKTFYRNLNKNKEKPTNNIIETPAVHDLEEFWAGIWETEIHHNGETQWIAEEERKWADLDEMEFKEISESDIKYVTSRLHNWKSPGIDKIHNYWYKKFTTLHKIIAKNFTSIIHGQQNTPPFIAKGITYMLPKGQYTPQPSQYRPITCLPTIYKILTSAITQKLTTHIEQHNILAEEQKGCRRGHMGCKEQLIIDSLIHKHATTNKRNLHCTYIDYKKAFDSIPHSWLLHILKIYKISPVLIEFLKNIMPLWKTTLHLNNITSREIAIKKGIYQGDSLSPLWFCLALNPISQILQSCKAGYRLKNNSTETSISHLIYMDDIKLYSKTAKEMKVLIDATTKFSKDISMQFGLDKCKTIHIIKGKIQPGDYAVSHDETITAMEPNELYKYLGYQQSKGMDHSKLKMALKDEYKHRVNILSKSNLASKNLVKAINTYAIPILTYSFGIIKWTKTDIQNIQITTRTTLTKHNCLHPKSAIERITIKRQEGGRGLIDISTLWTTQISKLKSFFFEKANSSEIHKVIVSNDLNHTPLNLTQEIEIDNVETNSQTCKIEQWKKKALHGRHPHDLEQPHIDKTASNKWLTLGSLFPETEGFIIAIQDQIINTKNHRKHIIRDPTVTDDRCRKCHNQSETIQHITGACPNLAQTDYTHRHNQIANIIHQRLAVKHKLIPDTHTPYYQYTPKAVLESNTHKIYYDRAILTDRTIHYNRPDITVQDKINKTTYLIDIAVPNTHNIQKTIAEKVHKYTDLKDEVLRIWKQQKVYIVPIVLSTTGIIPKHIHHSLKLLDLKPNTYILLQKAAILNTCRIVRKFLQIDEQTHNAIDLHT

SEQ ID NO: 21768 - protein, 1300 aa, Spilosoma lubricipeda
METRLKSKRIWPLPGGDRRGTPGADAGCDSIRTVGGVELSRRAPSGSPENTTANLTLDRQTDNMDRNSSPCPSTEEPYSPSTVSYTPSEVSTRTPTPIDTPALDVAQGVNTLLPASTKTGKPRVRMRWTEDVNIFIMRTYYRITKLETDMTTYRKLLHEHFLKQYPHVTVSEQRVSDQRRVIIRNEMLTNEKLEQIKEEVRVELEQENISLQSQPLLREPQTINTTSPTTQQTILTNTQSSHNYLNTTEYGIYNTQTPLSTNISTQTETALLLMETEIETVQSNDLLDKSEKKLKEHLQTAIIEFSGFDPTLRPRLPKLKYSLYLSKLTQFFNNTLLHEFFSDESQLTDIHTLIYCSALVISRELGYNTEPLARPQHIYKKPAWQDRLERDITQLRSNIGRLTQFLNNNRSKKVVDTANKIISNNRIHSSHENNNKRPEDVLDTLKQKLALKSHRLARYKKALQRKNDNKLFHTNEKTFYRNLNKNKEKPTNNIIETPAVHDLEEFWAGIWETEIHHNGETQWIAEEERKWADLDEMEFKEISESDIKYVTSRLHNWKSPGIDKIHNYWYKKFTTLHKIIAKNLTSIIHGQQNTPPFIAKGITYMLPKGQYTPQPSQYRPITCLPTIYKILTSAITQKLTTHIEQHNILAEEQKGCRRGHMGCKEQLIIDSLIHKHATTNKRNLHCTYIDYKKAFDSIPHSWLLHILKIYKISPVLIEFLKNIMPLWKTTLHLNNITSREIAIKKGIYQGDSLSPLWFCLALNPISQILQSCKAGYRLKNNSTETSISHLIYMDDIKLYSKTAKEMKALIDVTTKFSKDISMQFGLDKCKTIHIIKGKIQPGDYAVSHDETITAMEPNELYKYLGYQQSKGIDHSKLKMALKDEYKHRVNILSKSNLASKNLVKAINTYAIPILTYSFGIIKWTKTDIQNIQITTRTTLTKHNCLHPKSAIERITIKRQEGGRGLIDISTLWTTQISKLKSFFFEKANNSEIHKVIVSNDLNHTPLNLTQEIEIDNVETNSQTCKIEQWKKKALHGRHPHDLEQPHIDKTASNKWLTLGSLFPETEGFIIAIQDQIINTKNHRKHIIRDPTVTDDRCRKCHNQSETIQHITGACPNLAQTDYTHRHNQIANIIHQRLAVKHKLIPDTHTPYYQYTPKAVLESNTHKIYYDRAILTDRTIHYNRPDITVQDKINKTTYLIDIAVPNTHNIQKTIAEKVHKYTDLKDEVLRIWKQQKVYIVPIVLSTTGIIPKHIHHSLKLLDLKPNTYILLQKAAILNTCRIVRKFLQIDEQTHNAIDLHT

SEQ ID NO: 21769 - protein, 1300 aa, Spilosoma lubricipeda
METRLKSKGIWPLPGGDRRGTPGADAGCDSIRTVGGVELSRRAPSGSPENTTANLTLDRQTDNMDRISSPCPSTEESYSPSTVSYTPSEVSTRTPTPIDTPALDVAQGVNTLLPASTKTGKPRVRMRWTEGVNIFIMRTYYRITKLETDMTTYRKLLHEHFLKQYPHVTVSEQRVSDQRRVIIRNKMLTNEKLEQIKEEVRVELEQENISLQSQPLLREPQTINTTSPTTQQTILTNTQSSHNYLNTTEYGIYNTQTPLSTNISTQTETALLLMETEIETVQSNDLLDPSEKKLKEHLQTAIIEFSGLDPTLRPRLPKLKYSLYLSKLTQFFNNTLLHEFFSDESQLTDIHTLIYCSALVISRELGYNTEPLARPQHIYKKPAWQDRLERDITQLRSNIGRLTQFLNNNRSKKVVDTANKIISNNRIHSSHENNNKRPEDVLDTLKQKLALKSHRLARYKKTLQRKNDNKLFHTNEKTFYRNLNKNKEKPTNNIIETPAVHDLEEFWAGIWETEIHHNGETQWIAEEERKWADLDEMEFKEISESDIKYVTSRLHNWKSPGIDKIHNYWYKKFTTLHKIIAKNLTSIIHGQQNTPPFIAKGITYMLPKGQYTPQPSQYRPITCLPTIYKILTSAITQKLTTHIEQHNILAEEQKGCRRGHMGCKEQLIIDSLIHKHATTNKRNLHCTYIDYKKAFDSIPHSWLLHILKIYKISPVLIEFLKNIMPLWKTTLHLNNITSREIAIKKGIYQGDSLSPLWFCLALNPISQILQSCKAGYRLKNNSTETSISHLIYMDDIKLYSKTAKEMKALIDATTKFSKDISMQFGLDKCKTIHIIKGKIQPGDYAVSHDETITAMEPNELYKYLGYQQSKGIDHSKLKMALKDEYKHRVNILSKSNLASKNLVKAINTYAIPILTYSFGIIKWTKTDIQNIQIITRTTLTKHNCLHPKSAIERITIKRQEGGRGLIDISTLWTTQISKLKSFFFEKANNSEIHKVIVSNDLNHTPLNLTQEIEIDNVETNSQTCKIEQWKKKALHGRHPHDLEQPHIDKTASNKWLTLGSLFPETEGFIIAIQDQIINTKNHRKHIIRDPTVTDDRCRKCHNQSETIQHITGACPNLAQTDYTHRHNQIANIIHQRLVVKHKLIPDTHTSYYQYTPKAVLESNTHKIYYDRAILTDRTIHYNRPDITVQDKINKTTYLIDIAVPNTHNIQKTIAEKVHKYTDLKDEVLRIWKQQKVYIVPIVLSTTGIIPKHIHHSLKLLDLKPNTYILLQKAAILNTCRIVRKFLQIDEQTHNAIDLHT

SEQ ID NO: 21770 - protein, 1300 aa, Spilosoma lubricipeda
METRLKSKRIWPLPGGDRRGTPGADAGCDSIRTVGGVELSRRAPSGSPENTTANLTLDRQTDNMDRISSPCPSTEEPYSPSTVSYTPSEVSTRTPTPIDTPALDVAQGVNTLLPASTKTGKPRVRMRWTEDVNIFIMRTYYRITKLETDMTTYRKLLHEHFLKQYPHVTVSEQRVSDQRRVIIRNKMLTNEKLEQIKEEVRVELEQENISLQSQPLLREPQTINTTSPTTQQTILTNTQSSHNYLNTTEYGIYNTQTPLSTNISTQTETALLLMETEIETVQSNDLLDPSEKKLKEHLQTAIIEFSGLDPTLRPRLPKLKYSLYLSKLTHFFNNTLLHEFFSDESQLTDIHTLIYCSALVISRELGYNTEPLARPQHIYKKPAWQDRLERDITQLRSNLCRLTQFLNNNRSKKVVDTANKIISNNRIHSSHENNNKRPEDVLDTLKQKLALKSHRLARYKKALQRKNDNKLFHTNEKTFYRNLNKNKEKPTNNIIETPAVHDLEEFWAGIWETEIHHNGETQWIAEEERKWADLDEMEFKEISESDIKYVTSRLHNWKSPGIDKIHNYWYKKFTTLHKIIAKNLTSIIHGQQNTPPFIAKGITYMLPKGQYTPQPSQYRPITCLPTIYKILTSAITQKLTTHIEQHNILAEEQKGCRRGHMGCKEQLIIDSLIHKHATTNKRNLHCTYIDYKKAFDSIPHSWLLHILKIYKISPVLIEFLKNIMPLWKTTLHLNNITSREIAIKKGIYQGDSLSPLWFCLALNPISQILQSCKAGYRLKNNSTETSISHLIYMDDIKLYSKTAKEMKALIDATTKFSKDISMQFGLDKCKTIHIIKGKIQPGDYAVSHDETITAMEPNELYKYLGYQQSKGIDHSKLKMALKDEYKHRVNILSKSNLASKNLVKAINTYAIPILTYSFGIIKWTKTDIQNIQITTRTTLTKHNCLHPKSAIERITIKRQEGGRGLIDISTLWTTQISKLKSFFFEKANSSEIHKVIVSNDLNHTPLNLTQEIEIDNVETNSQTCKIEQWKKKALHGRHPHDLEQPHIDKTASNKWLTLGSLFPETEGFIIAIQDQIINTKNHRKHIIRDPTVTDDRCRKCHNQSETIQHITGACPNLAQTDYTHRHNQIANIIHQRLAVKHKLIPDTHTPYYQYTPKAVLESNTHKIYYDRAILTDRTIHYNRPDITVQDKINKTTYLIDIAVPNTHNIQKTIAEKVHKYTDLKDEVLRIWKQQKVYIVPIVLSTTGIIPKHIHHSLKLLDLKPNTYILLQKAAILNTCRIVRKFLQIDEQTHNAIDSHT

SEQ ID NO: 21771 - protein, 1369 aa, Pyrrhopyge crida
MRLRNREIPQAGTQQGESRPGPSGSGCPAYSGGGNVSHNTAQSRTAAVDKTPSQNSPPSTLISSTYSIYQSTSSSPRSYQSPTISSPSSILSLMSCDVAQEAHPNFPAPIPDTTTATHTTEYSTSNRVQHQTNRNVLRTMLPSTTLAGKNRQRMKWSDQINKELLRCYYIVTENETNLTAWRYLLHKKFSEHIPELSHLSEQRLADQIRVIHRNNRVLPAERDHIKQEVALVMNTPNNSNERILTNTGITASNTILQSCTLIQANMQSKSNSDIQIINNTQDTFKSHAFTQTEITTTLITNDIEILQSAPLSDVFAEKIKEDLQSVLVEYAGTDPTLRPKLPKLHQSRKLTQLTDLFNTTILRQFFSDDSQLTDIHTLIYCSALVISKELGYKIGEMPRAQHNETRKPQWQHRIEKDILQLRSDIGRLTQYINNNNRSRKVTNRIEEIFKNTKVHSVHENNNKKPEEYLDTLKQKLALKANRLARYKKSLKRKNDNKLFNANEKCFYRKLVANTNSALPKQDEIPNVKELEQFWAGIWEVEEKHNEEAEWIIEEELRWKELKEMEFDQITELELKNIMTRLNNWKSPGIDKIHNFWYKKLHILHNIIAKNLTQIILGKQNIPSFIAQGITYMIPKGNYTPEPSQYRPITCLPTIYKILTSVITHKITAHIEINNIISEEQKGCRRGHMGCKEQLIIDSLVHRHAITNKRNLHCTYIDYKKAFDSIPHSWLLRILQIYKISPTLINFLKKTMNHWKTQLHLDKITTREIKIKKGIYQGDSLSPLWFCLALNPISHMLHKCEAGYSLKGQNNSTRISHLIYMDDIKTYSKTEKEMKALIDITLKFSNDINMKFGLDKCKTVHIIKGKIRPGDYAIGEEEKITAMEPNEMYKYLGYHQSKCLEHTKLKSFLMQNYKHRIKMICKSLLTGKSLIKSINTYAIPILTYSFGILKWTKTDINNIEISTRSLLTKHNYLHPKSSIERMSIKRYSGGRGLINITNLWKNQIANLKNFFNQKAQNSAIHKAIVENDTNYTPLNLSEVTDLRNDEDTEQAKILQWKKKVMHGRHPHDLEQPHIDSIASNKWLSNGYLFPETEAFMIAIQDQVINTKNYRKYIIKDSALVDDKCRKCQSQPENIQHITGGCPNLTQTDYTHRHNQVANIIHRNLALKHQLIPKIYTPYYKYTPKPVLENSTHKIYFDRAILTDKTIHYNRPDITLQDKSTKTTYIIDIAIPNTHNLQKTIAEKIHKYTDLKEEIKRIWKQDKVYIVPIVLSTTGVIPAYLHHSLKLIDLPYSYIEAQKAAILNTCRIVRKFLQIEDNNQETDTHTRTHTHTHSLTNTHTHTHPYTRAPVHAHTHTHTHSLTNTHTHTHTH

SEQ ID NO: 21772 - protein, 1151 aa, Pyrrhopyge hadassa
MPCDVAQEAHANYPAPIPDTTTATHTTEYSTSNRVQHQTNRNVLGNMLPPTTLAGKNRQRMKWSDQINKELLRCYYIVTKNETNLTAWRYLLHKKISEHIPELSHLSEQRLADQIRVIHRNNRVVPAERDHIKQEVALVMTTPNNSNERILTSTEITASNTILQSSTLIPANMQSKSNSDIQIINNTQDTFKSHAFTQTEITTTLITNDIEILQSAPLSDVFAEKIKEDLQSVLVEYAGTDPTLRPKLPKLHQSRKLTQLTDLFNTTILRQFFSDDSQLTDIHTLIYCSALVISKILGYKIGEMPRGQQKETKKPQWQHRIEKDILQLRSDIGRLTQYINNNNRSSKITNRIKEIFKNTKVHSVHENNNTKPEEYLDTLKQKLALKANRLARYKKSLKRKNDNKLFNANEKCFYRKLVANTNSALPKQDEIPNVKELEQFWAGIWEVEKKHNEEAEWIIEEELRWKELKEMEFGQITELEIKNIMTRLNNWKSPGIDKIHNFWYKKLHILHNIIAKNLTQIILGKQNIPSFIAQGITYMIPKGNYTPEPSQYRPITCLPTIYKILTSVITHKITAHIEKNNIISEEQKGCRRGHMGCKEQLIIDSLVHRHAITNKRNLHCTYIDYKKAFDSIPHSWLLRILQIYKISPTLINFLKKTMNHWKTQLHLDKITTREIKIKKGIYQGDSLSPLWFCLALNPISHMLHKCEAGYSLKVQNNSTRISHLIYMDDIKTYSKTEKEMKALIDTTLKFSNDINMKFGLDKCKTVHIIKGKIRPGDYAIGEEEKITAMEPNEMYKYLGYHQSKCLEHTKLKSSLIQNYKHRIKMICKSLLTGKSLIKAINTYAIPILTYSFGILKWTKTDISNIEISTRSLLTKHNYLHPKSAIERMSIKRYSGGRGLINITNLWKNQIANLKIFFNQKAQNSVIHKAVVENDTNYTPLNLSQVTDLRNDEDTEQAKILQWKKKVMHGRHPHDLEQPHIDSIASNKWLSKGYLFPETEAFMVAIQDQVINTKNYRKYIIKDSALVDDKCRKCQSQPENIQHITGGCPNLTQTDYTHRHNQVANIIHQNLALKHQLIPNIYTPYYKYTPKPVIENNTHKMYFDRAILTDKTIHYNRPDITLQDKSTKTTYIIDIAIPNTHNLQKTIAEKNT

SEQ ID NO: 21773 - protein, 1276 aa, Anisynta dominula
MVLTRSRVPQAGTSNGESRPEPSSGSPSYSGVGNMSQLLTQSQTVVGRTQHHQGKRVTPSPTLTDSTDITRLNSVNSTLCATQEATAFQPVSTKAGKPRVRMKWSPEVNIFIMRTYYRVTKLETDLTIYRKLLHEHFTKQYPEANVTEQRVSDQMRVILRNKMISDKILNEIKQEVKLELQQIDQSPNTNSSNILYSEPSQHFTSHTPESINTSLLPQPNSYSHTIHNTQMTRISNTQFSTNACTQTDTTTILMSNDIETLQPPSLSDSEEKRIQNNLHTVLIEYSGTDPTLRPKLPKLHYSIRLNQLIELFNVKILNQFVSDDSQLIDIHTLIYCSALVISQELGYDVRGTNRSQRKYEKRKPEWQNRLEKDIVQLRSDIGRLTQYIYNNRSKKIMNRVEIIFRNTKIHSTHENNNRKPEEYLDTLKQKLALKVNRLARYKKALKRKNENKLFNTNEKLFYRKLTSDSDFSLPKQTELPDTKHLEQFWAGIWEAEQEHNEKASWIEKEENRWVAIEEMKLEQITETDVKNVTTRISNWKSPGVDKIHNFWYKKLHYLHKTIAKNFTQIIFGQQNTPQFIAQGITYMLPKGKYTTQPSQYRPITCLPTIYKILTSVITHKITTHIEENHILSEEQKGCRRGHMGCKEQLIIDSLIHRHATTNKRNLHCTYIDYKKAFDSIPHSWLIRILQIYKINPVLIEFLKNTMNLWKTKLHLNQITTREIFIKKGIYQGDSLSPLWFCLALNPISHMLHERKAGYHLKHENSDSCMSHLIYMDDIKLYARSEKEMKSLIDTTVKFSTDINMQFGLDKCKTIHIVKGKVRPGDYPVSEEDKISAMEPDELYKYLGYHQSKGLDHIKLKTSLIHEYKRRVKSICKSQLTGKSLIKAINSYAIPILTYSFGIIKWTKTDINNIEIGTRTCLTKHNYLHPKSAIERMTLKRQNGGRGLININQLWKNQITKLRAFFYQKAATSDIHKTIVYNDSNYTPLNLAEDTETNRDDNSEQARTEQWKKKVLHGRHPHDLEQTHIDTTASNKWLTSGTLFPETEGFMVAIQDQVINTRNYRKHIIRDPTLKDDRCRKCHSHPENIQHITGACPNLTQTDYTHRHNQVANIIHQNLALKHHLIPNTYTPYYKYKPNPVLENTTHKMYFDRAILTDKTIHYNRPDITLQDKINKITYLIDIAVPNTHNLQKTIAEKIHKYTDLKDEVTRIWKQQKVYIVPIVLSTTGIIPKYLHHSLKLIELPKFTYTQLQKAAILNTCRIVRNFLQTADNVEIN

SEQ ID NO: 21774 - protein, 1279 aa, Timochares trifasciata
MTAQTSAVVVDIHSPSHIISDHSSPTSSTYSLFETPRSSPHSYELQQLSSGSSSITPLSIDVAQEALTSTSVPTKDITNLTRLNVNVTNTEIRVNHNTPSYSSTTPARGVLKDMFPATTQAGKNRKRMKWSDEIDMKLLHCYYLVTNNETNLTAWRTLLHRKFIESVPELSHLSEQRLADQIRVIHRNNRISPIERERLKQSITITISPTDHQENHAILMSNDHHTNTDTQTNTTHTSPHLSHSHSYTQTETSHMLITNDIEILQPTILPEITNSKLIEDLHTALTKFAGTDPTLRPKLPKLKYSNKLNQLINTFNKNILPTFFSADSQLIDIHTLIYCCALVITQELGFAVEEHSKPQRNRETKVPLWQKRIEKDIVQLRSDIGKLTQYIRNNRSKKVVDRVQEILKNIKTHSTHEKDNSNPKEFLDTLKQKLALKAKRLARYKKTLQRKNDNNLFKTNEKIFYKKLRSGIVTPAADQNQIPDVKELEQFWAGIWEEEKTHNEEAVWIKEEESRWNMLQEMEFEDITETDLSIVTSRLSNWKSPGIDRVHNFWYKKLHCTHKILAKNLTEIIRGHQNPPKFLAQGVTFMLPKEKYTSQPSQYRPITCLPTIYKILTSLITHKITTHVEQNNILSEEQKGCRRGHMGCKEQLVIDSLIHRHATTHKRNLHCTYIDYKKAFDSIPHSWLLRVLQIYKINPVIITFLKNIMKQWKTKLYLNNITTREITIKKGIYQGDSLSPLWFCLALNPISHMLNKLKVGYRLKHENDTTHISHLIYMDDIKLYSRTELEMKHLIDATAKFSKDINMTFGLDKCKTLHIIKGKIEQGSYTVNDDELIISMEPNELYKYLGYYQSKGLDHCKLKASLKLAYIHRVNKICKSLLTGKSLIKAINTYAIPILTYSFGIIKWTKTDINSIAVSTRTILTKHNFLHPKSAIERMSLKRTYGGRGLINVTDLWSNQIDSLRKFFYQKLNNSIIHKAVVQNDFNFTPLNLADRMDLIRGCDIDQSSTLQWKAKTLHGRHPYDLEQAHVDATASNKWLTRGSLFPETEGFIVAIQDQVINTKNYRKHIIKDPTLKDDRCRKCHTHPETIQHITGACPNLAQTEYTHRHNQIANIIHQNLALKHHLIPNTHTPYYNYKPSSVLENNSYKMYFDRAILTDKTIHYNRPDITLQDKKKKTTYLIDIAVPNTHNLQKTIAEKIHKYTDLKDEITRIWKQKKVYIVPIVISTTGVIPKYLHHSLKLIDLPYAYITAQKAAILNTCRIVRKFLQVDYDANETN

SEQ ID NO: 21775 - protein, 1148 aa, Camptopleura auxo
MKWTDNINKELLRCYYIVTHNETKLTAWRTQLHQEFIKSIPELSHLSEQRLADQIRVIHRNNRIPPSERENIKHSILSMLPYSGDIDDNPTPVTQDHILTDIQINTAQCTPLTLTSNAFTQTENILILNNIEILQPTSLLEDTNLSIIEDLKTALTEYSGTDPTLRPKLPKLKYSHKLNQMISLFNNSILSNFFSADSQLIDIHTLIYCSALVISRELGYKVGDNTAVQNNNNNESKKPSWQIRIEKDIAQLRSDIGKLTQYINKNRSRKVVNRVEIIFRNTKVHSTHESNNRRPEEYLDTLKQKLALKSKRLARYKKALKRKTDNALFNKNEKLFYRKLMADKAKEEPSSKELPNVKDLEQFWAGIWEVEEKHNEEAAWITEEESRWEELEEMQYENVTDVEIKIVTSRLSNWKSPGIDKIHNFWYKKFHCLHKIIAKNFTQIIHAQQNTPHFIAQGLSYMIPKTEYTTQPSQYRPITCLTTIYKILTSVLALKINTHVEKNRILAEEQKGCRRGHMGCKEQLIIDSLVHRHATTHKRNLHCTYIDYKKAFDSIPHSWLLRILRIYKINPVIIEFLKNTMNLWKTRLQLHNITTREIAIKTGIYQGDSLSPLWFCLALNPISHMLNKTKVGYRLEYQNNSTSVSHLIYMDDIKLYGRSEKEMQTLIDATVVFSNDIRMSFGLEKCKTIHIIKGKIKSGNYTMGENVKIIAMESNELYKYLGYHQSKGLDHIKLKKSLTQAYKNRVNIICKSLLTGKNLIKAINTYAIPILTYSFGIIKWTKTDINNIEISTRTTLTKNNYLHPKSAIERMVIKRKSGGRGLVNISNLWKNQIGNLRTFFYEKAKDSDIHRAVVKNDNHYTPLNLFDENEVYNKVNEEQEKIKHWKTKVLHGRHPFDLEQPHVDTAASNKWLTKGSLFPETEGFMVAIQDQVINTKNYRKHIIKDPTLTNDKCRKCHNSTESIQHITGACPKLAQTDYTHRHNQIANIIHQNLALKHHLIQNNYTPYYNYHPSPVLENNTHKMYFDRTILTDKTIHYNRPDITLQDKKNKTTYLIDIAVPNTHNLETTRAEKIHKYTDLKDEITRIWKQDKVYIVPIVLSTTGVIPKYLHHSLKLIDLPYSYITAQKAAILNTCRIVRKFLQTDEDNN

SEQ ID NO: 21776 - protein, 850 aa, Pyrrhopyge thericles
MPRGQQKETKKPQWQHRIEKDILQLRSDIGRLTQYINNNNRSSKITNRIKEIFKNTKVHSVHENNNTKPEEYLDTLKQKLALKANRLARYKKSLKRKNDNKLFNANEKCFYRKLVANTNSALPKQDEIPNVKELEQFWAGIWEVEEKHNEEAEWIIEEELRWKELKEMEFGQITELEIKNIMTRLNNWKSPGIDKIHNFWYKKLHILHNIIAKNLTQIILGKQNIPSFIAQGITYMIPKGNYTPEPSQYRPITCLPTIYKILTSVITHKITAHIEKNNIISEEQKGCRRGHMGCKEQLIIDSLVHRHAIVNKRSLHCTYIDYKKAFDSIPHSWLLRILQIYKISPTLINFLKKTMNHWKTQLHLDKITTREIKIKKGIYQGDSLSPLWFCLALNPISHMLHKCEAGYSLKVQNNSTRISHLIYMDDIKTYSKTEKEMKALIDTTLKFSNDINMKFGLDKCKTVHIIKGKIRPGDYAIGEEEKITALEPNEMYKYLGYHQSKCLEHTKLKSSLIQNYKHRIKMMCKSLLTGKSLIKAINTYAIPILTYSFGILKWTKTDISNIEISTRSLLTKHNYLHPKSAIERMSIKRYSGGRGLINITNLWKNQIENLKIFFNQKAQNSVIHKAVVENDTNYTPLNLSQVTDLRNDEDTEQAKILQWKKKVMHGRHPHDLEQPHIDSIASNKWLSKGYLFPETEAFMVAIQDQVINTKNYRKYIIKDSALVDDKCRKCQSQPENIQHITGGCPNLTQTDYTHRHNQVANIIHQNLALKHQLIPNIYTPYYKYTPKPVIENNTHKMYFDRAILTDKTIHYNRPDITLQDKSTKTTYIIDIAIPNIECLPFFKRAYKGNI

SEQ ID NO: 21777 - protein, 1182 aa, Notodonta dromedarius
MRWTNDVNLLIMRTYYRVTKLETDMTIYRKLLHEHFMQQYPEANVSEQRVSDQRRAIIRNRMISDEMLTQVKEEVRLELEQADLSSHLPASPNGTTNARHTSNTDLLLQPYSHTIPITPSLTTQPEVFTYTHLHTTHNTQLTLNSHASTQTETTILLVENEIETLQPIPLPDAIAQKLHQNLQTALIEYAGIDPSVRPRLPKLKYSTHLTQLTQLFNNSILNQFFSEDSQLTDIHTLIYCSALVISRELGYKIEQHTQPHHNNQIKPAWQVRLEKDIVQLRSDIGKLTQYINNNRSKKVVDRVNLIFRNAKVHSSHENDNRKPEEFLDTLKQKLALKAHRLSRYKKALQRKDDNKLFNTNEKFFYRKLNTDKDNPQPTPNVTEIPEINELEKYWIDIWETETQHNENASWLAQEVNRFAAIDEMTFEDITAIDIANVTARLHNWKSPGIDKIHNFWYKKFCTLHKIIAKNLTHIIRGQQSTPQFIAQGITYMLPKGKYTAEPSKYRPITCLPTIYKILTSTIAQKITSHIEQNNILAEEQKGCRRGHMGCKEQLIIDSLIHRHATTNKRNLHCTYIDYKKAFDSIPHSWLLRVLQIYKINPVLIDFLKNTMSLWKTKLHLNTIVTREIKIRKGIYQGDSLSPLWFCLALNPISHLLRERTVGYRLKHESTETCISHLIYMDDIKLYAKTEKEMKILIDTTTEFSKDINMQFGLDKCKTIHVVKGKIRPGDYVVGDEQIISAMEPNELYKYLGYYQSRGLDHTKIKNSLKQEYKRRVNSICKSQLAGKSLIKAINTYAIPILTYSFGIIKWTKTDINHIEINTRTILTKHNCLHPKSAIERMTLKRQEGGRGLINITVLWIKQIANLKTFFLEKANNSHIHKAIVYNDLNFTPLNLTDLTELNIENESEKARKEQWKKKVIHGRHPHDLEQSHIDPIASNKWLTLGSLFPETEGFMIAIQDQIINTRNYRKYIIKDPTLTDDRCRKCHSHPENIQHITGACPNLAQTDYTHRHNQIANIIHQKLALKHKLIPDTHTSYYKYTPNPILENSTHKMYYDRAILTDRTIHYNRPDITLQDKINKTTYLIDIAVPNTHNLQKTIAEKVHKYTDLKDEVIRIWKQEKVYIVPLVLSTTGIIPKHLHHSLKLIDLKPNTYMQLQKAAILNTCRIVRKFLQIDEDDDGTN

SEQ ID NO: 21778 - protein, 1325 aa, Spialia ferax
MRLRNRKIPQAGTREGESCPGPSGSGRPTYSGGGNVSHNTAQSHTVAADKTPSEHSQITSHPSSPTIPPSPTSTLYQSPGSSPHTYSHSYQSSSRSTTVSPLSCDVAQEAYANSSGPIPDTINGTHTLQYSLNNCVHNQTHSNILQNMLPPTTLAGKTRQRMRWSDQINRELLRCYYIVTSNETNLTAWRTLLHKKFSEHIPELNHLSEQRLADQIRVIHRNNRIKLADRERIKNEVALIISTSNSSDEHNFTTPSTTNRQQSTSQANSDTHTTNNTQLTPKSHAFTQTETINTLIENDIEILQPIPLSDSPVEKITEHLQSVLLEYAGTDPTLRPKLPRLHQSRRLSQLTELFNNTILRHFFSDNTAMIDIHTLIYCSALVISKELGYKVGETFRVPPKETKKSEWQERIEKDILKLRSDIGKLTQYINNNTKSRKVINRIEEIFKNTKVHSSHESNNRKPEEYLDTLKQKLALKANRLARYKKTQKRKNDNKLFNVNEKIFYRKIKAGTKDNLPKQNELPNTKDLEEFWAGIWEIDDKHNEKATWIEDEENRWKELEEMKFDTITEIDIKNVTARLNNWKSPGIDKIHNYWYKKFNILHNVLAKNLTEIVIGKQNTPHFIAQGITFMIPKGKYTSEPSQYRPITCLPTIYKILTSVITNKITTHLEKNNIIAEEQKGCRRGHMGCKEQLIIDSLVHRHAITNKRNLHCTYIDYTKAFDSIPHSWLLRILHIYKINPTLISFLKNIMNLWKTKLHLDHITTRFITINKGIYQGDSLSPLWFCLALNPISHMLNECAAGYSLKTQSEKIQISHLIYMDDIKIYSKTEKEMKTLIDTTLKFSRDINMKFGLDKCKTIHIIKGKMRPGDYVISEEDKITAMEGNEMYKYLGYYQSKSLDHTKLKSSLIKEFKTRVNNICKSLLTGKSLIKAINTYAIPILTYSFGIVKWTKTDINNIEIVTRTCLTKHNYLHPKSAIERMTLKRYNGGRGLINISNLWKNQIINLRAFFYQKAHNSIIHRAVVQNDTNFTPLNLIEQIEINKDEDTEEAKITKWKEKVLHGRHPHDLEQSHIDTLASNKWLVKGYLFPETEAFMIAIQDQVINTRNYRRHIIKDRTVTDDRCRKCHSHPENIQHITGACPNLAQTDYTHRHNQVANIIHQNLALKHQLIPNIHTPYYKYTPNPVLENKTHKMYFDRAILTDKTIHYNRPDITLQDKKNKITYLIDIAIPNTHNIQKTIAEKIHKYTDLKDEVTRIWKQEKVYIIPIVLSTTGVVPTYLHHSLRLIDLPYAYIEAQKAAILNTCRIVRKFLQLDDDNPRTDTQSNTVH

SEQ ID NO: 21779 - protein, 1350 aa, Jemadia hospita
MRLRNREIPQAGTLRGESRPGPSGSGCPAYSGGGNVSHNTVQSRTAAVDKIPSQNSPPSSPTSSRYSTYQSTSSSPYSYQSPTTSSRSSALSLLSCDVAQEAHANFPAPIPDTTNVTHTTEQPTSNCVQYQKNKNVLQNMLPPTTLAGKNRQRMKWSDQINKELLRCYYIVTKNETNLTAWRYSLHKKFSEHIPELSHLSEQRLADQIRVIHRNNRVIPAERDHIKQEVALVMCTPNNSNERSVTNTGNTASNTTPQSSRLIQANIQSKSNSDIQINNTQDTFKSHAFTQTETTTTFITNDIQILQSASLPDVFAEKIKEHLQSVLVEYTGTDPTLRPKLPKLHQSRKLTQLTNLLNTTILRQFFSDDSQLTDIHTLIYCCALVISKELGYKIGEMPRAQHTEPRKPHWQHRIEKDILQLRSDIGRLTQYINNNNRSRKITNRIEEIFKNTKVHSVHENNNTKPEEYLDTLKQKLALKANRLARYKKSLKRKNDNKLFNTNEKCFYRKLVANTNNVLPNQKERPNVKDLEQFWAGIWEVEEKHNEEAEWIIEEEQRWKELKEMEFGHITELEIKNIMTRLNNWKSPGIDKIHNFWYKKLHILHNIIAKNLTQIILGKQNIPSFIAKGITYMIPKGNYTTEPAQYRPITCLPTIYKILTSIITHKITVHIEKNNIISEEQKGCRRGHMGCKEQLIIDSLVHRHAITNKRNLHCTYIDYKKAFDSIPHSWLLRILQIYKISPNLVDFLKKTMNLWKTQLHLDKITTREIKIKKGIYQGDSLSPLWFCLALNPISHMLHKCEAGYSLKVQNNSTRISHLIYMDDIKTYSKTEKEMKALIDTTLKFSNDINMKFGLDKCKTVHIIKGKIRPGDYAIGEEEKITAMEPNEMYKYLGYHQSKFLEHTKLKSSLMQNYKHRIKIICKSLLTGKSLIKAINTYAIPILTYSFGILKWTKTDINNIEISTRSLLTKHNYLHPKSAIERMSIKRHSGGRGLINISILWKNQIVNLKNFFYQKAQESVIHKAVVENDTNYTPLNLTEVTDLHNDDNTEQAKIIQWKKKVLHGRHPYDLEQPHIDSIASNKWLSKGYLFPETEAFMVAIQDQVINTRNYRKHIIKDSAVIDDKCRKCHSQPETIQHITGACPNLTQTDYTHRHNQVANIIHQNLALKHQLIPNIYTPYYKYTPKPVLENSTHKMYFDRAILTDKTIHYNRPDITLQDKSTKTTYLIDIAIPNTHNLQKTIAEKIHKYTDLKEEITRIWKQDKVYIVPIVLSTTGVIPTYLHHSLKLIDLPHSYIQAQKAAILNTCRIVRKFLQIEDNNQETDTHIPVHTHTPVHTHTRTHAHTPLTHTRTHT

SEQ ID NO: 21780 - protein, 1288 aa, Phalera bucephala
MKMVLTRSRVPQAGTSGNSTGESRPEPSSGSPSYSGGGNMSQLPIQSQTVVGIQQNPNSRPPPLTLTDSTDHSRPSSATPTLSATQEANAFQPASTKAGKPRVRMKWTNDVNLFIMRTYYRVTKLETDLTIYRKLLHEHFIRQYPEVNVSEQRVSDQRRVIIRNKMISDKILAQIKEEVRIELEQIESSPLQSIPLAAPSLQSSQHTQRNVPDTNLPSQSDLFSHTLPSTHSQNALRTPLTSNSHAFTQTEITTILMVNEIETLRPTPLPDTIAQKLHDNLQTNLVKYAGTDPTLRPKLPKLKYSAQLTQLTEIFNNKILHHFFSEDSQLIDIHTLIYCSALVISLELGYKIIDDESNRPQRNIERKPTWQIRIERDISQLRSDIGRLTQFINNNRSKKVVDRVEIILKNTNIHSVHESNNRKPEEYLDTLKQKLALKAHRLARYKKALVRKNDNKLFHTNEKLFYRKLTTDNANPKPNESEIPKAEDLENFWGGIWETDTQHNEEATWIAEEESRWEGLEVMKFEEITETDIKNTVARLSNWKSAGIDRIHNFWYKKFNTLHKILAKNLTQIIHRQQNTPAFIAQGITYMLPKGKSTTQPSLYRPITCLPTIYKILTSVIAQKINIHIENNNILSEEQKGCRRAHMGCKEQLIIDSLVHRHATVNKRNLHCTYIDYKKAFDSIPHSWLLRILQIYKINPVIIEFLKNTMSLWKSKLHLNHIITREIHIKKGIYQGDSLSPLWFCLALNPISHMLRERKAGYHLKHDNINTCISHLIYMDDIKLYAKSEKEMKLLIDTTVEFSKDINMQFGLDKCKTIHIIQGKIRPGDYAISDDERIIAMDPNELYKYLGYHQSKGIDHCKIKTSLLREYKYRVNAICKSKLTGKSIIKAINTFATPILTYSFGIIKWTKTDINHIEISTRTILTKHNYLHPKSAIERMTLKRENGGRGLINIYLLWIKQITNLKLFFQQKARHSDLHKAIVKNDFNHTPLNLTIENGPSTEMHSEQERTEQWKKKVLHGRHPHDLDQAHVDSIASNKWLTLGSLFPETEGFMVAIQDQIINTKNYRKHIIKDPTLTDDRCRKCHSHPENIQHITGACPNLSQTDYTHRHNQIANIIHQNLAIKHHLIPNTNTPYYKYNPSPILENSTHKIYYDRAILTDRTIHYNRPDITLQDKNSKTTYLIDIAVPNTHNLQRTIAEKVHKYTDLKEEVTRIWKQNKVYIVPVVLSTTGVIPKYLHHSIKLIDLKPTIYILLQKAAILNTCRIVRKFLQIEEGTNETDGQTDLNT

SEQ ID NO: 21781 - protein, 1252 aa, Charidia lucaria
MRLRSREIPQAGTREGESRPGPSSSGCPSYSGGGNVSHMTAQPSAVAVNETTLDITDSSSCPPSIKKFQSPKTSPHSLELQKSPFSSISVSPGPCNVVSEAHACSPAPITGITSPTHVLQNNMNNCVDYNINSNLKIRSAKNILQEMLPATTLAGKNRRRMKWSDQINRELLRCYYEVTQCETNLTAWRPLLHRKFTETLPELSHLTEQRLADQIRVIHKNNRIPVTERENIKQSISSLTFTSSFSNERTFTTHSDFRPKNNMTPTTENNKCTLALQTQTSDNSQHIPNTHALTQTISTHILLDNDIEILNPTPISDSIEGKIREDLHTALIQYGGTDPTLRPTLPKLKYNIKLDKLVDLFNNKILCQFFSSDSKLSDIHTLIYCSALVISKELGYESKEYRQRHPREQRKPAWQIRLENNITQLRSDIGRLTQYINNNRSKKVINTIEKIFRNLKVHSAHEKDNKTPEEYLDTLKQKLAVKCNRLTRYKKALKRKNDNKLFTTNEKLFYRKLISNKSSSVTQEIPNEKDLETFWSGIWEVEETHNNEAKWIGEEEEKWKDLQEMKFEKITETDIKCVTERLHNWKSPGIDKIHNFWYKKFYTLHKIMAENFTEIIIAQQNTPQFIAQGITYMIPKENHSIQPSQYRPITCLPTVYKILTSAITNKIIAHVEQNNIFSEEQKGCRRGHMGCKEQLIIDSLIHRHSTINKRNLHCTYIDYKKAFDSIPHSWLIRILKIYKINPTLIDFLKKIMTMWKTKLHLDNIITREITIKRGIYQGDSLSPLWFCLALNPISYMLNKSKSGYPLKHQNSETSISHLIYMDDIKLYAKTQIQMQNLINISAKFSQDIKMNFGLDKCKTVHIIKGKIQPGDYLVNDEERITAMESHDTYRYLGYNQLKGIDHSTIKTSLLKEFKHRINSICKSSLASKRLIKAINTYAIPILTYSFGIIKWTKTDIKNIEIIIRTLLTKHNYLHPKSAIERMILKRQNGGRGLISIYNLWTNQINNLKIFFKQKANNSNIHRAVVKSDNNLTALNLADDTMPDKEPESVETRKEQWKKKVLHGRHPHDLEQIHVDATASNKWLSMGYLYPETEGFMIAIQDQVINTRNYRKHIIKDPKIADDKCRKCHMHSENIQHITGACPNLTQTDYTHRHNQIANIIHQNLAIKHKLLQTTYTPYYNYVPNPVLENKTHKLYFDRTILTDRTTHYNRPDITLQDKKNKTTYLIDIAVPNTHNLQKTIAEKIHKYMDLKD

SEQ ID NO: 21782 - protein, 1325 aa, Polyctor polyctor
MRLRNRQLPQAGTRKGESRPGPSGSGCPAYSGEGNVSHSTAQSRTVADDKVHSQNSQIILPTSSPTSSSSSHSYTSYQSSTNSSRSTLESLLSCDVAQEASANSPAPILDTTYDTHIPEYSLKNSVHNQTHRNVLQNMLPSTTLAGKNRQRMKWSDEINKELLRCYYIVTQNETHLTAWRNLLHKKFAEHIPELSHLSEQRLADQIRVIHRNNRVLPSERDHIKQEVAALLSTSNNSMKNIQTNTTYEPSTSARCQSHAVIQINEKLTPNSDIHIIDNTQGTFKSHAATQTESTTTLITNDIEILQTTPHLDVSVEKIKENLQATIVEYAGTDPTLRPKLPKLYYSRKLTQLIDLFNNTILKHFFSNDTELVDIHTLIYCSALVISKELGYKIGETLRAHNKVAKKPQWQDRIERDILQLRSDIGRLTQYINNNNRSRKVINRIKDIFKNTKVHSSHENNNTKPEEYLDTLKQKLALKANRLARYKKSLKRKNDNKLFNVNEKCFYRDLTTDTNNISCKQNEIPNLKDLEQFWAGIWEKEEKHYEKAAWITEEQNRWKELEEMKFDLITELDIKNITARLNNWKSPGIDKIHNFWYKKLHILHIVIAKNLTQIILRKQSTPRFITQGITYMIPKGNYTSEPSQYRPITCLPTIYKILTSVITHKITAHIEKNNIISEEQKGCRRGHMGCKEQLIIDSLVHRHAVTNKRNLHCTYIDYKKAFDSIPHSWLLRILEIYKISPSIIDFLKQTMNQWKTKLHLDTIITREITIKKGIYQGDSLSPLWFCLALNPISHMLHKCGAGYCLKSENNNTRISHLIYMDDIKIYSKTEKEMKTLIDTTLKFSNDINMKFGLDKCRTVHIIKGKIRPGDYTVGEQEIITAMQPSEMYKYLGYYQSKCLDHSKLKLSLVQNYKHRVKTICKSLLIGKSLIKAINTYAVPVLTYSFGIVKWSKTDINNIEISTRTILTKHNYLHPKSAIERMTIKRNNGGRGLINITNLWKNQIVNLRDFFYQKARISTIHKAVVENDINFTPLNLIEKSESRNDNYSEQVKIEQWKKKILHGRHPHDLEQPHIDPIASNKWLTKGYLFPETEAFMIAIQDQIINTKNYRKYIIKDSAITDDRCRKCHKHPENIQHIIGACPNLAQTDYTHRHNQVANIIHQNLAIKHQLIPNTYTPYYKYTPSPVLENNTHKMYFDRAILTDKTIHYNRPDITLQDKRSKITYFIDIAIPNTHNLQKTIADKIHKYTDLKEEITRIWKQDKVYIVPIVLSTTGVIPKYLHHSLKLIDLPHSYIETQKAAILNTCRIVRKFLQIENENYETDIHTDT

SEQ ID NO: 21783 - protein, 1123 aa, Phalera bucephala
MISDKILAQIKEEVRIELEQIESSPLQSIPLAAPSLQSSQHTQRNVPDTNLPSQSDLFSHTLLSTHSQNALRTPLTSNSHAFTQTEITTILMVNEIETLRPTPLPDTIAQKLHDNLQTNLVKYAGTDPTLRPKLPKLKYSAQLTQLTEIFNNKILHHFFSEDSQLIDIHTLIYCSALVISLELGYKIIDDESNRPQRNIERKPTWQIRIEKDISQLRSDIGRLTQFINNNRSKKVVDRVEIILKNTNIHSVHESNNREPEEYLDTLKQKLALKAHRLARYKKARLRKNDNKLFHTNEKLFYRKLTTDNANPKPNESEIPKAEDLENFWGGIWETDTQHNEEATWIAEEESRWEGLEVMKFEEITETDIKNTVARLSNWKSAGIDRIHNFWYKKFNTLHKILAKNLTQIIHRQQNTPAFIAQGITYMLPKGKSTTQPSLYRPITCLPTIYKILTSVIAQKINIHIENNNILSEEQKGCRRAHMGCKEQLIIDSLVHRHATVNKRNLHCTYIDYKKAFDSIPHSWLLRILQIYKINPVIIEFLKNTMSLWKSKLHLNQIITREIHIKKGIYQGDSLSPLWFCLTLNPISHMLRERKAGYHLKHDNINTCISHLIYMDDIKLYAKSEKEMKLLIDTTVEFSKDINMQFGLDKCKTIHIIQGKIRPGDYAISDDERIIAMDPNELYKYLGYHQSKGIDHCKIKTSLLREYKYRVNAICKSKLTGKSIIKAINTFATPILTYSFGIIKWTKTDINHIEISTRTILTKHNYLHPKSAIERMTLKRENGGRGLINIYLLWIKQITNLKLFFQQKARHSDLHKAIVKNDFNHTPLNLTIENGPSTEMHSEQERTEQWKKKVLHGRHPHDLDQAHVDSIASNKWLTLGSLFPETEGFMVAIQDQIINTKNYRKHIIKDPTLTDDRCRKCHSHPENIQHITGACPNLSQTDYTHRHNQIANIIHQNLAIKHHLIPNTNTPYYKYNPSPILENSTHKIYYDRAILTDRTIHYNRPDITLQDKNSKTTYLIDIAVPNTHNLQRTIAEKVHKYTDLKEEVTRIWKQNKVYIVPVVLSTTGVIPKYLHHSIKLIDLKPTIYTLLQKAAILNTCRIVRKFLQIEEGTNETDGQTDLNT

SEQ ID NO: 21784 - protein, 1328 aa, Udranomia orcinus
MRLRSRQIPQAGTRKGESRPEASASGSPSYSGGGNVSHMTTQFTAVVDKPSSHINITSDSSSPISSTHSLFQSPSSSPQSYELQYSSRSTTITPLSCDVAQEAYAISPEPTIDTTNPTRLTQNALCCSVDHNTPTNTWNTHHNLSAKSVLKEMLPTTTLAGKSRQRMRWTDEINRELLLCYYIVTHNETNLTAWRPLLHRKFSESIPELGHLSEQRLADQIRVIHKNNRVPEIERERIKQSSLLIISSNSTDENNFTINKEHHNNRNSTTLSSKKQTNSGTQSNPQLTLDSNPLTQDIFTHAAINIETPKNFDALTEVTTSEINDNLQTALIQYTGTDPTLRPKLPKLKYSNKLNHLIELFNRKILNNFFTDDSQLIDIHTIVYCSALVISKELGYKIRETTEPQRNYDIKKPNWQKRLEKDIEQLRSDIGRLTQYIKNNRSKKVVDRVEIIFKNTIVHSTHENHNKRPEEFLDTLKQKLRLKSNRLARYKKAMKRKADNSLFTTNEKLFYRKLRTDTSTSVFSQKEVPNVKDLENFWAGLWETEEYHNEEAEWIKEEERRWRKVEEMKFDQITEIDIKTVTSRLNNWKSPGVDKVHNFWYKRLYALHNIIARNLNQIVFGQQVIPHFITQGMTFMLPKEKYTNQPSQYRPITCLPTIYKILTSVITHKITAHVEEHNILAEEQKGCRRGHMGCKEQLIIDSLVHRHSFNNKKNLHCTYIDYKKAFDSIPHSWLLRVLEIYKINPVLIIFLKNIMSLWKTKLHLNTITTRDIVIKRGIYQGDSLSPLWFCLALNPISNMLQNSKAGYILKNRDNDTYLSHLIYMDDIKLYSKTEREMETLIDITAKFSNDINMTFGLDKCKTIHIIKGKITPGDYVLNAEENITAMEPNDLYKYLGYHQSKGLDHTKLKTSLLHEYKHRVSVICKTLLTSKKLIKAINTYAVPILTYSFGILKWTKTDIIHIERNTRTLFTKHNYLHPKSAIERMTVKRQNGGRGLINISTLWKNQVINLRSFFYRKANDSSIHDAIVQNDFNFTALNLSEKLGPDKDADSEKIRIEQWKSKVLHGRHPHDLEQPHIDATASNKWLTTGHLFPETEGFMLAIQDQVINTKNYRKHIIKDPTLTNDKCRKCHSHPENIQHIIGACPNLTQTDYTHRHNQIANIIHLNLALKHHLIPNTYTPYYKYIPNPVLENKNYKMYFDRAILTDKTIHHNRPDITLQDKKHKITYLIDIAVPNTHNLQKTIAEKIHKYMDLKDEITRIWKQDKVYIIPIVLSSTGIIPKYLHHSLKMIDLPHCYIPAQKAAILNTCRIVRKFLQIDTDTNGTDAHS

SEQ ID NO: 21785 - protein, 1249 aa, Phalera bucephala
MSQLPIQSQTVVGIQQNPNSRPPPLTLTDSTDYSRPSSATPTLSATQEANAFQPASTKAGKPRVRMKWTNDVNLFIMRTYYRVTKLETDLTIYRKLLHEHFIRQYPEVNVSEQRVSDQRRVIIRNKMISDKILAQIKEEVRIELEQIESSPLQSIPLAAPSLQSSQHTQRNVPDTNLPSQSDLFSHTLLSTHSQNALRTPLPSNSHAFTQTEITTILMVNEIETLRPTPLPDTIAQKLHDNLQTNLVKYAGTDPTLRPKLPKLKYSAQLTQLTEIFNNKILHHFFSEDSQLIDIHTLIYCSALVISLELGYKIIDDESNRPQRNIERKPTWQIRIEKDISQLRSDIGRLTQFINNNRSKKVVDRVEIILKNTNIHSVHESNNREPEEYLDTLKQKLALKAHRLARYKKARLRKNDNKLFHTNEKLFYRKLTTDNANPKPNESEIPKAEDLENFWGGIWETDTQHNEEATWIAEEESRWEGLEVMKFEEITETDIKNTVARLSNWKSAGIDRIHNFWYKKFNTLHKILAKNLTQIIHRQQNTPAFIAQGITYMLPKGKSTTQPSLYRPITCLPTIYKILTSVIAQKINIHIENNNILSEEQKGCRRAHMGCKEQLIIDSLVHRHATVNKRNLHCTYIDYKKAFDSIPHSWLLRILQIYKINPVIIEFLKNTMSLWKSKLHLNHIITREIHIKKGIYQGDSLSPLWFCLALNPISHMLRERKAGYHLKHDNINTCISHLIYMDDIKLYAKSEKEMKLLIDTTVEFSKDINMQFGLDKCKTIHIIQGKIRPGDYAISDDERIIAMDPNELYKYLGYHQSKGIDHCKIKTSLLREYKYRVNAICKSKLTGKSIIKAINTFATPILTYSFGIIKWTKTDINHIEISTRTILTKHNYLHPKSAIERMTLKRENGGRGLINIYLLWIKQITNLKLFFQQKARHSDLHKAIVKNDFNHTPLNLTIENGPSTEMHSEKERTEQWKKKVLHGRHPHDLDQAHVDSIASNKWLTLGSLFPETEGFMVAIQDQIINTKNYRKHIIKDPTLTDDRCRKCHSHPENIQHITGACPNLSQTDYTHRHNQIANIIHQNLAIKHHLIPNTNTPYYKYNPSPILENSTHKIYYDRAILTDRTIHYNRPDITLQDKNSKTTYLIDIAVPNTHNLQRTIAEKVHKYTDLKEEVTRIWKQNKVYIVPVVLSTTGVIPKYLHHSIKLIDLKPTIYTLLQKAAILNTCRIVRKFLQIEEGTNETDGQTDLNT

SEQ ID NO: 21786 - protein, 1288 aa, Phalera bucephala
MKMVLTRSRVPQAGTSGNSTGESRPEPSSGSPSYSGGGNMSQLPIQSQTVVGIQQNPNSRHPPLTLTDSTDYSRPSSATPTLSATQEANAFQPASTKAGKPRVRMKWTNDVNLFIMRTYYRVTKLETDLTIYRKLLHEHFIRQYPEVNVSEQRVSDQRRVIIRNKMISDKILVQIKEEVRIELEQIESSPSQSIPLAALSLQSSQHTQQNVPDTNLPSQSDLFSHTLPSTHSHNTLRTPLTSNSHAFTQTETTTILMVNEIETLRPTPLPDTIAQKLHDNLQTNLVKYAGTDPTLRPKLPKLKYSAQLTQLTEIFNNKILNHFFSEDSQLIDIHTLIYCSALVISLELGYKIKDEESNRPQRNIERKPTWQIRIEKDIAQLRSDIGRLTQFINNNRSKKVVDRVEIILKNTKIHSVHESNNRKPEEYLDTLKQKLALKAHRLARYKKALLRKNDNKLFHTNEKLFYRKLTTDNANSKPNESEIPKVEDLENFWGGIWETDTQHNEEATWIAEEESRWEGLEVMKFEEITETDIKNTVARLNNWKSAGIDRIHNFWYKKFNTLHKILAKNLTQIIHRQQNTPAFIAQGITYMLPKGKSTTQPSQYRPITCLPTIYKILTSVIAQKINIHIENNNILSEEQKGCRRAHMGCKEQLIIDSLVHRHATVNKRNLHCTYIDYKKAFDSIPHSWLLRILQIYKINPVIIEFLKNTMSLWKSKLHLNHIITREIHIKKGIYQGDSLSPLWFCLALNPISHMLRERKAGYHLKHDNINTRISHLIYMDDIKLYAKSEKEMKLLIDTTVEFSKDINMQFGLDKCKAIHIIQGKIRPGDYAISDEERIIAMDPNELYKYLGYHQSKGIDHCKIKTSLLREYKYRVNAICKSKLTGKSIIKAINTFATPILTYSFGIIKWTKTDINHIEISTRTILTKHNYLHPKSAIERMTLKRENGGRGLINIYLLWIKQITNLKLFFQQKARHSDLHKAIVKNDFNHTPLNLTVENGPSTEMHSEQERTEQWKKKVLHGRHPHDLDQAYVDSIASNKWLTLGSLFPETEGFMVAIQDQIINTKNYRKHIIKDPTLTDDRCRKCHSHPENIQHITGACPNLTQTDYTHRHNQIANIIHQNLAIKHHLIPNTNTPYYKYNPSPILENSTHKIYYDRAILTDRTIHYNRPDITLQDKKSKTTYLIDIAVPNTHNLQRTIAEKVHKYTDLKEEVTRIWKQNKVYIVPVVLSTTGVIPKYLHHSIKLIDLKPTIYILLQKAAILNTCRIVRKFLQIEEDTNETDGQTDLNT

SEQ ID NO: 21787 - protein, 1267 aa, Apyrrothrix mulleri
MRLRNREIPQAGTRQGESRPEPAGSGCPAYSGGGDVSHNTAQSQTAAVDKTPSQNSPASSPISSKYSIYQSTSSSPHSYQSPTTSSRSSTLSLLPCDVAQEAYAKFPAPIPDTTTATHTTEYSASNCVPHQKNRNVLQNMLPPTTLAGKNRQRMKWSDQINKELLRCYYIVTKNETNLTAWRYLLHKKFSEHIPELSHLPVQRLADQIRVIHRNNRILPAERDHIKQEVALVMSTLNNSNERILTNTGNTASNTIPESCRLIQANIPSKSNTDIQIINNIQDTFKSHAVTQTETTTTLITNDIEILQSAPLPDVFAEKIKEKLQSVLVEYAGTDPTLRPKLPKLHQSRKLTQLTDLFNTNILRQFFSDDSQLTDIHTLIYCSALVISKELGYKIGETPRAQHKETRKPQWQHRIEKDILQLRSDIGRLTQYINNNNRSRKVTNRIEEIFKNTKVHSVHENNNTKPEEYLDTLKQKLALKANRLDRYKKSLKRKNDNKLFNGNEKCFYRKLVTNTNNTLPKQNEIPNVKELEKFWAGIWEVEEKHNEEAEWIIEEEQRWKKLKEMEFGQITDLEIQNIMTRLNNWKSPGIDKIHNFWYKKLHILHNIIAKNLTQIILGKQNIPSFIAQGITYMIPKGSYTPEPSQYRPITCLPTIYKILTSVVTHKITAHIEKNNIISEEQKGCRRGHMGCKEQLIIDSLVHRHAITNKRNLHCTYIDYKKAFDSIPHSWLLRILQIYKISPDLINFLKKTMNLWKTQLHLENITSREIKIKKGIYQGDSLSPLWFCLALNPISHMLHKCEAGYSLKVQNNSTRISHLIYMDDIKTYSKTEKEMKALIDTTLKFSNDINMKFGLDKCKTLHIIKGKIQPGDYSIGEEENITALEPNEMYKYLGYHQSKCLEHTKLKSSLIQNYKHRIKMICKSLLAGKSLIKAINTYAIPILTYSFGIIKWTKTDINNIEISTRSLLTKHNYLHPKSAIERMSIKRYSGGRGLINITNLWKNQIVNLKNFFYQKAQKSVIHKAVVENDTNYTPLNLTDVTDLRNDEDTEQAKILQWKKKVMHGRHPYDLEQPHIDSIASNKWLSKGYLFPETEAFMVAIQDQVINTRNYRKHIIKDPTVVDDKCRKCQSHPENIQHITGACPNLTQTDYTHRHNQVANIIHQNLALKHQLIPNIYTPYYKYTPKPVLENSSHKMYFDRAILTDKTIHYNRPDITLQDKSTKTTYLIDIAIPNTHNLQKTIAEKIHKYTDLREEITRIWKQDKVYIVPI

SEQ ID NO: 21788 - protein, 1263 aa, Toxidia parvulus
MVLTRSRVPQAGTSNGESRPEPSSGSPSYSGVGNMSQLLTQSQTVVGRTQHQQSRRVTPSNPINPTLSATQEANAFQPASTKAGKPRVRMKWSPEVNTFIMRTYYRVTKLETDLTIYRKLLHEHFIRQYPEANVTEQRVSDQMRVILRNKMISDKMLDEIKQEVKLELELEQIDHSQITNSPSICSEPSQYLTSHTSESVNTRSLPQPNSYSYTTPNTQSHTINSTQCSSNAYTQTETTTILMVNEIETLQLTSLSDSEETRIYNNLQSVLIEYSGTDPTLRPKLPKLKYSKRLNQLIELFNAKILNQFVSDDSQLIDIHTLIYCSALVISQELGYEVEGTNRLHHKYEKRKPEWQNRLEKDILQLRSDIGRLTQYINNNRSRKVVNRIEIIFRNTKVHSSHENNNKKPEEYLDTLKQKLSLKVNRLARYKKALKRKNENKLFKTNEKLFYRKLTSDSDSSVAKQTELPDTKQLEQFWAGIWEADEHHNEKASWIEEEENRWVAIEEMKLEQITETDIQNVTLRVSNWKSPGVDRIHNFWYKKFHSLHKTIAKNFTEIIFGQQTTPQFIAQGITYMLPKGKYTDKPSQYRPITCLPTIYKILTSVITHKITKHIGENHILSEEQKGCRPGHMGCKEQLIIDSLIHRHATSNKKNLHCTYIDYKKAFDSIPHSWLIRILQIYKINPNIIEFLKNTMKLWKTKLHLNQIITREIAIKKGIYQGDSLSPLWFCLALNPISHLLNERRAGYHLKHVNSDSRISHLIYMDDIKLYARSETEMKTLIDTTVEFSKDINMQFGLDKCKTIHIVKGKVRPGDYPVSDDDKITAMEPHELYKYLGYHQSKGLDHTKLKTSLIDEYKRRVRSICKTQLTGKNLIKAINTYAIPILTYSFGIIKWTKTDINNIEIGTRTSMTMHNYLHPKSAIERMTIKRQNGGRGLINIDHLWKNQICNLRSFFYQKANTSNIHKAIVNNDTNYTPLNLAEDTDTKRDDNPEQARREQWKKKVLHGRHPHDLEQSHIDTIASNKWLTSGTLFPETEGFMIAIQDQVINTRNYRKHIIKDSTLKDDKCRKCHSHPENIQHITGACPNLTQTDYTHRHNQVANIIHQNLALKHHLIPNTYTPYYKYKPNPVLENTTHKIYFDRAILTDKTIHYNRPDITLQDKRNKTTYLIDIAVPNTHNLQKTIAEKIHKYTDLKDEIIRIWKQDKVYIVPIVLSTTGVIPKYLHHSLKLIELPKFTYTQLQKAAILNTCRIVRKFLQTEDDFN

SEQ ID NO: 21789 - protein, 1209 aa, Timochares trifasciata
MNDNTNPTRLSTVINVNTSRVDHTHYTRTNHIISRSSNTPASGVLKDMLPATTLAGKSRKRMKWSDDVNRELLRCYYIVTQNESNLTAWRTLLHQKFTEHIPELSHLSEQRLADQIRVIQKNNRITLEERERLKDSVISLISSSDYHHEITTPIPNDHLNQETQLSNIPHSSSLHIFTPTETGHANVLVTDDMDIIQPTTLSEDTSMKMIEDLHTALAEYTGTDPSLRPQLPKLKYSNKLDQLIKIFNNKVLSNFFSDDSQLLDIHTLIYCSALVISREIGYKIENKIGPLRKNATQLRKPAWQVRLEKDVILLRSDIGRLTQYISNNRSKKVVNRVEIIFKNTKVHSSHESNNKKPEEYLDTLKQKLALKSKRLARYKKALKRKTDNRLFETNEKLFYRKLIAERDATSSHKEIPNVRDLEQFWAGIWELEEEHNENAVWITEEENRWKALEEMQFENITESEMKIITGRLNNWKSPGIDRIHNFWYKKFHCLHKILAKNLTQIILGQQNTPPFIAQGISYMLPKTKHTPQPSQYRPITCLNTIYKILTSILTHKISNHIENNRIIAEEQKGCRRGHMGCKEKLIIDSLIHRHAITHKKNLHCTYIDYKKAFDSIPHSWLLRILKIYKISPIIIEFLKNTMTLWKTKLQLDHISTREINIKTGIYQGDSLSPLWFCLALNPISYMLNKNKVGYNLKHQSNSTYMSHLIYMDDIKLYSKTEKEMQTLIDITVGFSKDINMSFGLDKCKAIHIVNGKIKPGDYTIHTHEKIAAMEPHEVYKYLGYHQSKALDHIKLKNTLMQVYNQRVNIICNSLLKSRSLIKAINTYAIPILTYSFGIIKWTKTDINKIERNTRTTLTKYNYLHPKSAVERMTIKRESGGRGLININALWKNQIVNLRTFFYKKANHSNIHKAIVQNDNNLTPLNLHDENTEHVRDTIEKERNEQWKAKVLHGRHPFDLEQPHVDTAASNKWLTKGSLFPETEGFMVAIQDQVINTRNYRKHIIKDPTLINDRCRKCHIHSENIQHITGACPNLAQTDYTHRHNQIVNIIHQNLAHKHHLIQNTYTPYYNYHPSPVLENNTHKMYFDRAILTDKTIHYNRPDITLQDKKNKITYLIDIAIPNTHNLQTAIAEKIHKYTDLKEEITRIWKQEKVYIVPIVLSTTGVIPKYLHHSLKLIDLPFSYITAQKAAILNTCRIVRKFLQIDEDNG

SEQ ID NO: 21790 - protein, 1264 aa, Signeta flammeata
MVLTRSRVLQAGTSNGESRPEPSSGSPSYSGVGNMSQLLTQSQTVVGRTQRQQSRRVTPSNPVNPTLAATQEANAFQPASTKAGKPRVRMKWSLEVNTFIMRTYYRVTKLETDLTLYRKLLHEHFIRQYPEANVTEQRVSDQMRVILRNKMLSDHLLDEIKQEVKLELELEQIDNTHNTNSSNLLGSEPSQRLTSHTSESVNTSLLSQPNSYSHTIHNTQTQTMNSTQFLSNAYTQTETTTILIANDIETLRLTSLLDAEEIRIQKNLQSILIEYSGTDPTLRPKLPKLRYSTKLNQLIELFNAKILKQFVSDDSQLIDIHTLIYCSALVISQELGYEVDGTTRPQRKCEKRKPAWQNRLEKDIVQLRSDIGRLTQYINNNRSRKVVNRIEIIFRNIKVHSTHENNNRKPEEYLDTLKQKLALKVNRLARYKKALKRKNENKLFKTNEKLFYRTLTSDSVCSIPQQTELPDTKHLEQFWAGIWEADEHHNEKASWIEEEENRWVATEEMKLEQITETDIKNVTLRVSNWKSPGVDQIHNFWYKKFHSLHKTIAKNFTEIIFGQQNTPQFITQGITYMLPKGKYTAQPSQYRPITCLPTIYKILTSVITHKITAHIEKNHILSEEQKGCRRGHMGCKEQLIIDSLIHRHATTNKRNLHCTYIDYKKAFDSIPHSWLIRILQIYKINPVLIEFLKNTMKLWKTKLHLNQVTTREIVIKKGIYQGDSLSPLWFCLALNPISHMLHERKAGYHLKHENSDSCISHLIYMDDIKLYARSKKEMKTLIDTTVEFSKDINMQFGLDKCKTIHILKGKVRPGDYPISDEAKITAMEQDELYKYLGYHQSKGLDHTKLKISLIDEYKRRVRSICRTQLIGKSLIKAINTYAIPILTYSFGIIKWTKTDINNIEIGTRTSMTTYNYLHPKSAIERMTLKRQNGGRGLINIDQLWKNQITNLRSFFYQKAATSDIHKAIVDNDSNYTPLNLAENTGRNRDDNSEEARREQWKKKVLHGRHPHDLEQSHIDTIASNKWLTSGTLFPETEGFMIAIQDQVINTRNYRKHIIKDPTLKDDRCRKCHRHPENIQHITGACPNLTQTDYTHRHNQIANIIHQNLALKHHLIPNTYTPYYKYKPNPVLENTTHKMYFDRAILTDKTIHYNRPDITLQDKRNKTTYLIDIAVPNTHNLQKTIAEKIHKYTDLKDEIIRIWKQEKVYIVPIVLSTTGVIPNYLHHSLKLIELPKFTYGQLQKAAILNTCRIVRKFLQTEDDLN

SEQ ID NO: 21791 - protein, 1327 aa, Spialia spio
MRCDLETGKYPRQVPGRENPAPGLQARAAPRILGGATFRIILPSLTLLQLTKHRQNIHKSPHIHHHPPSVHHLHLHFLNHLSHHQTLILIHTNHHHGPPQFHLCHVMLHRKLMLISLGPSLTPVMVRIYYNILQIIYNQTHSNILQNMLPPTTLAGKTRQRMRWSDQINRELLRCYYIVTNNETHLTAWRTLLHKKFSEQIPELNHLSEQRLADQIRVIHRNNRIQLADRERIKNEVALIISTSNNSDEHTLTSTTISETNRQQSTSQANSDTHTTNNTKLTPKSHAYTQTETINTLIENDIEILQAIPLTDSPVEKIKENLQSVLVQYAGTDPTLRPKLPKLHQSRKLTQLTELFNNKILRHFFSDDTELIDIHTLIYCSALVISKELGYRIGEISRVLHKETRKSEWQERIEKDILKLRSDIGKLTQYINNNTKSKKVINRIEEIFKNTKVHSSHETNNRKPEEYLDTLKQKLALKANRLARYKKTQKRKNDNKLFNVNEKIFYRKLKADPSDKLPKEKELPNTKDLEQFWAGIWEVDEKHNEKATWIADEEKRWKELEEMKFEKITEIDIKNVTARLNNWKSPGIDKIHNYWYKKFNILHNVIAKNLTEIVIGKQNTPHFIAQGITFMIPKGKYTTQPSHYRPITCLPTIYKILTSVITHKITTHIEKNNIIAEEQKGCRRGHMGCKEQLIIDSLVHRHAITNKRNLHCTYIDYTKAFDSIPHSWLLRVLQIYKINPNLINFLKNIMNLWKTELHLDHITTRYITIKKGIYQGDSLSPLWFCLALNPISYMLSECAAGYSLKTQNDTIQISHLIYMDDIKIYSKTEKEMKTLIDTTLKFSQDINMKFGLDKCKTIHIIKGKIRPGDYVINEEDKITAMEGNEMYKYLGYYQSKSLDHTKLKTSITKEFKTRVNTICKSLLNGKSLIKAINTYAIPILTYSFGIVKWTKTDINSIEIATRTCLTKHNYLHPKSAIERMILRRHNGGRGLINISNLWKNQITNLRAFFYQKAINSGIHRAVVQNDKNFTPLNLVDQIEINKDEDTEQAKITKWKEKVLHGRHPHDLEQSHIDTLASNKWLTKGYLFPETEAFMIAIQDQVINTRNYRRHIIKDGTVTDDRCRKCHSHPENIQHITGACPNLAQTDYTHRHNQVANIIHQNLALKHQLIPNIHTPYYKYTPSPVLENNTHKMYFDRAILTDKTIHYNRPDITLQDKKNKTTYLIDIAIPNTHNLQKTIAEKIHKYTDLKDEVTRIWKQEKVYIVPIVLSTTGIVPTYLHHSLKLIDLPYAYIEAQKAAILNTCRIVRKFLQLDDDNPRTEIQNITLS

SEQ ID NO: 21792 - protein, 1253 aa, Pyrrhopyge sadia
MPCDVAQEAHANFPAPIPDTTTATHTTEYSTSNRVQHQTNRNVLRNMLPPTTLAGKNRQRMKWNDQINKELLRCYYIVTKNETNLTAWRYLLHKKNSEHIPELSHLSEQRLADQIRVIHRNNRVVPAERDHIKQEVALVLTTPNNSNERILTSTGITASNTILQSSTLIQANMQSKSNSDIQIINNTQDTFKSHAFTQTEITTTLITNDIEILQSAPLSDVFAEKIKEDLQSVLVEYAGTDPTLRPKLPKLHQSRKLTQLTDLFNTTILRQFFSDDSQLTDIHTLIYCSALVISNELGYKIGEMPRAQHKEAKKPQWQHRIEKDILQLRSDIGRLTQYINNNNRSSKVTNRIEEIFKNTKVHSVHENNNTKPEEYLDTLKQKLALKANRLARYKKTLKRKNDNKLFNANEKCFYHKLVANTNSALPKQDEIPNVKELEQFWAGIWEVEEKHNEEAEWIIEEELRWKELKEMEFGQITEPEIKNIMTRLNNWKSPGIDKIHNFWYKKLHILHNIIAKNLTQIILGKQNIPSFIAQGITYMIPKGNYTPEPSQYRPITCLPTIYKILTSVITHKITAHIEKNNIISEEQKGCRRGHMGCKEQLIIDSLVHRHAITNKRNLHCTYIDYKKAFDSIPHSWLLRILQIYKISPTLINFLKKTMNHWKTQLHLDKITTREIKIKKGIYQGDSLSPLWFCLALNPISHMLHKCEAGYSLKVQNNSTRISHLIYMDDIKTYSKTEKEMKALIDTTLKFSNDINMKFGLDKCKTVHIIKGKIRPGDYAIGEEEKITAMEPNEMYKYLGYHQSKYLEHTKLKSSLIQNYKHRIKMICKSLLTGKSLIKAINTYAIPILTYSFGILKWTKTDINNIEISTRSLLTKHNYLHPKSAIERMSIKRYSGGRGLINITNLWKNQIANLKIFFNQKAQNSVIHKAVVENDTNYTPLNLSQVTDLRNDEDTEQAKILQWKKKVMHGRHPHDLEQPHIDSIASNKWLSKGYLFPETEAFMVAIQDQVINTKNYRKYIIKDSALVDDKCRKCQSQPENIQHITGGCPNLTQTDYTHRHNQVANIIHQNLALKHQLIPNIYTPYYKYTPKPVLENSTHKMYFDRAILTDKTIHYNRPDITLQDKSTKTTYIIDIAIPNTHNLQKTIADKIHKYTDLKEEMTRIWKQDKVYIVPIVLSTTGVIPTYLHHSLKLIDLPHSYIEAQKAAILNTCRIVRKFLQIEDNNQETDTHNRTHTHAHTHSGSRTHTHTHTLT

SEQ ID NO: 21793 - protein, 1275 aa, Apostictopterus fuliginosus
MVLTRSRVPQAGTSNGESRPEPSSGSPSYSGVGNMSQLRLQSQTVGRGSQHHRSRREEKSSPKLTDSTDITQSSSVNPTLRVTQEANALQPASTKAGKPRVRMKWTPEINIFIMRTYYRITKLETDLTLYRKLLYEHFIRQYPEAKVTEQRVSDQMRVIVRNKMIPDKLLDEIKLEVKLELQQTDNSCNTSSSNIPNSETSEHTLQSNSHTQESINTNLLPLPNSYLHTKLSQTGKQYSPNSHAYTQTETTTILMENNIETLQFISLSNSDETRIQDKLQSTLIEYSGTDPTLRPKLPKLKYSTKLNQLIDLFNAKIFKQFVSDDSQLIDVHTLIYCSALVISQELGYEVGRKNRSQRYYEKRKPEWQKRLENDIIQLRSDIGKLTQYINNNRSRKIVNRIEIIFRNTRIHTTHENNNRKPEEYLDTLKQKLALKAHRLARYKKALKRKNENILFKTNEKLFYRKLTSETISRVPKNNKLPDTKHLEQFWAGIWETDEQHNEKATWIKEEENRWIALEEMKLEDITETDIKNVTLRISNWKSPGVDKIHNFWYKKFHSLHKTIASSFTQIIFGQQSTPQFMAQGITYMLPKGEYTNQSSQYRPITCLPTIYKILTSVITQKITSHIEDNRILSEEQKGCRRGHMGCKEQLIIDSLIHRHATTNKRNLHCTYIDYKKAFDSIPHSWLIRILQIYKVNPILIEFLKNTMKLWKTRLYLNQITTREIAIKKGIYQGDSLSPLWFCLALNPITHMLHGSNAGYHLKHDNGDSHISHLIYMDDIKLYARSEKEMKSLIDTTLKFSTDINMQFGLDKCKTIHIIKGKIRPGDYAVGNEDKITAMEPNELYKYLGYNQSKGLDHTKLKASLIHEYKRRVKSICKSQLTGKNLIKAINTYAIPVLTYSFGIIKWTKTDINNIEIGTRTSLTKHNYLHPKSAIERMTLKRQNGGRGLINIDQLWKNQISNLRTFFYQKATTSNIHKTVLHNDFNYTPLKLAEYSEINRDPNPDQARIVQWKKKVLHGRHPHDLAQSHIDATASNKWLISGTLFPETEGFMIAIQDQVINTRNYRKHIIKDHTLKDDRCRKCHIHPENIQHITGACPNLAQTDYTHRHNQIANIIHQKLANKHHLIQNTHTPYYKYKPNPVIENNTHKMYFDRAILTDKTIHYNRPDITLLDKINKITYLIDIAVPNTHNLQKTIAEKVHKYTELKEEITRIWKQEKVYIVPIVLSTTGIIPKYLHHSLKLIALPNLTYAQLQKATILNTCRIVRKFLQTDDDTN

SEQ ID NO: 21794 - protein, 1323 aa, Helias cama
MRLRNRVIPQAGTSRKREEESGPGPSSSGCPTYSGGGNVSHMTTQTSTVVVDTHSPSHIISEPSSLTSSTHSLFQTPNSSPRSYELQQLSSRSSTITPLSFDVALEALASTSVPTKDITNITRLNVNGNNTEIRVNHNTPSHSFTAPARGVLKDMLPSTTQAGKVRKRMKWTDEINMKLLHSYYSVTNNETNLTAWRTLLHHKFIESVPELSHLSEQRLADQIRVIHRNNRIPLIERERLKQSITLTISSIDNHEENTTPIANDHSTNTQTLITHRSSDISHSHIYTQTETCHLLITNDIEIVQPAILPEITNSKLGEDLHTALIKFAGTDPTLRPKLPKLKYGYKLNQLINTFNNNILPKFFSVDSQLTDIHTLVYCSALVISKELGFTIEDNIRPQRNNEPKVPLWQKRLEKDIVRLRSDIGKLTQYIKNNRSKKVVDRVQEIFKNLEIHSTHENYNRNPEEFLDTLKQKLALKAKRLARYKKSLKRKNDNNLFNANEKMFYKKLRFDTVTPATDQSQLPDVNDLEHFWAGIWEVEKEHNEEAAWIKEEESRWSMLEEMKFEDVTETDLSIVTSRLSNWKSPGIDGLHNFWYKKLHCLHKILAKNLTEIIQGHQNPPKFIAQGITFMLPKEKHCNQPSQYRPITCLPTIYKILTSLITYKITNHVEQNKILSEEQKGCIRGHMGCKEQLVIDSLIHKHASSNKRNLHCTYIDYKKAFDSIPHSWLLRILQIYKISPVIITFLKNIMGQWKTKLYLNNIITREITIKKGIYQGDSLSPLWFCLALNPISHMLNKLKSGYHLKHEHDETYISHLIYMDDIKLYTRTEKEMKHLIDTTANFSKDINMIFGLDKCKTIHIIKGKIQDGNFIVNNDELITAMEANERYKYLGYYQSRGLDHCKLKASIKQAYINRVNTICKSLLTGKSLIKAINTYAIPILTYSFGIIKWSKTDINSIAIRTRTILTKHNFLHPKSAIERMSLKRINGGRGLINVMDLWNNQIVNLRNFFYQKSSNSNIHKAVVENDFNFTPLNLNDRTELIRGCDIDQTSIVQWKAKTLHGRHPYDLEQAHVDAAASNKWLTNGSLFPETEGFMLAIQDQIINTKNYRKHIIKDPTLKDDKCRKCHTHPETIQHITGACPNLAQTEYTHRHNQIANIIHQNLALKHHLIPNTHTRYYNYKPSSVLENTSYKMYFDRAILTDKTIHYNRPDITLQDKKTKITYLIDIAVPNTHNLQKTIAEKIHKYTDLKDEITRIWKQNKVYIVPIVISTTGVIPKHLHHSLKLIDLPYAYIVAQKAAILNTCRIVRKFLQIDYETNETNTITDL

SEQ ID NO: 21795 - protein, 1293 aa, Oechydrus chersis
MANLRYEMVLTRSRITQAGTSNGESRPEPSSGSPSYSGVGNISQLRTQSQTVVGRTQHQRDSRLNPSSTRTDSTDMASSSLVNPAPRATQRENVFQPVSTKAGKPRVRMKWSNDINIFIMRTYYRVTKLETDLTIYRKLLHEHFIREYPEANVTEQRVSDQMRVILRNKMIPDKVLAEIKQEIKIELQQKDHSSSQPVNLKVPSTSIAKSHTYNIADTNILSQQNLNPRHNAQSQTNNINQLSSLNSHAYTQTETETILMTNDIETLQIYQTTPLPNVLETKIKEDLQSALVKYAGTDPTLRPKLPRLKYSNKLNQLIDLFNTKILIQFISHDCKLIDTHTLIYCSALIISLELGYKVGERYKPTRKDRKPAWQNRLEEDIKQLRSDIGRLTQYINNNRSKKVVNRAEHIFRNTKVHSNHDNNNRKPKDYLDTLKQKLALKANRLARYKKSLKRKNDNLLFKSNEKIFYRKLTSDIDGTVTNHTEVPDKKELERFWAEIWETEKQHNVKATWIDKEENRWMAIEEMNLANIIETDIKNVTMRLNNWKSPGIDQIHNFWYKKFHCLHLTLARNFTEVIFGHQNIPQFITQGITYMLPKGKYTNQPSQYRPITCLPTIYKILTSVITQKITEHIEKNSILSEEQKGCRRGHMGCKEQLVIDSLINRHAITNKRNLHCTYIDYKKAFDSIPHSWLIKILQIYRINPVLIDFLKNIMKLWKTRLLLNDTTTRDIAIKNGIYQGDSLSPLWFCLALNPISNILHEQKAGYKLKVDNNNTRISHLIYMDDIKLYGRTENEMKSLVDTTSKFSKDIHMQFGLDKCKTIHIVKGKIRPGDYALNSEDRITAMEPNEVYKYLGYNQAKGLDHTKLKTSLIQEYKRRIKIICKTQLVGKHLIKAINTYAIPILTYSFGIIRWTKTDINNIEITTRTSLTNHNYLHPKSAIERMTLKRHNGGRGLIDISQLWKNQIFNLRSFFYHKTTNSDIHKAIVHNDCNHTPLNLAEHTEPNIDNDLEQAKIEKWKMKVLHGRHPHDLEQPHIDAVASNKWLSLGTLFPETEGFMVAIQDQVIKTRNYRKHIIKDPTLKDDQCRKCHSHPENIQHITGACPHLTQTDYTHRHNQIANIIHQSLSLKYHLIPNSYTPYYKYKPDSVLENDTHKMYFDRAILTDKTIHYNRPDITLQDKINKITYLIDVAVPNTHNIQKTITEKINKYTDLKEEVIRIWKQEKVYIVPIVLSTTGVIPKQLHHSIKLLDLPNFTYTHLQKAAILNTCRIVRKFLQLDDEINSTHRHTNPEPNL

SEQ ID NO: 21796 - protein, 1276 aa, Windia windi
MRLRNRKIPQAGTREGESCPGPIGPGCPTYSGGGNVSHNTAQSDTVAVDKTPSPQNTQIISHPSSPISSTYSLYQSPSSSPHSYSHSSQSPTTSSRSITVSPLSCDVAQEARANFPVPITGTTNGTQATKYSISNCVHHQTHRNVLQNMLPPTTLAGKSRQRMRWSDQINKELLRCYYIVTNNETHLTAWRTLLHKKFSEHIPELSHLSEQRLADQVRVIHRNNRIQLAERDRIKEEVTLLISNSNNPNEHILTNTTNTATITINHETIIQSKSNSDIQTTNNTQLTLKSHVCTQTETTTTLIANDVEILQPITLPDSPVKKIEEDLQAALVEYAGTEPTLRPKLPKLHYSRKLNKLTELFNNIILRNFFSNNTEIIDIHTLIYCSALVISKELGYRIEETPRAEYKEIKKSDWQDRMERDILQLRSDIGKLTQHIKNNTRSRKVMNRIEEIFKNTKVHSSHENNNRKPEEYLDTLKQKLALKANRLARYKKTLKRKNDNKLFNTNEKIFYRKLKTDTNSVLPKQNEIPNTEDLEQFWAGIWEVEEKHEEEAPWIKAEEKRWKELEEMKFEEITEIDIKNITARLNNWKSPGIDKVHNYWYKKFNTLHNVIAKNLTQIVLGKQNTPHFIAQGITYMLPKGKYTTEPSQYRPITCLPTIYKILTSVITHKITAHVEKNNIIAEEQKGCRRGHMGCKEQLIIDSLVHRHAITNKRNLHCTYIDYKKAFDSIPHSWLLRILEIYKINPNLIDFLKKTMNLWKTKLHLDRITTREITIKKGIYQGDSLSPLWFCLALNPISHMLHECGAGYSLKAQNDTTRISHLIYMDDIKIFSKTEKEMKTLIDTTLKFSTDINMKFGLDKCKTIHIIKGKIKPGDYVIGEEDKITAMEPNEMYKYLGYYQSKGLDHTKLKSSLIQEYKCRVKTICKSLLISKNLIKAINTYAIPILTYSFGIVKWTKTDINNIEISTRTCLTKHNYLHPKSAIERMSIKRHNGGRGLININNLWKTQIVNLKVFFYQKSHNSIIHKAVVQNDSNYTPLNLAEEIEISKEEDTEKTKIIQWKKKVLHGRHPHDLEQTHIDPIASNKWLTKGYLFPETEAFMVAIQDQVINTRNYRKHIIKDSTITDDKCRKCHSHPENIQHITGACPNLAQTDYTHRHNQVANIIHQNLALKHHLIQNIHTPYYKYTPSPVLENNTHKMYFDRAILTDKTIHYNRPDITLQDKRNKTTYLIDIAIPNTHNLQKTIAEKIHKYTDLKDEITRIWKQDKVYIVPIVLSTT

SEQ ID NO: 21797 - protein, 779 aa, Mimoniades pionia
MEFGQITELEIKSVMTRLNNWKSPGIDKIHNFWYKKLHILHNIIAKNLTQIILGKQNIPSFIARGITYMIPKGNYTTEPSLYRPITCLPTIYKILTSIITHKITAHIDKNNIISEEQKGCRRGHMGCKEQLIIDSLVHRHAITNKRNLHCTYIDYKKAFDSIPHSWLLRILQIYKISPNLIEFLKKTMNLWKTQLHLDKITTREIKIKKGIYQGDSLSPLWFCLALNPISHMLHKCEAGYRLKVQNNTTRIAHLIYMDDIKTYSKTEKEMKALIDTTLKFSNDINMKFGLDKCKTVHIIKGKIRPGDYTIGEEETITAMEPNDMYKYLGYHQSKYLEHTKLKSSLMQNYKHRIKIICRSLLTGKSLIKAINTYAIPILTYSFGILKWTKTDINNIEISTRSLLTKHNYLHPKSAIERMSIKRYNGGRGLINIPHLWKNQIVSLKNFFYQKAQNSVIHKAVVENDINYTPLNLTEVTDLCNDEDTEQAKMLQWKKKVMHGRHPHDLEQPHIDPIASNKWLSNGYLFPETEAFMVAIQDQVINTRNYRKHIIKDSAVIDDKCRKCQSHPENIQHITGACPNLTQTDYTHRHNQVANIIHQNLALKHHLIPNIYTPYYKYTPKPVLENSTHKMYFDRAILTDKTIHYNRPDITLQDKITKTTYLIDIAIPNTHNLQKTIAEKIHKYTDLKEEITRIWKQDKVYIVPIVLSTTGVIPIHLHHSLKLIELPHTYIEAQKAAILNTCRIVRKFLQIDDNNQGTVTHTTVHARAHSASQTNTHALT

SEQ ID NO: 21798 - protein, 1317 aa, Grais stigmaticus
MRLRSRQIPQAGTREGESRPGPSGSGSPAYSGGGNVSHMAAQSRSVAVNKTSHSSHTSSPVSSIHSLSHSSLHSYELEQSSSPSTSVTTMSCDVAQEAYAISTVPNTDIITTTPKALTNLTSRVDPITHSLPHNTQTRSVLKEMLPATTLAGKSRQRMKWTDEINKELLRCYYLVTHNETNLTAWRSQLHQKFSEKIPDLSHLTEQRLADQIRVIHRNNRISASDRESIKQSISLLLTASETPNDYTTNNLEHQSSSFTIPNNYNRENTNTQNHTYDSSQFTTKSNAFTQTETTNILLENDIVILQPTPLPNGAEEKLKEDLQTALIEYGGTDPTLRPKLPKLRYTKKLNKLTNLFDTKILCHFISEDSQLTDIHTLIYCSALVISKELGYKIVDDYQPQRRCEERKPGWQKRLERDILQLRSDIGRLTQYIGNNRSRKVVSRVETIFRNTKVHSVHENDNKTPEQYLDTLKQKLALKANRLSRYKKSLKRKQSNKLFNTNEKLFYRKLMTGTNNSELKHTETPNVKEIEEFWSSIWETEEKHNEEASWILEEESRWRTLAEMEFNKIEETDIKNVTARLHNWKSPGVDKVHNYWYKKFHSLHRIIAINLTHIVLGNQITPKFIAQGITYMLPKEKHSAQPSQYRPITCLPTIYKILTSVITNKITVHIEKNNIISEEQKGCRRGHMGCKEQLIIDSLVHRHASINKRNLHCTYIDYKKAFDSIPHSWLLRILEIYKINPFLIEFLKNTMSLWKTKLQLDKVTTREITIKKGIYQGDSLSPLWFCLALNPISHMLHKLKSGYLLKNQTNNTCISHLIYMDDIKLYAKSKIEMQTLIDTVGEFSKDINMKFGLDKCKTIHIVKGNIKPGDYVINEEEKIKAMEPNELYKYLGFYQAKGLEHTKLKTNLIGEYKRRENAICKSLLTGKSLIKAINTYAIPILTYSFGIVKWTKTDISNIEILTRTTLTKHNYSHPKSAIERMSLKRSIGGRGLINITQLWKNQIINLRQFFNQKANHSDIHRAVVQNDNNFTPLNLCEETEPNRDVDTEEARIDQWKKKTLHGRHPNDLEQPHVDTAASNKWLTVGSLFPETEGFIIAIQDQVINTRNYRKHIIKDSTIKDDRCRKCHIHPENIQHITGACPNLTQTDYTHRHNQIVNIIHQNLALKHHLIPNSYTPYYKYVPKPVLENNSHKMYFDRAILTDKTIHYNRPDITLRDKANKVTYLIDIAVPNTHNLQKTIAEKIHKYTDLKDEVTRIWKQEKVYIVPIVISTTGVIPNYLHHSLKLIDLPNSYVLAQKAAILNTCRIVRKFLQIDYDTT

SEQ ID NO: 21799 - protein, 1122 aa, Pyrrhopyge sergius
MTTPNNSNERILTSTEITASNTILQSSTLIPANMQSKSNSDIQITNNTQDTFKSHAFTQTEITTTLITNDIEILQSAPLSDVFAERIKEDLQSVLVEYAGTDPTLRPKLPKLHQSRKLTQLTDLFNTTILRQFFSDDSQLTDIHTLIYCSALVISKILGYKIGEMPRGQQKETKKPQWQHRIEKDILQLRSDIGRLTQYINNNNRSSKITNRIKEIFKNTKVHSVHENNNTKPEEYLDTLKQKLALKANRLARYKKSLKRKNDNKLFNANEKCFYRKLVANTNSALPKQDEIPNVKELEQFWAGIWEVEEKHNEEAEWIIEEELRWKELKEMEFGQITELEIKNIMTRLNNWKSPGIDKIHNFWYKKLHILHNIIAKNLTQIILGKQNIPSFIAQGITYMIPKGNYTPEPSQYRPITCLPTIYKILTSVITHKITAHIEKNNIISEEQKGCRRGHMGCKEQLIIDSLVHRHAITNKRNLHCTYIDYKKAFDSIPHSWLLRILQIYKISPTLINFLKKTMNHWKTQLHLDKITTREIQIKKGIYQGDSLSPLWFCLALNPISHMLHKCEAGYSLKVQNNSTRISHLIYMDDIKTYSKTEKEMKALIDTTLKFSNDINMKFGLDKCKTVHIIKGKIRPGDYAIGEEEKITAMEPNEMYKYLGYHQSKCLEHTKLKSSLIQNYKHRIKMICKSLLTGKSLIKAINTYAIPILTYSFGILKWTKTDISNIEISTRSLLTKHNHLHPKSAIERMSIKRYSGGRGLINITNLWKNQIANLKIFFNQKAQNSVIHKAVVENDTNYTPLNLSQVTDLRNDEDTEQAKILQWKKKVMHGRHPHDLEQPHIDSIASNKWLSKGYLFPETEAFMVAIQDQVINTKNYRKYIIKDSALVDDKCRKCQSQPENIQHITGGCPNLTQTDYTHRHNQVANIIHQNLALKHQLIPNIYTPYYKYTPKPVIENNTHKMYFDRAILTDKTIHYNRPDITLQDKSTKTTYIIDIAIPNTHNLQKTIAEKIHKYTDLKEEITRIWKQDKVYIVPIVLSTTGVIPTYLHHSLKLIDLPHSYIEAQKAAILNTCRIVRKFLQIEDNNHETDTHTRTHTHAHTHSGSRTHTHTHTHTHTHTDIVY

SEQ ID NO: 21800 - protein, 1305 aa, Notodonta dromedarius
METRSKSKRLGPLPGGDRRGALGADAGCGSIRTVSGEELNRRAPSGSPENATANQTNDRQTDNNSISPCTSIHEPYSPSTISYIPSPIPSENSRELPTPTLDVAQGVNPFLPASTKAGKPRVRMRWTNDVNLFIMRTYYRVTKLETDMTIYRKVLHEHFMQQYPEANVSEQRVSDQRRAIIRNRMISDEMLTQVKEEVRIELEQSDLSSHLPASPNGTTNARHTSNTDLLLQPYSHTIPITPSLTTQPEVFTYTNLHTTHNTQLTLNSHASTQTETTILLVENEIETLQPIPLPDAIAQKLHQNLQTALIEYAGIDPTVRPKLPKLKYSTHLTQLTQLFNNSILNQFFSEDSQLTDIHTLIYCSALVISRELGYKIEQHTQPHHNNQIKPAWQVRLEKDVVQLRSDIGKLTQYINNNRSKKVVDRVNLIFRNAKVHSSHENDNRKPEEFLDTLKQKLALKAHRLARYKKALQRKDDNKLFNTNEKLFYRKLNTDKDNPKPTPNVTEIPEINELEKYWIDIWETETQHNENASWLAQEVNRFAAKDEMTFEDITEIDIANVTARLHNWKSPGIDKIHNFWYKKFCTLHKIIAINLTHIIRGQQSTPQFIAQGTTYMLPKGKYTAKPSKYRPITCLPTIYKILTSAIAQKITSHIEQNNILAEEQKGCRRGHMGCKEQLIIDSLIHKHATTNKRNLHCTYIDYKKAFDSIPHSWLLRVLQIYKINPVLIDFLKNTMSLWKTKLHLNTIVTREIKIRKGIYQGDSLSPLWFCLALNPISHLLRKRTVGYRLKHESTETCISHLIYMDDIKLYAKTEKEMKILIDTTTEFSKDINMQFGLDKCKTIHVVKGKIRPGDYVVGDEQIIAAMEPNELYKYLGYYQSRGLDHMQIKNSLKQEYKRRVNSICKSQLAGKSLIKAINTYAIPILTYSFGIIKWTKTDINHIEINTRTILTKHNCLHPKSAIERMTLKRQEGGRGLINITVLWIKQIANLKKFFLEKANNSNIHKAIVYNDLNFTPLNLTDLTELNIENESEKARKEQWKKKVIHGRHPHDLEQSHIDPIASNKWLTLGSLFPETEGFMIAIQDQIINTRNYRKYIIKDPTLTDDRCRKCHSHPENIQHITGACPNLAQTDYTHRHNQIANIIHQKLALKHKLIPDTHTPYYKYTPNPILENCTHKLYYDRAILTDRTIHYNRPDITLQDKVNKTTYLIDIAVPNTHNLQKTIADKVHKYTDLKDEVIRIWKQEKVYIVPLVLSTTGIIPKYLHHSLKLIDLKPNTYMQLQKAAILNTCRIVRKFLQIDEDDDGTN

SEQ ID NO: 21801 - protein, 1291 aa, Celaenorrhinus opalinus
MVLTRSRVPQAGTSNGESRPEPSSGSPSYSGVGNISQLPTQSQTVVGRTQHRKSSRLTSAQTITDSTDIACLSVVNPTLCATQGANALQPASTKAGKPRVRMKWSNDVNIFIMRTYYRVTKLETDLTIYRQLLHEHFAREYPEVKVTEQRVSDQMRAILRNKMIPAEILAKIKEEIKLELQQLDQLPLQPISFTATSTPNTNPFTQTQPPSHTIDTIETNTLPQQNSYSYPENYTRSQKNDSNRLTSNSHAYTQTETTTLLVTNDVETLLIPQTTTLSGSEVTRIKKDFQSSLIEYAGTDPTLRPQLPRLKYSTKLNQLIDQFNSKILNQFISNDSKLIDIHTLIYCSALIISRELGYKIGETYQTSRKRPDKKPDWQNRLEKDIMQLRSDIGRLTQYMNNNKSKKVVNRVEIIFRNTKIHSTYDENNRKPEEYLDTLKQKLALKSNRLARYKKAQKRKNDNTLFKNNEKIFYRELTIDKDKLVTKHTELPDKKQLEQFWAGIWETDVQHNVKATWIEKEQNRWKTVEEMNLANIIESDIKNVTMRLNNWKSPGIDKIHNFWYKKLHCLHNALAKNFTEVIFGRQNIPHFITQGITYMLPKGKYTDQPSQYRPITCLPTIYKILTSVITQKITLHIENNNMLSEEQKGCRRGHMGCKEQLIIDSLTHRHATINKRNLHCTYIDYKKAFDSIPHSWLIQILQIYRINPVLIEFLKNTMKLWKTRLILNNITTREIAIKKGIYQGDSLSPLWFCLALNPISNMIHEIKAGYLLKYDKTDTRISHLIYMDDIKLYARTKKEMKSLVDITAKFSQDIHMQFGLDKCKTIHIIKGKMSPGDFVVNGGDRISAMEPNEVYKYLGYHQSKGLDHAKLKKSLTQEYKRRVKSICKTQLAGKNLVKAINTYAIPVLTYSFGIIKWTKTDINNIQITTRTTLTKHNYLHPKSAIERMTLKRHVGGRGLINIHQLWKNQIFNLRSFFYYKAPHSNLHKAIVQNDSNCTPLNLAHDTEPSTDTYLEQTQIEQWKKKVLHGRHPHDLDQPHIDTTASNKWLSSGNLFPETEGFMIAIQDQVINTRNYRKHIIKDPTAKDDRCRKCHSHPENIQHITGACPNLTQTDYTHRHNQIANIIHQSLALKHHLIPNIYTPYYKYKANPVLENKTHKIYFDRAILTDKTIHYNRPDITLQDKINKTTYLIDIAVPNTHNLQKTIAEKIHKYTDLKEEVIRIWNQEKVYIVPIVLSTTGMIPKHLHHSLKLLNLPSFTYAHLQKAAILNTCRIVRKFLEIDDFTNDTDTES

SEQ ID NO: 21802 - protein, 1278 aa, Taractrocera maevius
MRYEMVLTRSRLPQAGTSNGESRPEPSSGSPSYSGVGNMSQLPTQSQTVVSRTQKQKSKKLSPSPIPTDPTDSRLNLVNSTLSATQEAHALKPVSTKAGKPRVRMKWSPEINMYIMRTYYRITKLETDFTTYRKQLHENFIRQYPDAHVTEQRVSDQMRVILRNKMISDQILDKIKQEVKLELQQTDQSGNTNSTFTNSVPLLHSTPNTPESVNISLTTQPNSYANKIYYTQAQTTNNTQLSAHAYTQTSTTTILMENDIEILQPTSLSDCEETRILNNLRSVLIEYSGINPTLRPKLPKLKYSRKLNQLIELFNANILNQFISEDSKLIDIHTLVYCSALVISKELGYEVAGANQPQLRYEKRKPKWQIRLEKDVLKLRADIGRLTQYINNNRSKKLMNKIEIIFKNTAIHSSHENNNRRPEEYLDTLKQKLALKVNRLARYKKALKRKSQNKLFNTNEKLFYRKLTADSNCTEPKQIDLPDTKDLEQFWAGIWEQQEQHNDKALWIKEEENRWKGIAEMKLDQITETDIRNITLRVSNWKSPGVDKIHNFWYKKFHRLHKIIAKNFTEIIFGQQNTPQFIAQGITYMLPKGKYTTQPAQYRPITCLPTIYKILTSVITNKIISHIEENHILSEEQKGCRRGHRGCKEQLIIDSLIHRHATFNKRNLHCTYIDYRKAFDSIPHSWLIRILQIYKINPVLIEFLKNIMNMWKTKLHLNSIITREITIKKGIYQGDSLSPLWFCLALNPISHMLREQKAGYELKNKNNNTNISHLIYMDDIKLYAKADKHMKSLIDTTTQFSKDINMQFGLDKCKTIHIIKGKVRPGDYLLGNEEKIAAMEPDELYKYLGYHQSKGLDHTKLKASLIIEYKRRLKSICKSNLAAKSLIKAINTYAIPILTYSFGIIKWTKTDINNIEIATRTSLTKFNYLHPKSAIERMSIKRLNGGRGLINIHQLWKNQITNLRQFFYEKAATSDIHKTIAYNDTNYTQLNLSEEIENDTGNNSEQARTEQWKKKALHGRHPNDLEQPHIDAIASNKWLTSGTLFPETEGFMVAIQDQVINTKNYRKHIIRDPTLKDDRCRKCHTHPENIQHITGACPNLTQTDYTHRHNQIANIIHLNLALKHHLIPNKHTPYYIYKPSPVLENTTHKMYFDRAILTDKTIHYNRPDITLQDKKNKITYLIDIAVPNTHNLQKTIAEKIHKYTDLKDEVTRIWNQEKVYIVPIVLSTTGVIPKYLHHSLNLIELPKFIYSQLQKAAILNTCRIVRKFLQTDDKEDVN

SEQ ID NO: 21803 - protein, 771 aa, Mysoria barcastus
MDFGQITEQDIENVMTRLNNWKSPGIDKIHNFWYKKLHILHNIIAKNLTQVTLGKQNIPSFIARGITYMIPKGNYTTEPSLYRPITCLPTIYKILTSVITHKITAHIEKNNIISEEQKGCRKGHMGCKEQLIIDSLVHRHAITNNRNLHCTYIDYKKAFDSIPHSWLLRILQIYKISPKIIDFLKKTMSLWKTQLHLDKIRTREIKIKKGIYQGDSLSPLWFCLALNPISHMLHKCKAGYSLKVQNNSTRISHLIYMDDIKTYSKTEKEMKALIDTTLKFSNDINMKFGLDKCKTIHIIKGKIRPGDYAIGDEETITAMEPNEMYKYLGYRQSKGLEHTKLKSSLIQNYKHRIKLICKSLLTGKSLIKAINTYAIPILTYSFGILKWTRTDINNIEISTRSLLTKHNYLHPKSAIERMSIKRYNGGRGLINISNLWKNQIVNLKKFFYQKAQNSVIHKAVVENDINYTPLNLTEVTDLPNDENTEQAKILQWKKKVMHGRHPHDLEQPHIDSIASNKWLSKGYLFPETEAFMVAIQDQVINTRNYRKYIIKDSALLDDKCRKCQSHPENIQHITGACPSLTQTDYTHRHNQVANIIHQNLALKHQLIPNIHTPYYKYTPKPVLENSTHKMYFDRAILTDKTIHHNRPDITLQDKKTKTTYLIDIAIPNTHNLQKTIAEKIHKYTDLKEEITRIWKQDKVYIVPITLSTTGVIPTYLHHSLKLIGLPHIYIEAQKAAILNTCRIVRKFLQIEDNNQGTVTHTTVHPHAHAGS

SEQ ID NO: 21804 - protein, 1289 aa, Quadrus cerialis
MAAQSRTVAASKTDSHIASHSSSPTSTTSLFRSPSSSPQSYEFCHPSSRSTSVTSRSYDVAQEANANSPVPISDPTSPTHESQNEQNICVDRNSKSLSSSNTSVLQKMLPSTTLAGRSRQRMKWTDEINRALLRCYYIVTSNELNLTAWRPLLHQRFTEHFPELKHLSEQRLADQIRVIHKNNRIKVTDRELIKQSVASVISTLNSSNAQVVTNNSENQLDSFSNTTPIINTFSANINTQPIESTCLTSNDYTLTQTNITHILVENEIRILQSENILNSSEEEMKIKLQTALIEHSGSDPTLRPKLPNLKHSAKLIQLTDMFNRKILNYFISEDSQLVDIHTLIYCSALVISRELGYKIEEDNQRTRTREKKIPAWQIRLEKDVTQLRSDIGRLTQYINNNRSQKVVDRINIVFKNFKTHSCHENYNKTPEEYLDTLKQKLTLKSNRLARYKKAVKRKDDNKLFKYNEKMFYRQLATKESKPAPNTKETPDVKELEQFWAGIWEVAETHHEEAEWIAEEESRWETLQEMKFSEITESDIKNVTAKLHNWKSPGIDKVHNFWYKKFHCLHKMIALNLNQIILGQQNTPYFMAQGITYMLPKVKHSTQPSQYRPITCLPTIYKILTSIITNKITSHIEENNILSEEQKGCRRGHMGCKEQLIIDSLIHRHAATNKKNLHCTYIDYKKAFDSIPHSWLLRVLQIYKINPHLLDFLRKIMTFWRTKLHLDNITTRDIAIKKGIFQGDSLSPLWFCLALNPISHMLHKQKSGYLLKNQNDHTLISHLIYMDDIKLYTNTDEEMKTLINTTVEFSKDINMQFGFDKCKTIHIIKGKVRPGDYVVNEADKFTAMAPNDVYKYLGCNQSKGLDHAKLKDSLVQEYKRRIHNTCKSLLTGKNLIKAVNTYAIPILTYSFGIVKWTKTDIRNIEIVTRTSLTRHNYLHPKSAIERMTLRRQIGGRGLINIYNLWRNQINTLRQFFKFKAQTSNIHKATVKNDLNFTPLNLSNDIESSSDNLSEVTVKEKWKKKVLHGRHPHDLDQPHVDAVASNRWLSSGSLFAETEGFMIAIQDQVINTRNYRKHIIKDPLVKDDKCRKCHTQPENIQHITGACPNLTQTDYTHRHNQIVHIIHQNLALKHKLILTDYVPYYKYIPRPVLENNTHKMYFDRAILTDKTIHHNRPDITLIDKKNKVTYIIDIAVPNTHNIQKTIAEKIHKYIDLKDEVARLWKQEKVYIVPIVLSTTGVIPYYLHHSLKLIDLPNSYILAQKAAILNTCRIVRKFMQIDDKTIETSRNT

SEQ ID NO: 21805 - protein, 1305 aa, Notodonta dromedarius
METRSKSKRLGPLPGGDRRGALGADAGCGSIRTVSGEELNRRAPSGSPENATANQTNDRQTDNNSISPRTSIHEPYSPSTISYIPSSIPSENSRELPTPTLDVAQGVNPFLPASTKAGKPRVRMRWTNDVNLFIMRTYYRVTKLETDMTIYRKLLHEHFMQQYPEANVSEQRVSDQRRAIIRNRMISDEMLTQVKEEVRIELEQADLSSDLPASPNGTTNARHTSNTDLLLQPYSHTIPITPSLTTQPEVFTYTHLHTTHNTQLTLNSHASTQTETTILLVENEIETLQPIPLPDAIAQKLHQNLQTTLIEYAGIDPTVRPRLPKLKYSTHLTQLTQLFNNSILNQFFSEDSQLTDIHTLIYCSALVISRELGYKIEQHSQPHHNNQIKPAWQVRLEKYIVQLRSDIGKLTQYINNNRSKKVVDRVNLIFRNAKVHSSHENDNRKPEEFLDTLKQKLALKAHRLFRYKKALQRKDDNKLFNTNEKLFYRKLNTDKDNPQPTPNVTEIPEINELEKYWIDIWETETQHNENASWLAQEVNRFAAIDEMTFEDITEIDIANVTARLHNWKSPGIDKIHKFWYKKLSTLHKIIAKNLTHIIRGQQSTPQFIAQGITYMLPKGKYTAEPSKYRPITCLPTIYKILTSTIAQKITSHIEQNNILAEEQKGCRRGHMGCKEQLIIDSLIHKHATTNKRNLHCTYIDYKKAFDSIPHSWLLRVLQIYKINPVLIDFLKNTMSLWKTKLHLNTIVTREIKIRNGIFQGDSLSPLWFCLALNPISHLLRERTVGYRLKHESTETCISHLIYMDDIKLYAKTEKEMKILIDTTTEFSKDINMQFGLDKCKTIHVVKGKIRPGDYVVGDEQIISAMEPNELYKYLGYHQSRGLDHTKIKKSLKQEYKRRVNSICKSQLAGKSLIKAINTYAIPILTYSFGIIKWTKTDINHIEINTRTILTKHNCLHPKSAIERMTLKRQEGGRGLINITVLWIKQIANLKKFFLEKANNSHIHKAIVYNDLNFTPLNLTDLTELNIENESEKARKEQWKRKVIHGRHPHDLEQSHIDPIASNKWLTLGSLFPETEGFIIAIQDQIINTRNYRKYIIKDPTLTDDRCRKCHSHPENIQHITGACPNLAQTDYTHRHNQIANIIHQKLALKHKLIPDTHTPYYKYTPNPILENSTHKMYYDRAILTDRTIHYNRPDITLQDKVNKTTYLIDIAVPNTHNLQKTIAEKVHKYTDLKDEVIRIWKQEKVYIVPLVLSTTGIIPKHLHHSLKLIDLKPNTYKQLQKAAILNTCRIVRKFLQIDEDDDGTN

SEQ ID NO: 21806 - protein, 1328 aa, Pyrgus malvae
MRLRSRQIPQAGTREGESRPGPSGSGCPSYSGVGNVSQSLTAQSCTVAVVTEPSQTISDPSSPTSSTQSLFPSPRSSPLSSLYHPSSTSSSNTSPSSCDVAQEAFANIPVPIDDSTTPTRAPHNIVNNINNRVDHNSYQFATTTPANCILQHMFPATTIAGKSRKRMKWCDQVNRELLRCYYIVTNNETNLTAWRPQLHKKFTECIPDLKHLTEQRLADQIRVIHKNNRLSANERESIRQSVSLLLSSSSHTTHVTSSSQQHDIINNTSTTHNSLPDTFDHSQAINNTQVTSNSHVSNQTDPTNFTLTTDIDILQPTTIPEVNEGKIIEDLQATIIEYTGTDPTLRPKLPKLKYSKRLFHLTALFNTKILGHFISEDLQLVDLHTLIYCSALVISRKLGYKIGESSRPQQSREIKKPEWQIRIERDILQLRSDIGRLTQYIFNNNRSKKIVDRIEIIFKNTRIHSTHENNNRKPEEYLDTLKQKLALKANRLSRYNKSLKRKNDNKLFRGNEKIFYRKLINTTDWKTSSKQKEIPAVKDLENFWASIWEIEEKHNEKAAWIVEEESRWKLLEEMKFEQVTETDIKHITERLHNWKSPGIDKVHNYWYKKFHILHRMLANNFTQIIMGQQSIPQFIAQGITYMIPKHNYTNQPSQYRPITCLPTIYKILTSLITHKITNYIESNNILSEEQKGCRRGHKGCKEQLIIDSLIHRHANTNKRNLHCTYIDYKKAFDSIPHSWLLRILEIYKINPNIIEFLKNIMKLWKTNLQLENLTTREIIIKKGIYQGDSLSPLWFCLALNPITHMLHNRKVGYHLKSQDQNTCISHLIYMDDIKLYARNEKEMQSLIDVTVQFSKDINMHFGIDKCKTIHIIKGKIHPGDYAVGHEENITAMEPNEFYKYLGFNQSKALDHASLKSSLTQEYKRRVHNICKTMLTGKNLVKAINTYAVPVLTYSFGIVKWTKTDINNIEINTRTALTKHNYLHPKSAIERITIKRQNGGRGFINLNSLWKNQIENLKQFFYHKANSSNIHKLVVQIDYNYTALNLVEITETNTDNTSEQTKIEQWKRKVLHGRHPHDLDQSHIDSAASNKWLTKGDLFPETEGFIIGIQDQVINTRNYRKYIIKDPTVSDDKCRKCHSHTENIQHITGACPNLAQTDYTHRHNQIANIIHQNLALKHHLIQNKYTPYYKYTPSPVLENNNYKMYFDRAILTDKTIHFNRPDITLQDKKKKTTYLIDIAVPNTHNIQKTIAEKIHKYTDLKEEITRIWKQEKVYIVPIVISTTGVIPKYLHNSLKLIDLPYSYIPAQKAAILNTCRIVRKFLQIEEETD

SEQ ID NO: 21807 - protein, 1305 aa, Udranomia orcinus
MTTQPNAVVVGNPPYNVISNSSSPISSTHSLFESPSSSPQSYQLQYSSSRSTTITPLSCDVAQEAHANSPGPTSDIINSTHSTQHDLSISVAHNTSPNSRNIQHNSQARIILKDILPATTLAGKTRQRMKWTDEINRELLRCYYTVTHNETNLTAWRTLLHRKFCENIPELNHLSEQRLADQIRVIHKNNRISLPERESIKQSITFVHPTNSLEECVLPLNEEHQTFVTRTTSESISTQSNSRGHTNSTNNTQQDIEELTSSLHTLPQASALNLPTYNLITDNIDTVHFTNLPEIQVEKLKEDLQTAIIEYTGTDPTLRPILPKLKHNNKLIHLIHIFNNNILHNFFSDDSQFNNIHTLIYCSALVISRALGYKIGENNRPQRTNETRKPKWQERLEKDIKQLRADIGRLTQYINNNRSKKVVKRVEVIFKNTVVHSTHENNNRKPEEFLDTLKQKLALKSNRLARYKKALKRKLDNKTFYNNEKLFYRKLVPNTNSTSPNPTEIPNKNDLEQFWAGIWEEEEKHNEEATWIAEEEYRWQQLEEMKFEQITETDIKIVTMRINNWKAPGIDKVHNFWYKKFQTLHKIIAKNFTEMIKGQQDIPQFISQGKTFMLPKIRYTTQPSQYRPITCLPTIYKILTSAINQKITSHIEKHNILSEEQKGCRRGHMGCKEQLIIDSVIHRHALIKKKNIHCTYIDYKKAFDSIPHSWLLRILQIYKISPVLIKFLKHTMSLWRTRLHLDTITTREIVIKKGIFQGDSLSPMWFCLALNPISHMLNKQKVGYDLKHEDSYTSISHLIYMDDIKLYSKCNEEMQYLIDTVAKFSKDINMTFGLDKCKTINIIKGKIQPGDYITNNLEKITAMEPTELYKYLGYYQSKGLDHCKLKTSLIEVYKQRVNIISRTLLNGKRLIKAINTFAVPILTYSFGIIKWTKTDINNIERKTRTTLTKHNYLHPKSAIERITLKRQNGGRGLINIANLWKNQIFNLKSFFYLKAIDSNIHKAIVHNDTNLTPLNLIDKTDHNRNADSEQARTEQWKTKVLHGRHPHDLEQPHIDAIASNKWLTVGSLFPETEGFMLAIQDQVINTRNYRKHIIKDRTLIDDKCRKCHSHPENIQHIIGACPNLTQTDYTHRHNQVANIIHINLAIKHHLIQNTYTPYYKYIPSPVLENKSHKMYFDRAILTDKTIHYNRPDITLQDKKNKITYLIDIAVPNTHNLQKTIAEKIHKYMDLKDEITRIWRQEKVYIVPIVLSSTGIIPKYLHHSLKLIDLPYCFIAAQKAVILNTCRIVRKFLQIDDDSNERDKQI

SEQ ID NO: 21808 - protein, 1305 aa, Notodonta dromedarius
METRSKSKRLGPLPGGDRRGALGADAGCGSIRTVSGEELNRRAPSGSPENATANQTNDRQTDNNSISPRTSIHEPYSPSTISYIPSPIPSENSRELPTPTLDVAQGVNPFLPASTKAGKPRVRMRWTNDVNLFIMRTYYRITKLETDMTIYRKLLHEHFMQQYPEANVSEQRVSDQRRAIIRNRMISDEMLTQVKEEVRIELEQADLSSDLPASPNGTTNARHTSNTDLLLQPYSHTIPITPSLTTQPEVFTYTHLHTTHNTQLTLNSHASTQTETTILLVENEIETLQPIPLPDAIAQKLHQNLQTTLIEYAGIDPTVRPRLPKLKYSTHLTQLTQLFNNSILNQFFSEDSQLTDIHTLIYCSALVISRELGYKIEQHSQPHHNNQIKPAWQVRLEKDIVQLRSDIGKLTQYINNNRSKKVVDRVNLIFRNAKVHSSHENDNRKPEEFLDTLKQKLALKAHRLSRYKKALQRKDDNKLFNTNEKLFYRKLNTDKDNPQPTPNVTEIPEINELEKYWIDIWETETQHNENASWLAQEVNRFAAIDEMTFEDITEIDIANVTARLHNWKSPGIDKIHNFWYKKLSTLHKIIAKNLTHIIRGQQSTPQFIAQGITYMLPKGKYTAEPSKYRPITCLPTIYKILTSTIAQKITSHIEQNNILAEEQKGCRRGHMGCKEQLIIDSLIHKHATTNKRNLHCTYIDYKKAFDSIPHSWLLRVLQIYKINPVLIDFLKNTMSLWKTKLHLNTIVTREIKIRNGIFQGDSLSPLWFCLALNPISHLLRERTVGYRLKHESTETCISHLIYMDDIKLYAKTEKEMKILIDTTTEFSKDINMQFGLDKCKTIHVVKGKIRPGDYVVGDEQIISAMEPNELYKYLGYHQSRGLDHTKIKISLKQEYKRRVNSICKSELAGKSLIKAINTYAIPILTYSFGIIKWTKTDINHIEINTRTILTKHNCLHPKSAIERMTLKRQEGGRGLINITVLWIKQIANLKKFFLEKANNSHIHKAIVYNDLNFTPLNLTDLTELNIENESEKARKEQWKRKVIHGRHPHDLEQSHIDPIASNKWLTLGSLFPETEGFIIAIQDQIINTRNYRKYIIKDPTLTDDRCRKCHSHPENIQHITGACPNLAQTDYTHRHNQIANIIHQKLALKHKLIPDTHTPYYKYTPNPILENSTHKMYYDRAILTDRTIHYNRPDITLQDKVNKTTYLIDIAVPNTHNLQKTIAEKVHKYTDLKDEVIRIWKQEKVYIVPLVLSTTGIIPKHLHHSLKLIDLKPNTYMQLQKAAILNTCRIVRKFLQIDEDDDGTN

SEQ ID NO: 21809 - protein, 1276 aa, Chiomara georgina
MTTQTSSVVVQQSSHITSKPSSPTSSTYSLFQSPSSSPHSFQFHQSSSRSSTISPLSVDVAREALALTSVPTIDNTTPTQLNTIMNLNASRVDHTYIHTDLISSHSSNTPAIGVLKDMLPAKTLAGKSRKRMKWSDEINRELLRCYYIVTHNESNLTAWRALLHQKFTECVPELCHLSEQRLADQIRVIHRNNRIPSTERERLKQSVIPLISSSNNHDELTISLSNDHETTEIQTQNISHLKSLLSSPPIDLRQESLESPVMEISRPKLSENVISKMTEDLHTALAEYSGTDPTLRPRLPKLRYSHKLNQIISVFNNNILGNFYSNDSQLVEIHTLIYCSALVISREAGYKIGDERGSQRNNELRKPSWQTRLEKDIMLLRSDIGRLTQYINNNRSRKVVNRVEIIFMNTKIHSSHENNNRKPEEYLDTLKQKLALKSKRLARYKKALKRKTENRLFETNEKLFYRKLMVDVKETPSNEKEIPSAKELEQFWAGIWESEEPHNQNAEWIKEEKNRWETVEEMQFENITETEMKVVTGRLNNWKSPGVDGIHNFWYKKFHCLHKTLAKNLTQIIFGQQSMPHFIAKGISYMLPKTKHTTQPSQYRPITCLTTIYKILTSILTNKITTHIENNKIIAEEQKGCRRGHMGCKEQLIIDSLIHRHASTQKRNLHCTYIDYKKAFDSIPHSWLLNILEIYKINPIITDFLRNTMKLWKTKLQLGHISTREITIKKGIFQGDSLSPLWFCLALNPISYMLNKNKIGYPLQHENSSTFMSHLIYMDDIKLYSRTENEMQILIDTIVDFSKDINMSFGYDKCRTIHILKGKITPGDYLIDEQEKIAAMEPHEVYKYLGYCQSKSLDHVRLKKSLVHVYKQRLNVICKSLLKSKSLIKAINTYAIPILTYSFGIIKWTKTDIKNLEICTRTSFTKHNYLHPKSAVERIAIKRDSGGRGIININTLWRKQIESLRSFFYKKANDSDIHRAIVQNDNNCTPLNLREENESYTVRNIEKDMLEQWKAKVLHGRHPFDLEHPQVDIAASNKWLTKGSLFPETEGFIMAIQDQVINTRNYRKHIIKDPTITDDRCRKCHIHSETIQHITGACPNLAQTDYTHRHNQIANIIHQNLALKHNLIKNTYTPYYNYHPSPVLENKTHKMYFDRAILTDKTIHYNRPDITLQDKENKVTYLIDIAVPNTHNLQKTIAEKIHKYTDLKDEITRIWKQEKVYIVPIVLSTTGVIPKYLHHSLKLIDMPSSYIAAQKAAILNTCRIVRKFLQINDDNC

SEQ ID NO: 21810 - protein, 1177 aa, Ouleus salvina
MLPSTTLAGKIRKRMKWSDEINKELLRCYYIVTHNESNLTAWRPLLHQKFINCFPELKHLSEQRLADQIRVIHRNNRIKIPERELIKQSVAPLISTDQSVVISNSVNQPTTIITPTINISQSNKDTHIQFTDNTNLTYYPPTLTHTNMTHVLLENDFTIQPIQVPDTTEEEISRKLQTVLIEYSGNDPTLRPKLPKLKYSAKLTKLTDLFNKKILNNFITEESQLTDIHTLIYCSAFVISSELGYKITEDNQPTRIREKKIPNWQKRLENDITQLRSDIGRLTQYINNNRPKKVIDRINIIFKNTKTHSCHENDNKTPQEYLDTLKQKLALKANRLARYKKAMKRKHDNKLFNSNEKMFYRQLTNNTNTPDPISKEIPDVKELEQFWAGIWEVAETHNEEAEWIAEEESRWGTIPEMQFEQITESDIKYVTSRLHNWKSPGIDKIHNFWYKKFQCLHKMIALNLSHIILGRQNTPQFFAQGITYMLPKVKHSTQPSQYRPITCLPTIYKILTSVIANKISLHIQTNNIISEEQKGCRRGHMGCKEQLIIDSLVHKHAMKNKRNLHCTYIDYKKAFDSIPHSWLLRILHIYKINPHLIEFLSKIMQFWKTKLQLDNITTRTIGIKKGIYQGDSLSPLWFCLALNPISHILHTHKLGYHLNMQNNRTLISHLIYMDDIKLYTKTEKEMQTLIDTTVKFSKDINMTFGYDKCKTIHIIKGKVRPGDYVINSEEKITAMAPNDIYKYLGYNQSNGLDHVKLKNSLVQEYKSRVYKICKSLLTGKRIIKAINTYAVPILTYSFGVLKWTKTDIRNIEIITRTLLTRHNYLHPKSAIERMTLTRQHGGRGFINIHNLWRNQINTLTRFFKSKTETSDLHKATVNNDYNFTPLNLTEELEPNNDSTSQQATMEQWKKKVLHGRHPHDLEQPHIDAEASNRWLTLGSLFPETEGFMLAIQDQVINTRNYRKHIIKDPSITDDRCRKCHIHSENIQHITGACPNLTQTDYTHRHNQIVNIIHQNLALKHKLILSQYTPYYKYTPNPVLENNTHKMYYDRAILTDKTIHHNRPDITLIDKINKVTYIIDIAIPNTHNIQKTITEKIHKYIDLKDEIARIWKQEKVYIVPIVLSTTGVIPTYLHHSLKLIDLPYSYILAQKAAILNTCRTVRRFMQIDDKTTENMRNT

SEQ ID NO: 21811 - protein, 1167 aa, Dalla cyprius
MRTYYRVTKLETDLTIYRKLLHEQFTKEYPDAKVTEQRVSDQMRVILRNKMIPDKVLSDIKEEIKLELQQAEHIALEPMGLSTTNTTNINSFTQSQTPPLTYTENINILREENTYSQSQPNNNTHLTPNLHAYTQTETTSILIANDIEILQNPQPTPLLDFIEAKVKANLQLSLIEFAGMDPTLRPKLPRLKYSTKLNQLIELFNTKILDQFISPDSQLIDIHTLIYCSALVISQELGYKIEGTYQPPRKHKEQKPPWQKRLEEDIMQLRADIGRLTQYINKNRSKKIVNRVEVIFRNTKIHSTHERNNKTPEEYLDTLKQKLALKVNRLARYKKALKRKSDNILFKSNEKIFYRKLTTDTDTNLITRNTEVPDIKDLEQFWAGIWETEEQHNVNATWIEKEENKWEAVEEMNLAHIEEADIKNITMRLHNWKSPGIDKIHNFWYKKFHSLHTILAKNFTEIVFGQQNTPHFITHGITYMLPKGKYTNQPSNYRPITCLPTIYKILTSVITQKITVHIEENRIISEEQKGCRRGHMGCKEQLVIDSLIHRHATVNKRNLHCTYIDYKKAFDSIPHSWLIRILEIYKINPVIIEFLKNTMKLWKTTLHLNNITTREITIKKGIYQGDSLSPLWFCLALNPISNMLHGHKAGYHLKHENSDTRISHLIYMDDIKLYARTEKEMKALIDTTVKFSNDINMQFGLDKCKTVHIIKGKVRPGDYAVSNEEKITAMEPNEVYKYLGYHQAKGLDHTKLKTSLIQEYKRRVKSICKTQLVGKNLIKAINTYAIPILTYSFGIIKWTKTDINNIEISTRTLLTAHNYLHPKSAIERMTLKRHTGGRGLININQLWKNQIANLRSFFYNKTTNSDIHKAIARNDTNYTPLNLAENTEINMDSNSEQARLEQWKKKVLHGRHPHDLEQSHIDTTASNKWLTSGSLFPETEGFMIAIQDQVINTRNYRKHIIRDPTLKDDRCRKCHSHPENIQHITGACPNLAQTDYTHRHNQIANIIHQSLARKHHLIPNTHTPYYKYIPNPVLDNNTHKMYFDRAILTDRTIHYNRPDIMLQDKINKTTYLIDIAVPNTHNLQKTIAEKIHKYTDLKDEVIRIWNQEKVYIVPIVLSTTGVIPKHLHHSLKLINLPNFTYTMLQKASILNTCRIVRKFLQIDDDTN

SEQ ID NO: 21812 - protein, 1288 aa, Phalera bucephala
MKMVLTRSRVPQAGTSGNSTGESRPEPSSGSPSYSGGGNMSQLPIQSQTVVGIQQNPNSRPPPLTLTDSTDYSRPSSATPILSATQEANAFQPASTKAGKPRVRMKWTNDVNLFIMRTYYRVTKLETDLTIYRKLLHEHFIRQYPEVNVSEQRVSDQRRVIIRNKMISDKILAQIKEEVRIELEQIESSPLQSIPLAAPSLQSSQHTQRSVPDTNLPSQSDLFSHTLPSTHSQNALRTPLTSNSHAFTQTEITTILMVNEIETLRPTPLPDTIAQKLHDNLQTNLVKYAGTGPKLRPKLPKLKYSAQLTQRTEIFNNKILHHFFSEDSQLIDIHTLIYCSALVISLELGYKIIDDESNRPQRNIERKPTWQIRIEKDISQLRSDIGRLTQFINNNRSKKVVDRVEIILKNTNIHSVHESNNRKPEEYLDTLKQKLALKAHRLARYKKARLRKNDNKLFHTNEKLFYRKLTTDNANPKPNESEIPKAEDLENFWGGIWETDTQHNEEATWIAEEESRWEGLEVMKFEEITETDIKNTVARLSNWKSAGIDRIHNFWYKKFNTLHKILAKNLTQIIHRQQNTPAFIAQGITYMLPKGKSTTQPSLYRPITCLPTIYKILTSVIAQKINIHIENNNILSEEQKGCRRAHMGCKEQLIIDSLVHRHTTVNKRNLHCTYIDYKKAFDSIPHSWLLRILQIYKINPVIIEFLKNTMSLWKSKLHLNHIITREIHIKKGIYQGDSLSPLWFCLALNPISHMLRERKAGYHLKHDNINTCISHLIYMDDIKLYAKSEKEMKLLIDTTVEFSKDINMQFGLDKCKTIHIIQGKIRPGDYAISDDERIIAMDPNELYKYLEYHQSKGIDHCKIKTSLLREYKYRVNAICKSKLTGKSIIKAINTFATPILTYSFGIIKWTKTDINHIEISTRTILTKHNYLHPKSAIERMTLKRENGGRGLINIYLLWIKQITNLKLFFQQKARHSDLHKAIVKNDFNHTPLNLTIENGPSTEMHSEQERTEQWKKKVLHGRHPHDLDQAHVDSIASNKWLTLGSLFPETEGFMVAIQDQIINTKNYRKHIIKDPTLTDDRCRKCHSHPENIQHITGACPNLSQTDYTHRHNQIANIIHQNLAIKHHLIPNTNTPYYKYNPSPILENSTHKIYYDRAILTDRTIHYNRPDITLQDKNSKTTYLIDIAVPNTHNLQRTIAEKVHKYTDLKEEVTRIWKQNKVYIVPVVLSTTGVIPKYLHHSIKLIDLKPTIYILLQKAAILNTCRIVRKFLQIEESTNETDGQTDLNT

SEQ ID NO: 21813 - protein, 1351 aa, Eantis tosta
MRLRSREIPQAGTRKGESRPGPSGSGSPSYSGGGNVSHMIAQSCTVAVKNQPPHNNSGPSSPTSSTHSLFQSPSSSPQSYELQRSSSRSSPIIPLSSNVAQEAHASAESLVPITDNNNPTREQQNPLYYRVEHNTPSHSHNTPSHSPNTLSHLHSTPSHSHNTPIRSVLQEMLPATTLTGKSRQRMKWTDEVNRELLRCYYFVTHNETNLTAWRPLLHKQFSERFPDLSHLSEQRLADQIRVIHRNNRIAVSERECIKQAVALVLVTHDNNEHADTNNIEHQLTLNTSPTTIFHQQNTLTRASTTNNSLTFSNSQSTQTETRNLLLENEIEILQPSPLQDVTSKNLKNELHAALIKYGGMDPTLRPRLPKLRHTRKLNQLTDLFNNKILSHFFSEESQLIDIHTLIYCSALVISSELGYKIGKVDQRPTNREPKKPEWQERIERDIIQLRSDIGRLTQYIKNNRSRKVVNRIQTIFKNTKVHSTHENNNKTPEEYLDTLKQKLALKANRLARYKKALKRRNDNKLFTANEKMFYRKLKSDTNTATPEHKHIPELKVLEEFWAGIWEVDEKHNEEAKWIAEEEQRWKALEEMKFENISEIDIKTVTSRLNNWKSPGIDKIHNFWYKKFYILHNIIATNLTQIILRQQSTPSFIAQGITYMLPKEKYTSQPSNYRPITCLPTIYKIITSVITNKITVHIEENNILSEEQKGCRRGHLGCKEQLVIDSLIHRHATTHKRNLHCTYIDYKKAFDSIPHSWLLRILQIYKINPHLIQFLHETMNLWKTKLHLNDIVTREINIKKGIYQGDSLSPLWFCLALNPISHRLHQQKLGYDLPLQNNSIRISHLIYMDDIKLYTKTKKEMQTLINTTLQFSRDINMQFGFDKCKTIHIVKGKIQPGDFTVSEYDKIAAMESGELYKYLGYHQAKGLDHTVLKTSLIKEYKHRLQIICKSLLTGKSLIKAINTYAVPILTYSFGIVKWTKTDINNIEINTRTTLTKNNYSHPKSAIERMSLKRQNGGRGLINIKNLWKTQITNMRLFFKRKTDRSDIHKAVVQNDLKFTPLSLSEETEPNMDEDTDRTRTEQWKKKVLHGRHPHDLDQPHIDAAASNKWLTAGSLFPETEGFLIAIQDQVINTRNYRKHIIKDSTITDDRCRKCHIHPETIQHITGACPNLTQTDYTHRHNQIANIIHQNLALKHSLIPNSYTPYYKYTPKSVLENSTHKMYFDRTILTDKTTHYNRPDITLLDKRNKITYLIDIAVPNTHNLQKTIAEKIHKYMDLKDEVTRMWNQEKVYIVPVVLSTTGVIPQYLHHSLKLIGLPYAYIPAQKAAILNTCRIVRKFLQIDDTTIETTGLT

SEQ ID NO: 21814 - protein, 1324 aa, Potamanaxas melicertes
MRLRNREIPQAGTGAYRTGESRPEPTSSGSPTYSGGGNVSHMTAQTSSVVVHTSSSSQVTSDPSSPTSSTYSLFQSPSSSPHSFQFEQSSSRSSTTTPLSVDVAQEALANISVPMNDNSNSTRLHTLRSTNITKRRVDNNHTNHMPSHSSNMPTRGVLKDMLPTTTQAGKNRTRMKWTDDINRELLRSYYIVTHNESNLTAWRTLLHQKFTENVPELSHLSEQRLADQIRVIHKNNRIPPIEREHLKHSVMSLIPSSDSHDEVTTPLTNDHTHRDSQIHTLHESPVTPNLHVCTSTETRHASILMTNDVEILQTTLLPEDNKLKLIEDLRTALTEYTGTDPTLRPQLPKLKYSKKLNQIINTFNNSILINFYSEDSQLIDIHTLIYCSALVISRELGYKIGDNTRPKCNNELRKPYWQIRLEKDIILLRSDIGRLTQYINNNRSRKVINRVEIIFKNTKIHSTHENNNRKPEEYLDTLKQKLALKSKRLARYKKALKRKTDNSLFNTNERLFYRQLKLQKDVTECSQKEIPNVENLEQFWSEIWEVEEKHNEEAVWIAEEEKRYEALEEMQFENITELEMKIITGRLNNWKSPGVDRIHNFWYKKFHCLHKIMAINFTQIIHGQQNIPQFIAQGISYMLPKTKHTTQPSHYRPITCLTTIYKILTSILTHKINTHIENNTIIAEEQKGCRRGHMGCKEQLVIDSVIHRHATTHKRNLHCTYIDYRKAFDSIPHSWLLRILEIYKISPIIIEFLKNTMKLWKTKLQLGDITTREITVKTGIYQGDSLSPLWFCLALNPISHMLNKTKVGYRFGNQNNSTTVSHLIYMDDIKLYSKTEKEMQTLIDTTVGFSNDINMRFGLDKCKTMHIIKGKIKPGDYTIDEQEKIIAMEPNEVYKYLGYYQSQGLDHISLKKSLMQMYKQRVNVICKSLLTSKSLIKAINTYAIPILTYSFGIIKWTKTDINNIEIGTRTALTKHNYLHPKTAIERMTIKRHNGGRGLISIETLWKNQIVNLRSFFYKKSNDSEIHKAITQHDNNYTPLNLVHENEIHTNGNTEKQMIEKWKGKVLHGRHPFDLEQPHVDIAASNKWLTKGSLFPETEGFMVAIQDQVINTRNYRKYIIKDPKLRDDRCRKCHVHSETIQHITGACPNLAQTDYTHRHNQIANIIHQNLALKHNLIQNTYTPYYNYHPKPVLENNTHKMYFDRAILTDKTVHYNRPDITLRDKKNKITYIIDIAVPNTHNLQTTIAQKIHKYTDLKDEVTRIWKQDKVYIVPIVLSTTGVIPKYLHHSLKLIGLPYSFITAQKAAILNTCRIVRKFLQIDEDNS

SEQ ID NO: 21815 - protein, 1339 aa, Morvina fissimacula
MANGAIVTSKHAMRLRNRQLPQAGTREGESRPGPSGSGSPAYSGVGNVSHMSAQSRTVAANKPLPHITSESSSPVSSTQSLFQTPHSSPHSYEFPQTSSRSTTVSPLSCDVAQEATAITPVPIPDINITTRISLKNLNSRVDHHNTQSLSSNTPAGSVLQEMLPATTLAGKRRQRMKWTDQINKELLNCYYLVTHNETNLTAWRLQLHQMFSERFPDLSHLSDQRLADQIRVIHRNNRISAPDREKIKQTVSQLISTSNGSNNQVTWNSEYQSTIYSVPINNTHSNATGNRNTHRESANKSQCTTNVHAFTQTETTNILLENDIDILQPTPLLDNAERKLKEDLHSALIQYGGTDPTLRPKLPKLRHTTKLNKLVDLFNRKILCHFSSADSQLTDIHTLIYCSALVISKDLGYKIEDNHRSQYIYEEKKPGWQKRIEKNILQLRSDIGRLTQYIKNNRSRKVVDRVEVIFKNTKVHSVHENDNKTPEQYLDTLKQKLTLKSNRLARYKKSLKRKQDNKLFNTNEKMFYRKLMTDTKRLAPKHSEIPNVKELEEFWAGIWETEEKHNEEARWIGEEENMWKAIEEMKFEKIEETDIKNATVRLNNWKAPGIDKVHNFWYKKFHSLHRIIAINLTHIIHGQQNIPQFIAQGITYMIPKEKYSTQPSQYRPITCLPTIYKILTSVITNKITAHIEENKILSEEQKGCRRGHMGCKEQLIIDSLVHRHASNNKRNLHCTYIDYKKAFDSIPHSWLLRILQIYKINPILIKFLKSIMTLWKTKLQLDSITTREIAIKKGIYQGDSLSPLWFCLALNPISHMLHKLKAGYRLNNETSYTHISHLIYMDDIKLYAKTVKEMQTLINTTTEFSKDIHMEFGLDKCKTIHIIKGSIQPGDYIINEQDKITAMEPNDLYKYLGFHQAKGLDHIKLKTSLIGEYKRRVNVICSSLLTAKSLIKAINTYAIPILTYSFGIVKWTKTDINNIEILTRTTLFKHNYLHPKSAVERMALKRHNGGRGLINITHLWKNQIANLRHFFNQKAIHCDIHKAIVKNDYSLTPLNLSEETEPTIELDTDQARIDHWKKKTLHGRHPHDLEQPHIDVTASNKWLTNGSLFPETEGFIIAIQDQVINTRNYRKHIIKDTTIIDDKCRKCHIHPETIQHITGACPNLTQTDYTHRHNQIVNIIHQNLALKYHLIPNSHTPYYKYTPKPVLENNSHKMYYDRAILTDKTVHYNRPDITLRDKINKTTYLIDIAVPNTHNLQKTIAEKIHKYTDLKDEVSRIWKQQKVYIVPIVISTTGVIPNYLHHSLKIIDLPNCYILAQKAAILNTCRIVRKFLQIENDNN

SEQ ID NO: 21816 - protein, 1182 aa, Notodonta dromedarius
MRWTNDVNLFIMRTYYRVTKLETDMTIYRKLLHEHFMQQYPEANVSEQRVSDQRRAIIRNRMISDEMLTQVKEEVRIELEQADLSSHLPASPNGTTNARHTSNTDLLLQPYSHTIPITPSLTTQPEVFTYTHLHTTHNTQLTLNSHASTQTETTILLVENEIETLQPIPLPDAIAQKLHQNLQTALIEYAGIDPTVRPRLPKLKYSTHLTQLTQLFNNSILNQFFSEDSQLTDIHTLIYCSALVISRELGYKIEQHTQPHHNNQIKPAWQVRLEKDIVQLRSDIGKLTQYINNNRSKKVVDRVNLIFRNAKVHSSHENDNRKPEEFLDTLKQKLALKAHRLARYKKALQRKDDNKLFNTNEKLFYRKLNTDKDNPQPTPNVTEIPEINELEKYWIDIWETETQHNENASWLAQEVNRFAAIDEMTFEDITEIDIANVTARLHNCKSPGIDKIHNFWYKKFCTLHKIIAKNLTHIIRGQQSTPQFIAQGTTYMLPKGKYTAEPSKYRPITCLPTIYKILTSTIAQKISSHIEQNNVLAEEQKGCRRGHMGCKEQLIIDSLIHKHATTNKINLHCTYIDYKKAFDSIPHSWLLRVLQIYKINPVLIDFLKNTMNLWKTKLHLNTIVTREIKIRKGIYQGDSLSPLWFCLALNPISHLLRTRTVGYRLKHESTETCISHLIYMDDIKLYAKTEKEMKILIDTTTEFSKDINMQFGLDKCKTIHVVKGKIRPGDYVVGDEQIIAAMEPNELYKYLGYYQSRGLDHMKIKNSLKQEYKRRVNSICKSQLAGKSLIKAINTYAIPILTYSFGIIKWTKTDINHIEINTRTILTKHNCLHPKSAIERMTLKRQEGGRGLINITVLWMKQIANLKNFFLEKANNSNIHKAIVYNDLNFTPLNLTDLTELNIENESEKARKEQWKKKVIHGRHPHDLQQSHIDPIASNKWLTLGSLFPETEGFMIAIQDQIINTRNYRKYIIKDPTLTDDRCRKCHSHPENIQHITGACPNLAQTDYTHRHNQIANIIHQKLALKHKLIPNTHTPYYKYTPNPILENCTHKMYYDRAILTDRTIHYNRPDITLQDKVNKTTYLIDIAVPNTHNLQKTITDKVHKYTDLKDEVIRIWKQEKVYIVPLVLSTTGIIPKYLHHSLKLIDLKPNTYMQLQKAAILNTCRIIRKFLQIDEDDDGTN

SEQ ID NO: 21817 - protein, 1267 aa, Pyrrhopyge telassa
MRLRNREIPQAGTHQGESRPGPSGSGCPAYSGGGNVSHNTAQSRTAAVDKTPSQNSPPSSPISSTYSIYQSTSSSPHSYQSPTTSSSSSILSLMPCDVAQEAHANFPAPIPDTTTATHTTEYSTSNRVQHQTNRNVLRNMLPPTTLAGKNRQRMKWSDQINKELLRCYYIVTKNETNLTAWRYLLHKNFSEHIPELSHLSEQRLADQIRVIHRNNRVVPAERDHIKQEVALVMTTPNNSNERILTSTGITASNTILQSSTLIQANMQSKSNSDIQIINNTQDTFKSHAFTQTEITTTLITNDIEILQSAPLSDVFAEKIKEDLQSVLVEYAGTDPTLRPKLPKLHQSRKLTQLTDLFNTTILRQFFSDDSQLTDIHTLIYCSALVISKELGYKIGEMPRAQHKEAKKPQWQHRIEKDILQLRSDIGRLTQYINNNNRSSKVTNRIEEIFKNTKVHSVHENNNTKPEEYLDTLKQKLALKANRLARYKKSLKRKNDNKLFNANEKCFYHKLVANTNSALPKQDEIPNVKELEQFWAGIWEVEEKHNEEAEWIIEEELRWKELKEMEFGQITEPEIKNIMTRLNNWKSPGIDKIHNFWYKKLHILHNIIAKNLTQIIMGKQNIPSFIAQGITYMIPKGNYTPEPSQYRPITCLPTIYKILTSVITHKITAHIEKNNIISEEQKGCRRGHMGCKEQLIIDSLVHRHAITNKRNLHCTYIDYKKAFDSIPHSWLLRILQIYKISPTLINFLKKTMDHWKTQLHLDKITTREIKIKKGIYQGDSLSPLWFCLALNPISHMLHKCEAGYSLKVQNNSTRISHLIYMDDIKTYSKTEKEMKALIDTTLKFSNDINMKFGLDKCKTVHIIKGKIRPGDYAIGEEEKITAMEPNEMYKYLGYHQSKYLEHTKLKSSLIQNYKHRIKMICKSLLTGKSLIKAINTYAIPILTYSFGILKWTKTDINNIQISTRSLLTKHNYLHPKSAIERMSIKRYSGGRGLINITNLWKNQIANLKIFFNQKAQNSVIHKAVVENDTNYTPLNLSQVTDLRNDEDTEQAKILQWKKKVMHGRHPHDLEQPHIDSIASNKWLSKGYLFPETEAFMVAIQDQVINTKNYRKYIIKDSALVDDKCRKCQSQPENIQHITGGCPNLTQTDYTHRHNQVANIIHQNLALKHQLIPNIYTPYYKYTPKPVLENSTHKMYFDRAILTDKTIHYNRPDITLQDKSTKTTYIIDIAIPNTHNLQKTIADKIHKYTDLKEEITRIWKQDKVYIVPI

SEQ ID NO: 21818 - protein, 759 aa, Zopyrion sandace
MQFVQITEKDIEYATTRLHNWKSPGIDKLHNFWYKKLHILHKSIAKNFTEIILGHQNIPLFIAQGMTFMLPKDKHTTQPSQYRPITCLPTIYKILTSTITNKIYTHIENNNILSEEQKGCRRGHMGCKEQLVIDSLIHRHAATNKRNLHCTYIDYKKAFDSIPHSWLVRILEIYKINSKLVEFLKNIMCLWKTNLKLDSITTREISIKKGIYQGDSLSPLWFCLALNPISHILREQKTGYRLKHQNNNVNISHLIYMDDIKLYSKSEREMQESIDAIVKFSNDINMNFGIEKCKTIHIVKGKIRPGDYVINIEDRITAMEPYELYKYLGYCQSKGLDHTKIKTHLTQEYNRRINSICKTLLTGKSLIKAINTYAIPILTYSFGIIKWTKTDINRLEINTRTLLTKHNYLHPKSAVERMSLKRINGGRGLINLATLWKNQIFNLRSFFYKKANNSDIHRAVVHNDQHYTPLNLSENSELNMDNDSEKARTEQWKMKTLHGRHPHDLQQPHIDSAASCKWLTKGSLFPETEGFMVAIQDQVINTRNYRKHIIKDPKTTDDKCRKCHSHPENIQHITGACPNLTQTDYTHRHNQVANIIHQNLARKYHLIQNTYTPYYKYIPTPVLENNTHKIYFDRTILTDKTVHYNRPDITLQDKRNKTTYLIDIAVPNTHNLQKTIAEKIHKYTDLRDEVARIWKQDKVYIVPIVISTTGVIPKYLHHSLKLLDLPYSYISAQKAIILNTCRTVRRFLQIDDDTNENIS

SEQ ID NO: 21819 - protein, 1330 aa, Udranomia kikkawai
MRLRSRQIPQAGTRKGESRPEASASGSPSYSGGGNVSHMTTQFNTAVVGRSPSHITSHSSSPISSTHSLFRSPSSSPQSYQLQYSSRSTTITPLSCDVAQEAYAISPAPTTDTTTPTRLTQNASCSSVDHNTPTHARNTQHNSSVKNFLKDMLPSTTLAGKSRQRMRWTDEINKELLRCYYIVTNNETNLTAWRPLLHRKFSESIPDLGHLSEQRLADQIRVIHKNNRVPESERERIKQSLSLFISSNNLDEDNFITNEEQYHTHNTTTFTNSNQTDSGTQSSSQFTLDSNILTQGMVTHAEMALVKDTATPKMGATHTEATTSKIKDNLQTALIKYAGTDPTLRPKLPRLKYSNRLNQLTELFNHKILNDFFSDDSQLTDIHTIVYCSALVISQELGYKIRDTTEPQRSYETKKPNWQKRLEKDIEQLRSDIGRLTQYINNNRSKKVVDRVEIILKNTKVHSTHESHNKRPEEFLDTLKQKLTLKSNRLSRYKKAMKRKSDNSLFTANEKLFYRKLRTDTSTSMVSQKEIPNVKDLENFWAGIWEAEEHHNEEAEWIKEEESRWRALEEMKFEQITEIDIKNVTSRLNNWKSPGIDKVHNFWYKKFYSLHKIIARNLSQIILGQQVTPHFITQGITFMLPKDKYTNQPSQYRPITCLPTIYKILTSAITQKITAHIEEHNILAEEQKGCRRGHMGCKEQLIIDSLIHRHSFNNKRNLHCTYIDYKKAFDTIPHSWLLRVLQIYKINPVIIHFLENIMNLWKTKLHLNTIATRDIVIRRGIYQGDSLSPLWFCLALNPISHMLHASKAGYSLKNENNDTYLSHLIYMDDIKLYSKTEKDMKTLIDITGIFSKDINMTFGLDKCKTIHIIKGKITPGDYTLNTEEKITAMEPNELYKYLGYYQSKGLDHIKLKKSLVHEYKHRVSVICKSLLTSKKLIKAINTYAIPILTYSFGILKWTKTDISNIERNTRTLFTKYNYLHPKSAIERMTVKRQNGGRGLINISSLWKNQVINLRSFFYQKAKESTIHQAIVQNDLNLTALNLSDKLGPDREVDSEKTKIEQWKTKALHGRHPHDLEQPHIDAIASNKWLTTGYLFPETEGFMLAIQDQVINTKNYRKHIIKDPTLTNDKCRKCHSHPENIQHIIGACPNLTQTDYTHRHNQIANIIHSNLALKHHLIPNTYTPYYKYVPNPVLENKNYKMYFDRAILTDKTIHHNRPDITLVDKKHKTTFLIDIAVPNTHNLQKTIAEKIHKYMDLKDEITRIWKQEKVYIVPIVLSSTGIIPKYLHHSLKLIDLPHCYIPAQKAAILNTCRIVRKFLQIDTDPNETNLH

SEQ ID NO: 21820 - protein, 1297 aa, Pholisora mejicanus
MRLRNRKIPQAGTREGESCPGPSGSGRLTYSGGGNVSHVTAQSNTVAVDRTPSQITTSPTSSTHSLYQSPSSSPHSYSQSYPSSTTSSRSTTVSPLSRDVAQEAQANFSAPITDIINRTHTPQNAFSNCVHLQTHNNIMQNMLPATTLAGKTRQRMRWSDQINKELLRCYYIVTNNETHLTAWRTLLQKKFAEHIPELRHLTEQRLADQIRVIHRNNRIPASEREQIKQEVTSLLSNTYYSNEHILTHTTPTTNNFQSATPALTIIQTEQNTDTLIVNETPKSHAFTQTETTTALIANDIEILESTPLPDSSVEKIKKDLQAALVQYAGTDPTLRPKLPKLRHNLKLTQLTDLFNKIVLCHFFSNDTQLIDIHTLIYCSALVISQELGYKIGETSRSHQNETKTPHWQKRAEKDILQLRSDIGRLTQYINNNSKSRKALNRIEEIFKNTKIHSVHEKNNRKPEEYLDTLKQKLALKANRLARYKKALKRKNDNKLFNANEKLFYRNLKTDTNSTSPNQNEIPNINDLEKFWSGIWEIEEKYNEEATWIAEEEDRWKELEEMKFNQITQLDVKNITSKLNNWKSPGIDRVHNFWYKKFDVLHNILAKNLTDIIHGKQNPPQFIAQGITYMLQKGKYTTEPSQYRPITCLPTIYKILTSVITHKITAHIEKNNIIAEEQKGCRRGHMGCKEQLIIDSVVHRHAINNKRNLHCTYIDYKKAFDSIPHTWLLRILKIYKINSKLIDFLKNIMNNWKTTLYLDKITSREIVIKKGIYQGDSLSPLWFCLALNPISHILRKCEAGYCLKAKNENTRISHLIYMDDIKIYSKNEKEMKNLIDTTLRFSKDINMQFGLSKCKTIHIVKGKIKPGDYELGSGNKITAMEPNELYKYLGYYQSKSFDHKKLKTSLLNEYKRRVTTICKSLLIGKSFIKAINTYAIPILTYSFGIVKWTKTDINSIEISTRTCLTKHNYLHPKSAIERMSLKRHNGGRGLINISKLWKMQILNLKTFFFKKANNSIIHSAVVENDNNYTPLNMTKDTDVNIDDDTEQANILQWKKKVLHGRHPHDLEQPHIDAIASNKWLTKGYLFPETEAFMIAIQDQVINTKNYRKHIIKDSAITDDKCRKCHSHSENIQHITGACPNLAQTDYTHRHNQVANIIHQNLALKHQLIPNIHTPYYNYTPSPVLENNTHKMYFDRAILTDKTIHYNRPDITLQDKRNKTTYLIDIAIPNTHNLQKTIAEKIHKYMDLKDEITRIWRQEKVYIVPIVLSTTGVVPTYLHHSLKLIDIPYSYIEAQKPQS

SEQ ID NO: 21821 - protein, 1317 aa, Ebrietas anacreon
MRLRSRVIPQAGTSPPSEEESGPGPSSSGCPTYSGGGNVSHMTTQTSSVVVDKSPSPRITSNPSSPTLSAYSLFQSPSSSPHSFQLQQSSSRSSTTSPLSIDVARKAHAPTSVPTKDNINPTRLNTVININANRVDHSHNNHITSCSPNTPVTGVLKDMLPATLAGKSRKRMKWSDDINRELLRCYYIVTQNESNLTAWRTLLHQKFTEHIPELSHLSEQRLADQIRVIHKNNRIALTERENLKRSVSLMSSSDDHHEVTPIFNDHLNTETQLPHIPLSSSLHILTPIETRHKNVLGTDDMDIIQPTTLSEDTTTKMMEDLHTALAEYTGTDPTLRPQLPKLKYSNKLYQLIKIFNNNILTNFFSQDSQLVDIHTLIYCSALVISREIGYKIGDKTGPQRNNVTQLRKPAWQIRLEKDVIILRSDIGRLTQYIGNNRSKKVVNRVEIIFKNTKVHSSHENNNRKPEEYLDTLKQKLALKSKRLARYKKALQRKTDNRLFETNEKLFYRKLMVDKDTTSSHKEIPNVKDLEQFWAGIWEIEKDHNENAAWIIEEENRWQALEEMQFENITESEMKFITGRLSNWKSPGIDRIHNFWYKKFHCLHKILAKNLTQIILGQQNTPHFIAQGISYMLPKMTHTTLPSQYRPITCLNTIYKILTSILTHKINIHIENNKIIAEEQKGCRRGHMGCKEQLIIDSLIHRHATTHKKNLHCTYIDYKKAFDSIPHSWLVHILKIYKISPIIIKFLKNTMSLWKTKLQLDHIVTREIIIKTGIYQGDSLSPLWFCLALNPISHMLNKNKVGYNLKHQNNSTYMSHLIYMDDIKLYSRTEKEMQTLIDITVGFSKDINMSFGLDKCKIIHIVNGKIKPGDYNIDTEEKITAMEPHEVYKYLGYHQSKGLDHIRLKKTLMQVYKQRVNVICNSLLTSKSLIKAINTYAIPILTYSFGIIKWTKTDINNIEISTRTTLTKHNYLHPKSAVERMTIKRENGGRGLINLSTLWKNQIVNLRTFFYKKANDSIIHKAIVQNDSNITPLNLHDENAAYVRDNTEKERHEQWKAKVLHGRHPFDLEQQHVDTAASNKWLTKGSLFPETEGFMVAIQDQVINTKNYKKHIIKDRTLTDDRCRKCHIHSENIQHITGACPHLAQTDYTHRHNQVVNVIHQNLARKHHLIQNTYTPYYNYHPSPVLENNTHKMYFDRAILTDKTIHYNRPDITLQDKKNKTTYLIDIAVPNTHNLQTTIAEKIHKYTDLKDEITRIWKQEKVYIVPIVLSTTGVIPKHLHHSLKLIDLPFSYITAQKAAILNTCRIVRKFLQIDENID

SEQ ID NO: 21822 - protein, 1314 aa, Zera sp.
MRLRSRQLPQAGTREGESRPGPSSPGSPSYSGVGNVSHMAAQSQTVAVSKTHSHVMSNPSSPTSTSSLFQSPNSSPQSYEFSHPSSRSTSVTSWSFDVVQKASANIPVPINDLTTPTHVLQNEENGCVDHNPKSLTCNTSVLQEMLPSTTLAGKNRKRMKWTDEINRELLRCYYIVTHNESNLTAWRPLLHQRFTNFFPELKHLSEQRLSDQIRVIHRNNRIKAPEREHIKQSVALLISTNEPAVINNSENQSTINNTPTINISQSTKETQIQSIDSTYLTIYPHTLTNTNMTQVLLENDINISQPTQLLNTAEEEIRRKLQTVLIEYSGNDPTLRPKLPKLKYSTKLIQLIDLFNKKILSQFISEESQLTDIHTLIYCSAFVISNELGYKIEEDNQPTRPSEKRIPHWQKRLEKDITQLRSDIGRLTQYIKNNRPQKVIDRVNMIFKNTKTHSCHENNNKTPQEYLDTLKQKLALKANRLARYKKATKRKQDNKLFNSNEKMFYRQLTNHTSRPDPIKEIPDVGELEQFWAGIWEVPETHNEEAEWISEEENRWAMVPEMQFEEITESDIKYVTARLHNWKSPGIDKIHNFWYKKLHCLHKMIAVNLSHIILGRQNTPQFFAQGITYMLPKVQHSTQPSQYRPITCLPTIYKLLTSVIANKITSHIEANNILSEEQKGCRRGHMGCKEQLIIDSLVHRHAMKNKRNLHCTYIDYKKAFDSIPHSWLLRILQIYKINPHLINFLSNIMKFWKTKLQLNSITTREISIKKGIYQGDSLSPLWFCLALNPISHMLHTHKLGYHLNLQNNHTFISHLIYMDDIKLYTKTEKEMQTLIDTTVKFSKDINMTFGYDKCKTIHIVKGKVRPGDYAINSEDKITAMAPNDIYKYLGYNQSRGLDHVKLKDSLVQEYKSRVYKICRSLLTGKSIIKAINTYAIPILTYSFGIIKWTKTDIRNIEIITRTLLTRHNFLHPKSAIERMSLRRQVGGRGFINIHILWRNQINTLRRFFKSKAESSDIHKATVNNDLNFTPLNLSEELEPNNDSTSEQATMEQWKKKVLHGRHPHDLEQPHVDAEASNRWLTSGTLFPETEGFMLAIQDQVINTRNYRKHIIKDPLITDDRCRKCHIHPENIQHITGACPNLTQTDYTHRHNQIANIIHQNLALKHKLILTEYTPYYKYTPNPVLENNTHKMYFDRAILTDKTIHHNRPDITLIDKIKKVTYIIDIAIPNTHNLQKTIAEKIHKYIDLKDEIARIWKQEKVYIVPIVLSTTGVIPTYLHHSLKLIDLPHSYILAQKAAILNTCRTVRKFMQIDEKT

SEQ ID NO: 21823 - protein, 1346 aa, Achlyodes mithridates
MRLRSREIPQAGTREGESRPEPSSSGSPSYSGGGNVSHMVAQSSTVAVYNRPSDNNSDPSSPISSTHSLFQSPRSSPQSYETQKSSPRSSTITPLSCDVAQEAHESANSLVPITDINNSTRESQITLFKRVEYNAPSTSHNTPPASHNTPSASRNTPNRSVLQEMLPATTLTGKSRQRMRWTNEVNRELLRCYYFVTYNETNLTAWRPLLHKRFSERFSDLSHLSEQRLADQIRVIHKNNRIAVSEREHIKQAVALVLDTTHNNNEHPDTNDVEHQFTFNTTPVTIVQQPNTLTHSSTTNNSQTLSNSQYTQTETRNLLLENEIEILQPSPLQDATSKNLKNELQAALIKYRGMDPTLRPSIPKLRHTRKLNQLTDLFNNKILSHFFSNDSQLSDIHTLIYCSALVISRELGYKIGEVDPRPANREPRKPEWQERIERDINQLRSDIGRLTQYIKNNRSRKVVNRIKTIFRNTAVHSTHENNNKTPEEYLDTLKQKLALKANRLARYKKALKRRNDNKLFRTNEKLFYRKLRSDPNTATPKHNHTPELKELEQFWAGIWEVDEKHNEEARWIAEEEQRWNTLEEMKFEEISEIDIKTVTSRLNNWKSPGIDKIHNFWYKKFHILHNVIAINLTQIILGQQDTPPFIAQGITYMIPKEKYTNQPSNYRPITCLPTIYKILTSVITNKITIHVEENNILSEEQKGCRRGHLGCKEQLIIDSLVHRHATTHKRNLHCTYIDYKKAFDSIPHSWLLHILQIYKINPHLIQFLNKTMNLWKTKLHLNNIVTREILIKKGIYQGDSLSPLWFCLALNPISHRLHEHKVGYELKYPNNSTRISHLIYMDDIKLYTKTKKEMQTLIDTTLQFSKDINMKFGFDKCKTIHIVKGKIQPGDFRVSEHDKIAAMESGEFYKYLGYHQAKGLDHTVLKTSLVKEYKHRLKIISKSLLTGKSLIKAINTYAVPILTYSFGIIKWTKTDIKNIEINTRTSLTKNNYLHPKSAIERMTLKRQNGGRGLINISNLWKTQLTNMRLFFKQKADKSDIHMAIVKNDLKFTPLNLSEEIEPNMDEDSDQTRTVQWKKKVLHGRHPHDLDQPHVDATASNKWLTAGSLFPETEGFMVAIQDQVINTRNYRKHIIKDSTITDDRCRKCHIHPENIQHITGACPNLTQTDYTHRHNQIANIIHQNLALKHCLIPNSYTPYYKYTPKSVLENSTHKMYFDRTILTDKTTHYNRPDITLFDKKNKITYLIDIAVPNTHNLQKTIAEKIHKYMDLKDEVTRMWKQEKVYIVPIVLSTTGVIPQYLHHSLKLIGLPYAYIPAQKAAILNTCRIVRKFLQIDDGTTTETNRLI

SEQ ID NO: 21824 - protein, 1325 aa, Gorgopas trochilus
MRLRNRKIPQAGTREGESCPGPSGSGRLTYSGGGNVSHETAQSDTVAVDRTPSQITSHSTSPISSTCSLFRSPSSSPHSYSHTHSSPTTSSRSTTISPLSCDVAQEAQANFPAPITDITDRTHIPQNASSNCVHHQTHCNILQNMLPPTTLAGKTRQRMRWSDHINKELLRCYYIVTNNETQLTAWRTLLHKKFSEHIPQLNHLSEQRLADQIRVIHRNNRISPSERDKIRQEVKMLLATSTNSNEHTVTNTTTTTNNYQSLTPAQTITHFTSNSDPTMNGTLTSNAFTQTETTTTLITNDVEILEYIPPPDPSVEKIKEDLQAALVEYAGTNPALRPKLPKLRQNLKLTQLTDLFNNTILHHFFSNDTELTDIHTLIYCSALVISKELGYRIGETSRPHQNEAKTPYWQVRAEKDILQLRSDIGRLTQYINNNSKSRKAMNRIQEIFKNTKIHSTYEKNNRKPEEYLDTLKQKLALKANRLARYKKALKRKNDNKLFNGNEKLFYRQLKTDTNNTSSKQNEIPDIKDLEKFWTGIWEIDEKHNEEATWIAEEEDRWKDLEEMKFDQITQLDIKYITTKLNNWKSPGIDKVHNYWYKKFDVLHNIIAKNLTHIVHGKRNTPQFIAQGVTYMLPKGKYTTEPSQYRPITCLPTIYKILTSVITHKITAHIEKNNIIAEEQKGCRRGHMGCKEQLIIDSVVHRHAIINKRNLHCTYIDYKKAFDSIPHTWLLRILEIYKINSKLIYFLKNIMKHWKTTLHLDKITSREISIKKGIYQGDSLSPLWFCLALNPISNMLRKCESGYYLKVNNENTLISHLIYMDDIKIYSKNEKEMKTLIDTTFRFSKDINMQFGLSKCRTIHILKGKIRPGDYTVGNEDKITAMEPNEMYKYLGYYQSKSLDHTKLKSSLIQEYKYRVKTICKSLLISKNLIKAINTYAIPILTYSFGIVKWTKTDINNIEIKTRTCLTKHNYLHPKSAIERMSLKRYHGGRGLINISKLWKTQILNLKVFFNEKAQNSVIHSAVVQNDNNFTPLNLLKETDLNIEDDTEEAKIIQWKKKVLHGRHPHDLEQPHIDPIASNKWLTKGYLFPETEAFMIAIQDQVINTKNYRKHIIKDTTITDDKCRKCHSHPENIQHITGACPNLAQTDYTYRHNQVANIIHQNLALKHQLIPKIYTPYYNYTPSPVLENNTHKMYFDRAILTDKTIHYNRPDITLQDKRNKTTYIIDIAIPNTHNLQKTIAEKIHKYTDLKDEITRIWKQEKVYIVPIVLSTTGVVPSYLHHSLKVINLPYSYIEAQKATILNTCRIVRKFLQIDDHNQEIDTHINS

SEQ ID NO: 21825 - protein, 766 aa, Phalera bucephala
MKFEEITETDIKNTVARLSNWKSAGIDRIHNFWYKKFNTLHKILAKNLTQIIHRQQNTPAFIAQGITYMLPKGKSTTQPSLYRPITCLPTIYKILTSVIAQKINIHIENNNILSEEQKGCRRAHMGCKEQLIIDSLVHRHATVNKRNLHCTYIDYKKAFDSIPHSWLLRILQIYKINPVIIEFLKNTMSLWKSKLHLNHIITREIHIKKGIYQGDSLSPLWFCLALNPISHMLRERKAGYHLKHDNINTCISHLIYMDDIKLYAKSEKEMKLLIDTTVEFSKDINMQFGLDKCKTIHIIQGKIRPGDYAISDDERIIAMDPNELYKYLGYHQSKGIDHCKIKTSLLREYKYRVNAICKSKLTGKSIIKAINTFATPILTYSFGIIKWTKTDINHIEISTRTILTKHNYLHPKSAIERMTLKRENGGRGLINIYLLWIKQITNLKLFFQQKARHSDLHKAIVKNDFNHTPLNLTIENGPSTEMHSEQERTEQWKKKVLHGRHPHDLDQAHVDSIASNKWLTLGSLFPETEGFMVAIQDQIINTKNYRKHIIKDPTLTDDRCRKCHSHPENIQHKTGACPNLSQTDYTHRHNQIANIIHQNLAIKHHLIPNTNTPYYKYNPSPILENSTHKIYYDRAILTDRTIHYNRPDITLQDKNSKTTYLIDIAVPNTHNLQRTIAEKVHKYTDLKEEVTRIWKQNKVYIVPVVLSTTGVIPKYLHHSIKLIDLKPTIYTLLQKAAILNTCRIVRKFLQIEEGTNETDGQTDLNT

SEQ ID NO: 21826 - protein, 1250 aa, Pyrrhopyge haemon
MSCDVAQEAHPNFPAPIPDTTTTTHTTEYSTSNRVQHETNRNVLRTMLPSTTLAGKNRQRMKWSDQINKELLRCYYIVTKNETNLTAWRYLLHKKFSEHIPELSHLSEQRLADQIRVIHRNNRVLPAERDHIKQEVALVMNTPNNSNERILTNTGITASNTILQSCTLIQANMQSKSNSDIQIINNTQDTFKSHAFTQTEITTTLITNDIEILQSAPLSDVFAEKIKEDLQSVLVEYAGTDPTLRPKLPKLHQSRKLTQLTDLFNTTILRQFFSDDSQLTDIHTLIYCSALVISKELGYKIGEMPRAQHKETRKPQWQHRIEKDILQLRSDIGRLTQYINNNNRSRKVTNRIEEIFKNTKVHSVHENNNKKPEEYLDTLKQKLALKANRLARYKKSLKRKNDNKLFNANEKCFYRKLVANTNSALPKQDEIPNVKELEQFWAGIWEVEEKHNEEAEWIIEEELRWKELKEMEFDQITELEIKNIMTRLNNWKSPGIDKIHNFWYKKLHILHNIIAKNLTQIILGKQNIPSFIAQGITYMIPKGNYTPEPSQYRPITCLPTIYKILTSVITHKITAHIEINNIISEEQKGCRRGHMGCKEQLIIDSLVHRHAITNKRNLHCTYIDYKKAFDSIPHSWLLRILQIYKISPTLINFLKKTMNHWKTQLHLDKITTREIKIKKGIYQGDSLSPLWFCLALNPISHMLHKCEAGYSLKGQNNSTRISHLIYMDDIKTYSKTEKEMKALIDTTLKFSNDINMKFGLDKCKTVHIIKGKIRPGDYAIGEEEKITAMEPNEMYKYLGYHQSKCLEHNKLKSFLMQNYKHRIKMICKSLLTGKSLIKSINTYAIPILTYSFGILKWTKTDINNIEISTRSLLTKHNYLHPKSSIERISIKRYSGGRGLINITNLWKNQIANLKNFFNQKAQNSTIHKAIVENDTNYTPLNLSEVTDLRNDEDTEQAKILQWKKKVMHGRHPHDLEQPHIDSIASNKWLSNGYLFPETEAFMIAIQDQVINTKNYRKYVIKDSALVDDKCRKCQSQPENIQHITGGCPNLTQTDYTHRHNQVANIIHRNLALKHQLIPKIYTPYYKYTPKPVLENSTHKIYFDRAILTDKTIHYNRPDITLQDKSTKTTYIIDIAIPNTHNLQKTIAEKIHKYTDLKEEIKRIWKQDKVYIVPIVLSTTGVIPAYLHHSLKLIDLPYSYIEAQKAAILNTCRIVRKFLQIEDNNQETDTHTPVHTHTHSFTHKHTHTHTH

SEQ ID NO: 21827 - protein, 1317 aa, Ebrietas anacreon
MRLRNRVIPQAGTPRNREGESGPALFSSGCPTYSGGGNESHMTAQTSAVAVDTSPPPSSPTSSTHSVFITPNSSPISSHFDHQSSSTSSTTTLVSLDVAQEARELTFGPTSDNTNPTRRNISKNISNNRVDHTHIDHISSISSNTRARGVLNDMLPTTTQAGKSRTRMKWTDDINKELLRCYYIVTHNETNLTAWRTLLHQKFIKNIPELSHLSEQRLADQIRVIHRNNRIPPSEREQLKHSISSLLSTTGDNDDDPISVTHDYIHTDTEMNTAQITPLTLTSNAFTQTENTSILIMNDIEILKPTALLEDTSISIIEDLKTALAEYSGTDPTLRPKLPKLRYSNKLNQMISLFNKTILCRFFSEDSQLIDIHTLIYCSALIISRELGYKVGDDTAVRSNNNNELKKPFWQIRIEKDIVQLRSDIGRLTQYINNNRSRKIINRVEIIFRNNKVHSTHESNNRKPEEYLDTLKQKLALKSKRLARYKKALKRRTDNTLFNKNEKLFYRKLIVDKTKEESSSKELPNAKDLERFWAGIWEVEEKHNEKAGWISEEESRWKDVEEMQYQNVTDVEIKVVTARLSNWKSPGIDKIHNFWYKKFNCLHNIIAKNLTLIIHGQQNTPHFIAQGLSYMIPKAEYTTQPSQYRPITCLTTIYKILTSILALKINTHIENNRILAEEQKGCRRGHMGCKEQLIIDSLVHRHSTTQKRNLHCTFIDYKKAFDSIPHSWLLQILEIYKINPIIIEFLKNTMKLWKTKLQLHNITTREIAIKTGIYQGDSLSPLWFCLALNPISHMLKKCNVGYSLEYQNHSTYISHLIYMDDIKLYSKSEKEMQKLIDTTVVFSNDIRMSFGFDKCKTVHIIKGKIKPGDYTIGENVKILAMESNELYKYLGYHQSKGLDHVKLKKSLTQAYKNRVNLICNSLLTGKSLIKAINTYAVPVLTYSFGIVKWTKTDINNIEISTRVTLTKNNYLHPKSAIERVFIKRQNGGRGLINISYLWKSQIRNLRTFFYQKAKDSAIHKAVVKNDNHHTPLNLFDENEVHNKDDPEQEKIKHWKTKVLHGRHPFDLEQPHVDAAASNKWLTKGCLFPETEGFMVAIQVQVINTRNYRKHIIKDPTITDDKCRKCHKQLENIQHITGACSYLAQTDYTHRHNQIANIIHQNLALKHHLIQNIYTPYYNYHPSPVLENNTHKMYFDRAILTDKTIHYNRPDITLQDKKNKITYLIDIAVPNTHNLQATITEKIHKYSDLKDEITRLWKQQKVYIVPIVLSTTGVIPTYLHHSLKLIDLPYSYITAQKAAILNTCRIVRKFLQTDDDNR

SEQ ID NO: 21828 - protein, 1124 aa, Pyrrhopyge hadassa
MTTPNNSNERILTSTEITASNTILQSSTLIPANMQSKSNSDIQIINNTQDTFKSHAFTQTEITTTLITNDIEILQSAPLSDVFAEKIKEDLQSVLVEYAGTDPTLRPKLPKLHQSRKLTQLTDLFNTTILRQFFSDDSQLTDIHTLIYCSALVISKILGYKIGEMPRGQQKETKKPQWQHRIEKDILQLRSDIGRLTQYINNNNRSSKITNRIKEIFKNTKVHSVHENNNTKPEEYLDTLKQKLALKANRLARYKKSLKRKNDNKLFNANEKCFYRKLVANTNSALPKQDEIPNVKELEQFWAGIWEVEEKHNEEAEWIIEEELRWKELKEMEFGQITELEIKNIMTRLNNWKSPGIDKIHNFWYKKLHILHNIIAKNLTQIILGKQNIPSFIAQGITYMIPKGNYTPEPSQYRPITCLPTIYKILTSVITHKITAHIEKNNIISEEQKGCRRGHMGCKEQLIIDSLVHRHAITNKRNLHCTYIDYKKAFDSIPHSWLLRILQIYKISPTLINFLKKTMNHWKTQLHLDKITTREIKIKKGIYQGDSLSPLWFCLALNPISHMLHKCEAGYSLKVQNNSTRISHLIYMDDIKTYSKTEKEMKALIDTTLKFSNDINMKFGLDKCKTVHIIKGKIRPGDYAIGEEEKITAMEPNEMYKYLGYHQSKCLEHTKLKSSLIQNYKHRIKMICKSLLTGKSLIKAINTYAIPILTYSFGILKWTKTDISNIEISTRSLLTKHNYLHPKSAIERMSIKRYSGGRGLINITNLWKNQIANLKIFFNQKAQNSVIHKAVVENDTNYTPLNLSQVTDLRNDEDTEQAKILQWKKKVMHGRHPHDLEQPHIDSIASNKWLSKGYLFPETEAFMVAIQDQVINTKNYRKYIIKDSALVDDKCRKCQSQPENIQHITGGCPNLTQTDYTHRHNQVANIIHQNLALKHQLIPNIYTPYYKYTPKPVIENNTHKMYFDRAILTDKTIHYNRPDITLQDKSTKTTYIIDIAIPNTHNLQKTIAEKIHKYTDLKEEITRIWKQDKVYIVPIVLSTTGVIPTYLHHSLKPIDLPHSYIEAQKAAILNTCRIVRKFLQIEDNNHETDTHTRTHTHAHTHSGSRTHTHTRTHIRTHTPTDIIY

SEQ ID NO: 21829 - protein, 1214 aa, Pyrrhopyge aziza
MRLRNREIPQAGTHQGESRPGPSGSGCPAYSGGGNVSHNTAQSRTAAVDNTPSQNSPPSSPISSTYSIHQSTSSSPHSYQSPTTSSSSSILSLMPCDVAQEAHANFPAPIPDTTTATHTTEYSTSNRVQHQSNRNVLRTMLPPTTLAGKNRQRMKWSDQINKELLRCYYIVTKNESNLTAWRYLLHKKISEHIPELSHLSEQRLADQIRVIHRNNRIVPAERDHIKQEVALVMTTPNNSNERILTSTGTTASNTILQSSTLIQANMQSKSNSDIQIINNTQDTFKSHAFTQTEITTTLITNDIEILQSAPVSDVFAEKIKEDLQSVLVEYAGTDPTLRPKLPKLHQSRKLTQLTDLFNTTILRQFFSNDSQLTDIHTLIYCSALVISKELGYKIGEMPRAQHKEAKKPQWQHRIEKDILQLRSDIGRLTQYMNNNNRSSKVTNRIEEIFKNTKVHSVHENNNTKPEEYLDTLKQKLALKANRLARYKKSLKRKNDNKLFNANEKCFYRKLVANTNSALPKQDEIPNVKELEQFWAGIWEVEEKHNEEAEWIIEEELRWKELKEMEFGQITELEIKNIMTRLNNWKSPGIDKIHNFWYKKLHILHNIIAKNLTQIILGKQNIPSFIAQGITYMIPKGNYTPEPSQYRPITCLPTIYKILTSLITHKITAHIEKNNIISEEQKGCRRGHMGCKEQLIIDSLVHRHAITNKRNLHCTYIDYKKAFDSIPHSWLLRILQIYKISPTLINFLKKTMNHWKTQLHLDKITTREIKIKKGIYQGDSLSPLWFCLALNPISHMLHKCEAGYSLKVQNNSTRISHLIYMDDIKTYSKTEKEMKALIDTTLKFSNDINMKFGLDKCKTVHIIKGKIRPGDYAIGEEEKITAMEPNEMYKYLGYHQSKYLEHTKLKSSLIQNYKHRIKMICKSLLTGKSLIKAINTYAIPILTYSFGILKWTKTDINNMEISTRSLLTKHNYLHPKSAIERMSIKRYSGGRGLINISNLWKNQIANLKIFFNQKAQNSVIHKAVVENDTNYTPLNLSQVTDSCNDENTEQAKILQWKKKVMHGRHPHDLDQPHIDSIASNKWLSKGYLFPETEAFMVAIQDQVINTKNYRKYIIKDSALVDDKCRKCQSQPENIQHITGGCPNLSQTDYTHRHNQVANIIHQNLALKHQLIPNIYTPYYKYTPKPVLENSTHKMYFDRAILTDKTIHYNRPDITL

SEQ ID NO: 21830 - protein, 1301 aa, Chiomara georgina
MRLRNRVIPQAGTSPTSEGESGPGPSSPGSPTYSGGGNVSHMTTQTSSVVVQPSPSHITSNPSSPTSSAYSLFQSPSSSPHSFQFQQSSSRSSTTTLVSLDVAQEAFSLNSVPTSDITNLARLNVEQNNMVMHVNHDTPSYSSNTPVTGVLKDMLPPTTQAGKYRKRMKWTYEINLDLLRCYYLVTHNETNMTAWRTLLHRKFTEKVPELSHLSEQRLADQIRVIHRNNRIPLIERERLKQSITLTTSSSENHDEHTTPMVNDHHLHTDTQIHTSPLTSNSHTHTQTETTHILITNDIEILQQTTSPENTHLKIKQDLHSTLIKFAGTDPTLRPKLPKLRYSKKLDQLISIFNNNILAYFISDDSQLSDLHTLVYCSAFVISQELGFRIGEHIRSHRNRETRTPSWQSRIEKDIVQLRSDIGKLTQYIKHNRSKKVVDRVEVIFRNMKIHSTHENINRTPEEYLDTLKQKLALKAKRLARYKKALKRKYDNYQFNTNEKLFYNNLKSGSVQPVANQNKIPDLKDLEHFWAGVWEVEKEHNEDATWIKEEKSRWEMLEEMKFEEITETDLNIVTSRLNNWKSPGIDRVHNFWYKKLHCLHKLIAKNLTQIITGQQNPPQFIAQGLTFMLPKEKYTDQPSQYRPITCLPTIYKILTSVITHKITTHIEQNKILSEEQKGCRRGHMGCKEQLVIDSLIHKHANTNNRNLHCTYIDYKKAFDSIPHSWLVRVLQIYKISPVIISFLENIMKMWKTKLYLDKITTREISIKKGIYQGDSLSPLWFCLALNPISYMLNKLKVGYRLKHENNETLLSHLIYMDDIKLYSRTEKDMQRLIDITAMFSKDINMTFGLDKCKTVHIIKGKIQPGTFTVSDSELITAIEPNELYKYLGYYQSKGIDHCRLKASLKQAYICRVNTICKSLLAGKSMIKAINTYAIPILTYSFGIIKWSKTDINSIAIKTRTLLTKHNFLHPKSAIERMTLKRINGGRGLINLTELWKNQIVHLRKFFYQKANSSHIHKAIVLNDFNFTPLNLADSTEQIRDCDINRTATEQWKSKTLHGRHPYDLEQAYVDTAASNKWLTRGSLFPETEGFIMAIQDQVINTKNYRKHIIKDTTVTDDRCRKCHNHPETIQHITGACPSLAQTEYTHRHNQIANIIHQNLAIKHNLIPNTDTPYYNYKPSSVLENNFYKMYYDRAILTDKTIHYNRPDITLQDKKNKTTYLIDIAVPNTHNLQKTIAEKIHKYTDLKDEITRIWNQDKVYIVPIVMSTTGVIPKYLHHSLKLIDLPYAYISAQNAGLYESSYN

SEQ ID NO: 21831 - protein, 1313 aa, Eantis tosta
MIAQSRTVAVNNQPPYNNSSLSSPASSTYSLFQSPSSSPQSYEHQRFSPRSSPITLSSNVAQEAHMSAISLVSITDINNSTREPQYSLYNRVEHNTPSVSNNTPTKSHNTPSASHNIPSASHNTPIRSVLQQMLPATTLTGKSRQRMRWTDEVNRELLRCYYFVTHNETNLTAWRPLLHKRFSEKYSDLKHLSEQRLADQIRVIHKNNRITVSERECIKQAVALVLVTTDKNNEHTDTNDKDHHLIFNTSPKTIFHQPNTLTRTSATNNSQTLTNSQSTQTETRNLLLENEIEILQPSPPKDITSKNLKNELHAAIIQYGGMDPTLRPKLPKLKHTRKLNQLTDLFNNKILNHFFTEDSQLTDIHTLIYCSALVISRELGFKIGNVHQIPNNREPKKPEWQERIESDIIQLRSDIGRLTQYINNNRSRKVTNRIQTIFRNTKVHSTHENNNKTPEEYLDTLKQKLSLKANRLARYKKALKRRNDNKLFRTNEKLFYRKLASDTNTATPEQQNIPDLKALEQFWAGIWEMDEKHNEEAKWISEEEQRWKALEEMKFEKISEIDIKTVTSRLNNWKSPGIDKVHNFWYKKFHILHNIIAINLTHIILGQQNTPSFIAQGITYMLPKEKYTNQPSNYRPITCLPTIYKILTSVIANKITIHVEENNILSEEQKGCRRGHLGCKEQLVIDSLVHRHATSHKRNLHCTYIDYKKAFDSIPHSWLLRILQIYKINPHLIQFLNETMNLWKTKLHLNNIVTREITIKKGIYQGDSLSPLWFCLALNPISHRLHVQKVGYDIRYLNNSTRISHLIYMDDIKLYTKTKKDMQTLIDTTLQFSRDINMNFGFDKCKTIHIVKGKIQPGDFTVNEYDKIAAMETGESYKYLGYHQAKGLDHTELKTSLIKEYKHRLKIICKSLLTGKSLIKAINTYAVPILTYSFGIVKWTKTDIKHIEINTRTTLTKHNYSHPKSAIERMTLKRQKGGRGLINITNLWKTQISNMRLFFKRKADRSEIHKAVVQNDFKLTPLNLSEETEPNIDEDTDQTRTEQWKKKVLHGRHPHDLDQPHVDATASNKWLITGSLFPETEGFLIAIQDQVINTRNYRKHIIKDSTVTDDRCRKCHIHPETIQHITGACPNLTQTDYTHRHNQIANIIHQNLALKHSLIPNSYTPYYKYTPKPVLENNTHKMYFDRTILTDKTTHFNRPDITLLDKINKITYLIDIAVPNTHNLQKTIAEKIHKYMDLKDEVTRMWKQEKVYIVPIVLSTTGVIPQCLHHSLKLIGLPYAYIPAQKAAILNTCRIVRKFLQIDDNTTETNGLT

SEQ ID NO: 21832 - protein, 1252 aa, Ortholexis melichroptera
MSQLPIQCQTAVGITQDPNSRTVTPSPTLTDSTDNSRPFSVIPTLAVAQEANAFQPESTKAGKPRVRMKWTKDVNIFIMRTYYRVTKLETDLTIYRKLLYDHFMRQYPEVNVSEQRVSDQRRVIIRNKMISDEELTQIKEEIKLELIQAESSSSQAISPNVTNLLNTPDPRTTTQIAYTNTILHRNVISQSQSNTQSQTAYSDQPTSTLHASTQTETSTLLIVNENETILTVPISDAVAQKLHNNLHTVLIKYRGTDPTLRPILPKLKYSTKLTQLTEIFNNKILYHFFSEESQLVDVHTLIYCSALVISQELGYKVKDTYQPLQSNDRKPTWQIRLEKDIIKLRSDIGRLTQYINNNNRSKKVMDRVKVIFKNTKVHSIHERDNREPAEYLDTLKQKLSLKSNRIARYKKALKRKNDNKLFNTNEKLFYRKMSADKNSTTPNNNNLPDVNDLEKFWAGIWETDVHHNNNVTWITEEENRWTAMEEMKFEHITEIDVKVVTARLKNWKSPGIDKIQNFWYKKFNSLHKIIAKNLTQIIHGQQNIPQFLAQGITYMLPKGKYTCQPSQYRPITCLPTIYKILTSALTLKITAHIEENNILSEEQKGCRRGHMGCKEQLVIDSLIHRHAALNKRNLHCTYIDYKKAFDSIPHSWLLRILQIYKINPILIKFLNNIMKFWKTTLHLDKIKTRQIFIKNGIYQGDSLSPLWFCLALNPISHMLGRRDAGYRLKHDNHNTSVSHLIYMDDIKLYAKTEKEMKTLIDTTVEFSTDINMQFGLDKTRTVHIVKGRIRPGDYEVGEGNRIIAMEETELYKYLGYHQSRGLDHSKLKTSLAQEYKYRVNAICRSKLTGKSLIKAINTYAIPILSYSFGIIKWTKTDINNLEISTRTSLSKHNFLHPKSAIERMSVKRQIGGRGLINIAILWKNQISNLRRFFYHKANKSDIHKAIVRNDFNLTPLNLVEETGPNMENDSEEARLEQWKKKVLHGRHPHDLEQPHIDSIASNKWLTLGYLFPETEGFMVAIQDQVIDTKNYRKHIIKDPTLTDDRCRKCHTQAENIQHITGACPYLTQTDYTHRHNQIANIIHQKLALKHKLISNTYTPYYKYNPNPILENRTHKMYFDRAILTDKTIHYNRPDITLQDKKNNITYLIDVAVPNTHNLLKTIAEKVHKYTDLKEEIIRIWKQKKVYIVPIVLSTTGIIPKHLHHSLKLIDLKPNTYIQIQKAAILNTCRIVRKFLEIDHNTNETDGQTDTGT

SEQ ID NO: 21833 - protein, 935 aa, Telemiades fides
MGHTIGETNREQRKSEIKKPNWQYRIEKDIVQLRSDIGRLTQYIKNNRSKKVVDRVNIIFKNTKKHSVHESHNKKPEEYLDTLKQKLALKARRLARYKKALKRKNDNKLFYTNEKIFYRKLMSESTTSVQNHINIPDVKDLEQFWAGLWEVDERHNEEATWIKEEENRWSLLEEMNFDHITETDIKNVTARLNNWKSPGIDKVHNYWYKKFSILHKILAKNLTEIVFKRQNTPNFIAQGITYMIPKVKYTNNPSEYRPITCLPTIYKILTSVITDKINAHVETNNILSEEQKGCRRGHMGCKEQLIIDSLIHRHATINKRNLHCTYIDYKKAFDSIPHSWLLRILKIYKINPVIVEFLKNTMTFWKTKLQLNNVTTRQIAIKKGIYQGDSLSPLWFCLALNPISHMLHKRTPGYRLKHHNNSTCISHLIYMDDIKLYSKTEKEMQQLINTTVEFSNDIKMQFGLDKCKTIHIIKGKIQPGDYLVNVDEKIKAMEPNELYKYLGYYQSKGLDHSKLKNTLLQEYKHRVNVISKSLLVGKNLIKAINTYAIPILTYSFGIVKWTKTDINNIEISTRTCLTKNNYLHPKSAIERMTLKRQNGGRGLINLTNLWQNQIFSLRNFFYRKANNSDIHKAIVQNDSNFTPLNLVDVTEVNREGNSEQARIENWKSKVLHGRHPFDLEQPHIDPSASNRWLTQGCLFPETEGFMIAIQDQVINTKNYRKYITKDPTLTDDRCRKCHRHPENIQHITGACPNLAQTDYTHRHNQIANIIHQSLAHKHHLIPNTYTPYYKYCPSPVLENSTHKMYFDRAILTDKTIHYNRPDITLQDKINKITYLIDIAVPNTHNLQKTIAEKIHKYTDLKDEITRIWKQQKVYIVPIVLSTTGIIPRYLHHSLKLIDLPNSYVAAQKAAILNTCRIVRKFLQINEDSTLIDEQT

SEQ ID NO: 21834 - protein, 1328 aa, Camptopleura auxo
MRLRNREIPQAGTSRTREEESGPEPPSSGCPAYSGGGNVSHMAAQTSSVVVDKTSSSSHVTSNPSSPTSSTHSLFQSPSSSPHSFQFQHSPSPSSTTTSLSLDVAQEAFALNPVPTNDNTIPTPLNTITNNVTASGVDNTLANHIASHSYNTPAEGILKDMLPATTKAGKSRKRMKWSDDINRELLRCYYIVTNNEANLTAWRPLLHQKFTEYIPELGHLTEQRLADQIRVIHKNNRIAPTERERIKQSVISLISSPDNHEQYTTPLTNDHINADTQLENTQHTSNLHSLTPTETRHENLSVSNDIEMMQHTTLSEDTIIKLTEDLHTALAEYTGTDPTLRPRLPKLKYSNKLNHIIKIFNNNILYNFFSDDSHLVDIHTLIYCSALVISREIGYKIEEKTGSQYHSERRKPSWQIRLEKDITLLRSDIGKLTQYINNNRSKKVVNRVELIFMNTKVHSSHENNNRKPEEYLDTLKQKLALKSKRLARYKKALKRKTDNRLFATNEKLFYRKLISDKDTTCNTKQIPNKKDLEEFWAGIWESEENHNENAYWITEEENRWKTLDEMKFQNITEIEIKVITGRLNNWKSPGIDRLHNFWYKKFHCLHKILAKNLTQIISGQQNTPHFIAQGISYMLPKTKHTSHPSQYRPITCLTTIYKILTSILSHRINTHIENNRIIAEEQKGCRRGHMGCKEQLIIDSLIHRHAATHKKNLHCTYIDYKKAFDSIPHSWLLHILKIYKINPFIIEFLKNTMKLWKTKLQIDNISTREITIKKGIYQGDSLSPLWFCLALNPISYMLNKNKVGYTLEHQNNSTCMSHLIYMDDIKLYSRTEKEMQTLVDTTVGFSKDINMSFGFDKCKTIHIVKGKIKPGGYIINEHEKIAAMEPHEVYKYLGYYQSKCLDHITLKKSLVQVYKQRVNLICKSLLSSKSLIKAINTYAIPILTYSFGIIKWTKTDINNIEISTRTTFTKHNYLHPKSAVERMTIKRDSGGRGLININTLWKNQILNLRSFFYKKANDSDIHKTIVQNDNNYTPLNLRDENGLHSKYNTEKEKTEQWKSKVLHGRHPFDLEQPHVDTAASNKWLTKGSLFPETEGFIMAIQDQVINTRNYRKHIIKDPTLTNDRCRKCHIHSENIQHITGACPNLAQTDYTHRHNQIANIIHQNLALKHHLIQNTYTPYYNYHPSPVLENKTHKMYFDRAILTDKTIHYNRPDITLQDKINKTTYLIDIAVPNTHNLQITIAEKIHKYTDLKDEVTRIWKQEKVYIVPIVLSTTGVIPKYLHHSLKLIDLPFSYITAQKAAILNTCRIVRKFLQIDEDKGLTDGQINS

SEQ ID NO: 21835 - protein, 1016 aa, Carcharodus alceae
MPLSDSSVERIKEDLQSVIVEYAGTDPTLRPKLPKLHQSRKLSHITELFNNIILRHFFSDDTELTDIHTLIYCSALVISKELGYKIGEIPRPRNRETKKPDWQDRIERDILQLRSDIGKLTQYINNNTKSRKVINRVEEIFRSTKVHSVHESNNRKPEEYLDTLKQKLALKANRLARYKKTLKRKNDNKLFNANEKIFYRKLTTDINSTLPKQSEIPNTTDLEQFWAGIWEKDEEHHEEASWIAEEENRWKELEEMKFDQITDIDIKNVTARLNNWKSPGLDKIHNYWYKKFYTLHSVIAKNFTRIILGKQNTPHFIAQGITYMIPKDKYTTEPSQYRPITCLPTIYKILTSVITHKITSHIEKNNIIAEEQKGCRRGHMGCKEQLIIDSLVHRHAIKNNRNLHCTYIDYKKAFDSIPHSWLLRILQVYKINHSLIDFLKNVMKLWKTKLHLNGITTRDIAIKKGIYQGDSLSPLWFCLALNPISHMLHECGAGYNLKIQNDSTRISHLIYMDDIKIYSKTEKEMKTLIDTTLKFSKDINMKFGLDKCRTIHIIKGKIRPGDYVIGKEDKITAMEPNEMYKYLGYYQSKGLDHTKLKSSLTQIYKSRVNTICKSLLIGKSLIKAINTYAIPILTYSFGIVKWSKTDINSIEINTRTCLTKHNYLHPKSAIERMTLKRHSGGRGLINIKNLWKNQILNLRDFFYQKAHNSIIHRAVVQNDTNFTPLNLVEETELNKDEDTEQAQIVQWKKKVLHGRHPHDLEQPHIDSVASNKWLTKGYLFPETEAFMVAIQDQVINTRNYRRHIIKDTTVTDDKCRKCHSYPENIQHITGACPNLAQTDYTHRHNQIANIIHQNLALKHKLIPNIHTPYYKYTPSPVLENNTHKMYFDRAILTDKTIHYNRPDITLQDKRNKTTYLIDIAIPNTHNLQKTIAEKIHKYTDLKDEVTRIWKQDKVYIVPIVLSTTGVVPTYLHHSLKLIDLPYSYIEAQKAAILNTCRIVRKFLQIDDDNTQTSNTD

SEQ ID NO: 21836 - protein, 1288 aa, Phalera bucephala
MKMVLTRSRVPQAGTSGNSTGESRPEPSSGSPSYSGGGNMSQLPIQSQTVVGIQQNSNSRPPPLTLTDSTDYSRPSSATPTLSATQEANAFQPASTKAGKPRVRMKWTNDVNLFIMRTYYRVTKLETDLTIYRKLLHEHFIRQYPEVNVSEQRVSDQRRVIIRNKMISDKILAQIKEEVRIELEQIESSPSQSIPLAAPSLQSSQHTQRDVPDTNLPSESDLFSHTLPSTHSQNTLRTPLTSNSHAFTQTEITTILMVNEIETLRPTPLPDTIAQKLHDNLQTNLVKYAGTDPTLRPKLPKLKYSAQLTQLTEIFNNKILHHFFSEDSQLIDIHTLIYCSALVISLELGYKIIDEESNRPQRNIERKPTWQIRIEKDISQLRSDIGRLTQFINNNRSKKVVDRVEIILKNTNIHSVHESNNRKPEEYLDTLKQKLALKAHRLARYKKALLRKNDNKLFHTNEKLFYRKLTTDNANPKPNESEIPKAEDLENFWGGIWETDTQHNEEATWIAEEESRWEGLEVMKFEEITETDIKNTVARLSNWKSAGIDRIHNFWYKKFNTLHKILAKNLTQIIHRQQNTPAFIAQGITYMLPKGKSTTQPSLYRPITCLPTIYKILTSVIAQKINIHIENNNILSEEQKGCRLAHMGCKEQLIIDSLVHRHATVNKRNLHCTYIDYKKAFDSIPHSWLLRILQIYKINPVIIEFLKNTMSLWKSKLHLNHIITREIHIKKGIYQGDSLSPLWFCLALNPISHMLRERKAGYHLKHDNINTCISHLIYMDDIKLYAKSEKEMKLLIDTTVEFSKDINMQFGLDKCKTIHIIQGKIRPGGYAISDDERIIAMDPNELYKYLGYHQSKGIDHCKIKTSLLREYKYRVNAICKSKLTGKSIIKAINTFATPILTYSFGIIKWTKTDINHIEISTRTILTKHNYLHPKSAIERMTLKRENGGRGLINIYLLWIKQITNLKLFFQQKARHSDLHKAIVKNDFNHTPLNLTIENGPSTEMHSEQERTEQWKKKVLHGRHLHDLDQAHVDSIASNKWLTLGSLFPETEGFMVAIQDQIINTKNYRIHIIKDPTLTDDRCRKCHSHPENIQHITGACPNLTQTDYTHRHNQIANIIHQNLAIKHHLIPNTNTPYYKYNPSPILENSTHKIYYDRAILTDRTIHYNRPDITLQDKNSKTTYLIDIAVPNTHNLQRTIAEKVHKYTDLKEEVTRIWKQNKVYIVPVVLSTTGVIPKYLHHSIKLIDLKPTIYILLQKAAILNTCRIVRKFLQIEESTNETDGQTDLNT

SEQ ID NO: 21837 - protein, 1342 aa, Mimoniades versicolor
MRLRNREIPQAGTLQGESRPGPSGSGCPAYSGGGNVSHNTAQSRTAAVDKTPSQNSQPSSPISSTCSIYQSTSSSPHSYQSPTTSSRSSTLSILSCDVAQEAHANFPVPTPDTTTATHTTECSTSNCVQHQTNRNVLRNMLPPTTLAGKNRQRMKWSKPINKELLRCYYIVTKNETNLTSWRYLLHKKFSEHVPELSHLSEQRLADQIRVIHRNNRVLPAERQHIKQEVALVMSSPNNSIERILTNTGNTPSNTIPQSCRLIQANIQSKSNSDIQIINNTQNTFKSHAFTQTETITTLITNDIEILQSATLADVFAEKIKEDLQSVLVEYAGTDPTLRPKLPKLHQSRKLTQLIDLFNTTILRQFFSDDSQLTDIHTLIYCSALVISKELGYKIGEMPRAQHKEPRKPQWQHRIEKDILQLRSDIGRLTQYINNNNRSRKVTNRVEEIFKNTKVHSIHENNNTKPEEFLDTLKQKLALKSNRLARYKKSQKRKNDNKLFNANEKCFYRKLVTSRNNALPKQNEIPNVKELEKFWAGIWEVEEKHNEEAEWIIEEEQRWKELKEMEFGQITELEIKSVMTRLNNWKSPGIDKIHNFWYKKLHILHNIIAKNLTQIILGKQNIPSFIARGITYMIPKGNYTTEPSLYRPITCLPTIYKILTSIITHKITAHIEKNNIISEEQKGCRRGHMGCKEQLIIDSLVHRHAITNKRNLHCTYIDYKKAFDSIPHSWLLRILQIYKISPNLIEFLKKTMNLWKTQLHLDKITTREIKIKKGIYQGDSLSPLWFCLALNPISHMLHKCEAGYRLKVQNNTTRISHLIYMDDIKTYSKTEKEMKALIDTTLKFSNDINMKFGLDKCKTVHIIKGKIRPGDYTIGEEETITAMEPNDMYKYLGYHQSKYLEHTKLKSSLMQNYKHRIKIICRSLLTGKSLIKAINTYAIPILTYSFGILKWTKTDINNIEISTRSLLTKHNYLHPKSAIERMSIKRYNGGRGLINIPHLWKNQIVSLKNFFYQKAQNSVIHKVVVENDINYTPLNLTEVTNLCNDEDTEQAKMLQWKKKVMHGRHPHDLEQPHIDPIASNKWLSNGYLFPETEAFMVAIQDQVINTRNYRKHIIKDSAVIDDKCRKCQSHPENIQHITGACPNLTQTDYTHRHNQVANIIHQNLALKHHLIPNIYTPYYKYTPKPVLENSTHKMYFDRAILTDKTIHYNRPDITLQDKITKTTYLIDIAIPNTHNLQKTIAEKIHKYTDLKEEITRIWKQDKVYIVPIVLSTTGVIPIHLHHSLKLIDLPHTYIEAQKAAILNTCRIVRKFLQIDDNNQGTVTHTTVHARAHSASQTNTHALT

SEQ ID NO: 21838 - protein, 1296 aa, Codatractus imalena
METRSKSKLRWPLPGGDRRGTPGADAGCSSIRAVSGEELSRRAPTGDSQPENITAAFTELDRQTDSRSNSPCEPYSPSTISYNPSVQSSPSSSGHRGTPTPVLDVAQEANAFLPASTKAGKTRVRMKWSNEANLFIMRTYYYITKLETDFTIYRKKLHELFTLKYPNVNVTQQRISDQKRVIERNKLLSQEDLDQLKEEVKKQLQNEKSNSVKENLNLDKSTYSHTALPSQIVSSYQHMPNSTQTSHTSTQTVLVNLLIENDVEIVQCNPTSIEPRIEELKDKLRSTLTLYSGMDPTARPALPKLKYSHKLTELIHSFNHDILVEFITPDTQLTDLHTLVYCTAVVISEELKYKIAQDSGSRKRKEDYRPPWQRRLEEDIVKLRVDIGRLSQYINNNRSKKVVARVQEIFRNTKIHTRHEINNRNTEEFLDTLKQKLALKSHRLKRYKKAQQRKNDNGVFATNEKQFYRNLLKPHNDTYNSNVETPTTEQLEEFWSGIWEDKVQHNDKADWINKEQQRWNTIEEMQLTEVTENEISNITARLHNWKSPGIDKVHNFWYKKLTSLHKIIARNLTEIISGKQNIPEFIATGITYMLPKNNYTSQPSQYRPITCLPTIYKILTSVITRKINSHIEYYNIIAEEQKGCRRGHMGCKEQLIIDSTIMKHATLRNRNLHCTYIDYKKAFDSIPHSWLIQILEIYKVNPTIIDFLRNIMTHWKTTLHLNSRLSPSIITRQIAIRKGIYQGDSLSPLWFCLALNPLSHQLHNDQAGYRLKNNNTETIISHLIYMDDIKLYSKNDKEMKTLINTTTKFSKDINMHFGLDKCKTVHIVKGKVRSGDYAVDDINTITAMELTDLYKYLGFQQLKGLDHTSIKQTLSTEYKKRINAICKTQLSGKHLIKALNTYAIPILTYSFGIIKWTKTDIEQIERTTRTILTKHNNLHPKSAIERLTIKRQDGGRGLVDIHHLWLKQIYSLKTFFHTKSQTSNIHKAITQNDKNYTPLNLEEQTDLDNPNNRDPQKNKVEDWKKKILHGRHPHDLYQSHVDTMASNMWLKTGSLFPETEGFLIAIQDQVINTKNYRKHIIKDHAITDDKCRKCNTQPETIQHITGACASLTQTDYTHRHNQLANIIHQKLAHKHKLIQYNTSTPYYKYKPQTVLENDSYKLYYDRAILTDRTIHYNRPDITLQDKKNKITYLIDIAVPNTHNIQKTVTEKINKYTELKEEIIRIWKQDKVYVVPIVISTTGIVPNNIHNSLKLLELNKNLYITLQKAAILNTCRIVRKFLQLEENKIIQNHPPTM

SEQ ID NO: 21839 - protein, 1290 aa, Codatractus alcaeus
METRSKSKLRWPLPGGNRRGTPGADAGCSSIRPVSGEELSRRTPTGDSQPENITAANTELDRQTDSRSNSPCEPYSPSTISYNPSVQSSPSSSGHRGTPTPVLDVAQEANAFRPASTKAGKTRVRMKWSNEVNLFIMRTYYYITKLETDFTIYRKKLHELFTLKYPNVNVTQQRISDQKRAIERNKLLSQQDLDLLKEEVKKQLEHEESNSVIETLNLEKSTYTALSSQKVSSYQHMRNNTQTSHTSTQTVLMNLLIENDVEILECNPTSIEPRMQEIKDKLRSTLTLYSGMDPTARPALPKLKYSHKLTELIHSFNHDILVEFITPDTQLTDLHTLVYCIAVVISEELKYKIVQDPRSRKRKEDYRPPWQRRIEEDIVKLRVDIGRLSQYINNNRSKKVVARVQEIFRNTKIHTRHEINNRNTEEFLDTLKQKLALKSHRLKRYKKAQQRKIDNGVFATNEKQFYRNLLKPQNDTYNSDVETPTTEQLEEFWSGIWEDQVQHNDKANWIDKEQQRWKTIEEMQFTEVTEDEISNITARLHNWKSPGIDKVHNFWYKKLTSLHKIIARNLTEIISGKQNIPEFIATGVTYMLPKNNYTSQPSQYRPITCLPTIYKILTSVITRKINSHIEFHNIIAEEQKGCRRGHMGCKEQLIIDSTIMKHATSRNRNLHCTYIDYKKAFDSIPHSWLIQVLVIYKVNPTIIDFLRNIMTHWKTTLHLNSRLSPSIITRQIAIRKGMYQGDSLSPLWFCLALNPLSHQLHNDQAGYRLKHNKTNTVISHLIYMDDIKLYSKNDKEMKTLINTTTKFSKDINMHFGLDKCKTVHIVKGKIRPGDYAVDDKNIITAMELTDLYKYLGFQQLKGLDHTSIKQTLSTEYKKRINALCKTQLSGKHLIKALNTYAIPILSYSFGIIKWTNTDIEQIERTTRTTLTKHNNLHPKSAIERLTIKRQDGGRGLVDIHHLWLKQIYSLKTFFHTKSQTSNIHKAITHNDKNYTPLNLDEQTDLDNPNNRNPQTNKVQNWKKKILHGRHPHDLNQSHVDTMASNMWLKTGSLFPETEGFLIAIQDQVINTKNYRKHIIKDHAITDDKCRKCNAQPETIQHITGACPSLTQTDYTHRHNQLANIIHQKIAHKHKLIQHNTTTPYYKYKPQTVLENDSYKLYYDRAILTDKTIHYNRPDITLKDKKNKITYLIDIAVPNTHNIQKTVTEKINKYTELKEEITRIWKQDKVYVIPIVISTTGVVPNIIHNSLKLLDLNKNVYITLQKAAILNTCRIVRKFLQLQENKIQNSM

SEQ ID NO: 21840 - protein, 1293 aa, Codatractus cyledis
METRSKSKLRWPLPGGDRRGTPGADAGCSSIRPVSGEELSRRAPTGDSQPENITAANIELDRQTDSRSNSPCEPYSPSTISYNPSVQSSPPSSGHRGTPTPVLDVTQEANAFLPASTKAGKTRVRMKWSNEVNLFIMRTYYYITKLETDFTIYRKKLHELFTLKYPNVNVTRQRISDQKRAIERNKLLSQQDLDQLKEEVKKQLQHEETKSVNETLNLEKSTYSHTNTTLPSFYQHMPNNTQITNTSTQTILMNLLIENDVEILECNPTTIDPCIQEIKDKLRTTLTLYSGMDPTARPALPKLKNSHKLTELVHSFNHHILVEFITPDTQLTDLHTLVYCTAVVISEELKYKIVKDSGIRKCKEDYRPPWQRRIEEDIVKLRVDIGRLSQYINNNRSKKVVARVQEIFRNTTIHTRHEINNRKPEEVLDTLKQKLALKSHRLKRYKKAQQRKNDNSVFATNEKQFYRNLLKPQNDTYNSDVETPTTEQLEDFWSGIWEEQVQHNDKADWIDKEQQRWHTIEEMKFTEVTEDEISNITARLHNWKSPGIDKIHNFWYKKLTSLHKIIARNLTEIISGKQNIPEFIATGITYMLPKNNYTSQPSQYRPITCLPTIYKILTSVITIKINSHVEYHNIIAEEQKGCRRGHMGCKEQLIIDSTIMKHATLKNRNLHCTYIDYKKAFDSIPHSWLIQVLEIYKVNPTIIDFLRNIMTHWKTTLHLNSRLSPSIITRQIAIRKGIYQGDSLSPLWFCLALNPLSHQLHNDQAGYRLKDSNTETIISHLIYMDDIKLFSKNDKEMKRLIDTTTKFSKDINMHFGLDKCKTVHVVKGKIRPGDYVVDDLNTITAMELTDLYKYLGFQQLKGLDHTSIKQTLSTEYKKRVNAICKTQLSGKHLIKALNTFAIPILTYSFGIIKWTKTDIEQIERTTRTTLTKYNNLHPKSAIERLTIKRQNGGRGLIDIHHLWLKQIYSLKTFFHAKSQTSNIHKAITQNDKNYTPLNLDEQTDLDNPNNRDPQKNKVEDWKKKILHGRHPHDLNQSHIDTMASNMWLRTGSLFPETEGFLIAIQDQVINTKNYRKHIIKDHAVTDDKCRKCNTQPETIQHITGACPSLTHTDYTHRHNQLANIIHQKLAHKHKLIQYNTTTPYYKYKPQTVLENDSYKLYYDRAILTDRTIHYNRPDITLQDKKNKITYLIDIAVPNTHNIQKTVTEKINKYTELKEEIIRIWKQDKVYVVPIVISTTGVVPNNIHNSLKLLDLYKNVYITLQKAAILNTCRIVRKFLQLEENKIQNHSPTM

SEQ ID NO: 21841 - protein, 1053 aa, Pyrgus malvae
MFTTFPTDGQQITSHSHAFTQTDTMTILLDNDIEILPPTQVSDFEEEKIKENLHTVLIEYAGTDPTLRPKLPKLTYSTQLFKLIDLFDTKILSNFFSKESQLTDIHTLIYCTALVISRHLGYNIGETTRPQQNGDIKKPRWQIRIEKDIVQLRSDIGRLTQYMKNNRSRKVVNRVEIIFKNMKAHSIHESDNRRPEEYLDTLKQKLALKANRLARYKKALKRKSDNKLFNTNEKLFYRKLSSGTEKLLTEQKEIPNVKDLEDFWSGIWEGNEKHNDTAAWIAEEEMRWRELEEMKFEEVTETDINYVTSRLKNWKSPGIDKIHNFWFKKFRSLHEILAKNITQIILGKQRTPKFIGQGITYLLPKTKFTSQPSQYRPITCLPTIYKIITSVLTNKINSHVENNNIISEEQKGCRRGHRGCKEQLIIDSLIHKHATTHKRNLHCTYIDYKKAFDSIPHSWLLRVMEIYKINPYIIKFLKNTMHLWNTRLILDKVTTRVISIKKGIYQGDSLSPLWFCLALNPISHMLHKHRAGYHLKHENHDTYISHLIYMDDIKLYTKTDKEMQTLIKITSEFSKDINMNFGLDKCKTIHIVKGKIRPGDYTLCDGDIITAMEPNEVYKYLGFYQSSRLDHTKLKATLIQEYKRRIKIICNTLITSKSLIKAINTFAIPILTYSFGIIKWSKTDINHIEITTRTSLTKHNYLHPKSAIERLTLKRENGGRGFIKIDDLWKKQITGLRQFFHHKAVDSDIHKAIVYNDFNYTPLNLSDNIEPSNVDNDSQKVRIEQWKKKVLHGRHPHDLDQSHIDSIASNKWLTKGYLFPETEGFMVAIQDQVINTKNYRKHIIKDPTVLDDRCRKCHSHPENIQHITGACPNLTQSDYTHRHNQIANIIHQNLALKHHLIPANKHTPYYKYNPSPVLENKTHRMYFDRAILTDKTIHHNRPDITLQDKIKKITYLIDVAVPNTHNLQKTISEKIQKYMDLKDEITRIWKQEKVYIVPVVLSTTGVIPKYLHHSLKLIDLPYAYIPAQKAAILNTCRIVRKFLQIEDDINNTN

SEQ ID NO: 21842 - protein, 950 aa, Heliopetes sublinea
MKLIDLHTLIYCSALVISRELGYKIGEPTRPQQNKVMKKPEWQIRIERDIVQLRSDIGRLTQYIHNNNRSKKIVDRIEIIFKNTKIHSSHESNNRKPEEYLDTLKQKLTLKANRLARYKKALNRKNDNKLFNSNEKVFYRKLTKNSDRETSTKQKEMPTVKDLEDFWGGIWEVDQKHNEKAAWITEEEHRYDLLEEMKFEQITETDIKHITERLNNWKAPGIDKVHNFWYKKFYTLHRTLAKNFTQILTGQQSIPEFIGHGITYMLPKGNYTIQPSQYRPITCLPTIYKILTSLITHKITIHIESNNILSEEQKGCRRGHRGCKEQLIIDSLIHRHANTNKRNLHCTYIDFKKAFDSIPHSWLLRILKIYKINPNIIEFLEKVMKLWKTKLQLDTCSTREIIIKKGIYQGDSLSPLWFCLAINPISRMLNDRKVGYHFKSQDQNTCISHLIYMDDIKLYTKTETEMQYLIDITATFSKDINMQFGIDKCKTIHIIKGKIHPGDYVVNREEKITAMEPNDFYKYLGFHQSKGLDHHSLKLSLTQEYKRRVINICKTMLTGKSLIKAINTYAVPVLTYSFGIVKWTKTDINNIEISTRTALTKHNYHHPKSAIERMTIKRQYGGRGLINLQTLWKNQIDKLKHFFYHKANSSDIHKAVVQNDLNYTALNLIENTDIITDNGTEKTMIDKWKSKILHGRHPHDLDQSHIDPLASNKWLTRGDLFPETEGFIISIQDQVINTRNYRKHIIKDPKVTDDRCRKCHSHPENIQHITGACPNLTQTDYTHRHNQIANIIHQQLALKHHLIQKYTPYYKYTPSPILENKNYKMYYDRTILTDKTIHFNRPDITLQDKKNKTTYLIDIAVPNTHNLQKTITEKIHKYTDLKDEITRLWRQDKVYIVPIVISTTGVIPKYLHNSLKLIDLPYSYIPAQKAAILNTCRIVRKFLQIDEETD

SEQ ID NO: 21843 - protein, 1266 aa, Helias cama
MRLRNRVIPQAGTSRTREEESGPEPSSSGCPTYSGGGNVSHMTAQTSSVAVDTSPLSHITSDPSSPTSSTLSLFETPHSSPNSFQFHQSPSRSSTTTLLSLDVAQEALALTSGPTNDNTTSTRLNTNINVNESRVDHTHVTHITSHLSNTPKQGVLRDMLPATTQAGKSRKRMKWTDDINRELLRCYYTVTHNETNLTAWRTLLHRKFIESIPELSHLSEQRLADQIRVIHRNNRIPLEEREHMKLSLIPSISSSDRIDEYTTPLTPDCINADVQTNTTIHTPLAVTSHASTQTENTTILMANDIEILQPTALLQDNSLYIIEELHIALTEYAGTDPTLRPKLPKLKYSNKLNQMISLFNNSILSKFYSNDSQLTDIHTLIYCSALVISRELGYKIGDNTIPLRNNQLKKPVWQIRIEKDITQLRSDIGRLTQYINNNRSRKVVNRVNIIFLNTQFHSTHETNNKKPEEYLDTLKQKLALKSKRLARYKKALQRKTDNALFNKNEKLFYRKLLSGQDTNVPNLKDLPNVKDLEQFWAGIWETEEKHNDEALWIKEEEQRWEKLEEMEYQDVTEAEIKMITTRLSNWKSPGIDKIHNFWYKKFHSLHKVMAKNFTQIINGQQNTPHFIAQGISYMIPKAGYTTQPSQYRPITCLTTIYKILTSVLTYKITAHVESNKILAEEQKGCRRGHMGCKEQLIIDSLVHRHATTHKRNLHCTYIDYKKAFDSIPHSWLLRILQIYKISPVIIEFLKQTMNLWKTKLQLHNTTTREIAIKTGIYQGDSLSPLWFCLALNPISQMLNKCEVGYNLDHRSSTLISHLIYMDDIKLYTRKEKDMQILINTTVVFSKDINMSFGLDKCKTIHINKGKIQPGDYTVDEGKKITAMESGELYKYLGYYQSKGLDHIKLKKSLTQAYKNRVSIICRSLLTGKNLIKAINTYAIPILTYSFGIVKWTKTDINNIEISTRTTLTKYNYLHPKSAIERMMIKRQCGGRGLINICNLWKNQIVNLRSFFYKKANDSSIHKAVVKNDINYTPLNLFEENQVHNKSDPEQKKIQQWKSKVLHGRHPFDLEQPHIDTAASNKWLTKGSLFPETEGFMLAIQDQVINTRNYRKHIIKDPTITDDRCRKCHSQSENIQHITGACSYLAQTDYTHRHNQIANIIHQNLAIKHHLIQNTYTPYYNYHPSPVLENNTHKMYFDRAILTDKTIHYNRPDITLLDKKNKTTYLIDIAVPNTHNLQVTIANKIHKYTDLKDEITRMWKQEKVYIV

SEQ ID NO: 21844 - protein, 1329 aa, Polygonus leo
MRLRNRQVPQAGTREGESRPGPSGSGCPAYSGGGNVSHMTTQSRAVVADKSTSSHITSDPSSPISSTQSLFQSPSSSPHSYQYSHSSRSTTVTPLSCDVAQEANAICPPVPTTDTTHSTRQIQKNLNNRVDQNTHSHSPITQTTNVLKNMLPATTLAGKTRQRMKWTSDINKELLRCYYTVTLNETNLTGWRPQLHKKFTESIPELHHLSEQRLADQIRVIHRNNRISELDRELLKHSVASSLISTSNIPNEHMTTGSTELAYLLEKSRSIPTSTTNYHQVNTAPPTQITQNTQLNSNTHTSTLTEITNPLITNDIETIPSAHTTDAVLEKLKQELHTALIEYTGTDPTLRPRLPKLTQNHELNQLTDLFNNKILCHFFTNDSKLNDIHTLIYCSALVISRQFGYTIGEKSRGQSKSVIKKPEWQKRIEKDIALLRSDIGRLTQYINNNRSRKVLDRVEVIFRNVKVHSVHENNNKKPEEFLDTLKQKLALKANRLARYKKALKRKNDNKLFYTNQKLFYRKLVPETNDSVGKHDENSDVKNLEQFWAEIWEVDEKHNAEATWIEEEESRWRLLEEMKFEEVTEIDIKNVTGRLNNWKSPGIDKLHNFWYKKFYTLHKITAKNLTEIILGQQNTPQFITQGITYMIPKVKHTTHPSEYRPITCLPTIYKILTSVITNKILSHIEKNVSEEQKGCRRGHMGCKEQLIIDSLIHRHATVNKRNLHCTYIDYKKAFDSIPHSWLLHILHIYKIHPTIIEFLKSTMNLWKTKLQLNNSTSREIAIRKGIYQGDSLSPLWFCLALNPVSHMFHSRKIGYRIEHQNSSTHISHLIYMDDIKLYTETEKEMQCLIDVTAEFSRDINMKFGLDKCRTIHIIKGKIKPGDYTINENEKITAMEPNEFYKYLGYHQSKGLDHINLKKSLMQEYKHRVNKICKSLLTSKSLIRAINTYAIPILTYSFGIVKWTQTDIKNIEISTRTSLTKHNYWHPKSAIERMTLKRQNGGRGFININNLWKNQIVSLRNFFYDKANTSSIHKAVVHNDLNYTPLNLIDKTELNRELNLEQTKTQQWKAKVLHGRHPFDLEQPHIDATASNTWLTKGSLFPETEGFMIAIQDQVINTRNYRKHIIKDSAMLDDRCRKCHSHPENIQHITGACPNLAQTDYTHRHNQIANIIHQNLAHKHHFIPNTYTPYYKYRPSPVLENNTHKMYFDRAVLTDKTIHFNRPDIILQDKTKKTTYLIDIAVPNTHNLQKTIAEKIHKYTDLKDEILRIWKQEKVYIVPIVLSTTGVIPVYLHHSLKLIGLPNSYILAQKAAILNTCRLVRKFLQIDDQLI

SEQ ID NO: 21845 - protein, 759 aa, Cydia splendana
MKFEAISESDIKTITSRLHNWKSPGIDRIHNFWYKKLHVLHKAIAKNITEIIQGQQIIPEFIAKGTTYMLPKGKYTAQPSQYRPITCLPTIYKILTSAITRKITKHIEQNDIIAEEQKGCRRNHMGCKEQLIIDSLIHKHASSNKRNLHCTYIDYQKAFDSIPHSWLIRILHIYKIDPVLIHFLKNIMQLWKTTLHLDGIKTREININKGIYQGDSLSPLWFCLALNPISHLLRNQRAGYILKHNNNETNISHLIYMDDIKLYSETDKEMKLLIDTTAQFSKDIRMQFGLDKCKTIHIIKGKIRPGDYAIDNTDTITAMEPADLYKYLGYQQSKGIDHFKIKKTLTEEYKKRVNTICRSQLTAKHLIKAINSYAVPILVFSFGIIKWTKTNIRQIEITTRRIFTKHNNHHPKSAIERMCLKRESGGRGLIDINALWAKQVSNLKTFFFHKANSSDMHKAVVCSDANYTPLNLMERETPTTGINYEALRLEQWKKKVLHGRHPQDLAQSHVDSVASNKFLKLGYLFPETEGFIIAIQDQIINTRNYRKFIIKDPQLSDDRCRKCHRHPETIQHITGACPNLTQTDYTHRHNQVANIVHQKLALKHNLIPHSNTPYYKYSPSSILENETHKMYFDRAILTDRTTHYNRPDITLTDKIHKITYLIDIAVPNTHNLHKTITEKVQKYTDLKDEVTRIWNQEKVYIVPVVLSTTGVIPKYLHHSLKLIDLKPNTYIQLQKAAILNTCRIVRKFLQEDEKNNNLT

SEQ ID NO: 21846 - protein, 1318 aa, Ectomis asine
MRLRSRQIPQAGTCEGESRPGPSGSGCPTYSGGGNVSHMATQSSTVVVDKSSPSYIASVPTSPISSTYSLFHSPNSSPTSYQSQHPSPSHSNTVTPLSCDVAQEAHATSPVPTTGFTNPTRITQNDLNYRAGINSTSNSSNTRAGNVLKDMLPATTLAGKTRQRMKWTFDINKELLRCYYIVTHNETNLTAWRTLLHKKFTDNMPELRHLSEQRLADQIRVIHRNNRISALDREHIKQSVTSNDDIITINTEQMYMINSTPETNKGHHNTNLQIQTTNTTPETEITNILTTDDSDVGDCNSTPLSNVTVNKIKKQLQTTIIEYAGTDPTLRPRLPKLIHNAKLNQLTNLFNSKILCHFFSDESQLNDIHTLIYCSALVISRELGYKIGDISTIHGRTEMRKPKWQIRIEKDIAQLRSDIGRLTQYINNNRSRKVVNRVHVIFKNTKTHSVHENCNKKPEEYLDTLKQKLALKANRLARYKKALKRKTDNKLFYTNEKLFYRKLISMPNTSSQNHNDTPDVKDLEQFWAGIWERNEKHNEEAAWIAEEENRWSLLEEMAFDTITEIDIKNITSRLNNWKSPGIDKIHNFWYKKFYILHQIIAKNFTDIIFRRQNTPQFFGQGITYMLPKAKYTTKPSEYRPITCLPTIYKILTSVITHKINAHIEKNNILSEEQKGCRRGHMGCKEQLIIDSLIHRHATSNKRNLHCTYIDYKKAFDSIPHSWLLHILKIYKINPAIIEFLKSTMNLWKTRLHLNNIITREITIKKGIYQGDSLSPLWFCLALNPISHMYHKHAAGYRLEHHSNITYISHLIYMDDIKLYSRTEKEMQVLINTTVEFSKDINMDFGLDKCKTIHIIKGKIGPGDYTVNDNEKIKAMEPNELYKYLGYYQSKGLAHTKLKKSLMEEYKHRVNIICKSLLVGKSLIKAINTYAIPVLTYSFGILKWTKTDINNIDINTRTTLTKHNYLHPKSAIERMTLKRQNGGRGLINITNLWKNQIVSLRKFFYQKSNSSNIHKAIVQNDLNYTPLNLRDETVLNREEDSEQLKVEQWKSKVLHGRHPYDLEQSHIDSAASNKWLTRGSLFPETEGFMVAIQDQVINTRNYRKHIIRDPAVTNDKCRKCHSNPENIQHITGACPYLAQTDYTHRHNQIANIIHQNLAQKHHLIPADTYTPYYKYCPNPVLENSTHKMYFDRAILTDKTIHYNRPDITLQDKISKTTYLIDIAVPNTHNLQKTIAEKIHKYTDLKDEITRIWKQQKVYIVPIVLSSTGVIPRYLHHSLKLIGLPNSYVLAQKAAILNTCRIVRKFLQIDEESPLTDRLT

SEQ ID NO: 21847 - protein, 1249 aa, Ernsta delagoae
MRLRNRKIPQAGTREGESCPGPSGSGRPTYSGGGNVSHKTAQSHTVAADKTPSQISPTTSHQSSPISSTHTLFHSPSSSPHSYSHSNLTLSSRSTTVSPMSCDVAQEAYANIPGPIPDTINGTHTPQRSLSNCVQHHTHNNIMQNMLPPTTLAGKSRQRMRWSDHINKELLRCYYLVTNNETQLTAWRTLLHKKFSEHIPELSHLSEQRLADQIRVIHRNNRIKLTDRDSIKNEVALIISASNNSNEHTSTGTTPTPSATSIHHSIPYSTPHTTLTHTHNTCNTQLSLKSHATTQTDTINKLITNDIEILQPTPLTDTDSLEKRLTEDLQSVLIEYAGTDPTLRPKLPKLHQSRKLTQLTELFNSIILGHFFSTTTELIDIHTLIYCSALVISKELGYKIGETSRIQASTTRKPDWQVRIERDILQLRSDIGKLTQYINNNTKARKVIKRIEEIFQNTKVHSIHESNNIKPEEYLDTLKQKLKLKANRLARYKKALKRKNDNKLFNVNEKLFYRKLTTDKNSTLPQQNAIPNTKELEEFWSRIWEVNETHHEDAPWIAEEEKRWTELEEMKFDEITEQDIKQVATRLNNWKSPGVDKIHNYWYKKFSSLHNVIAKNLTEIILGKQNTPHFIAQGITFMIPKGKYTTEPSQYRPITCLPTIYKILTSVITHKITSHIEKNNIIAEEQKGCRRGHMGCKEQLIIDSLIHRHAITNKRNLHCTFIDYTKAFDSIPHSWLLRILQIYKINKHLVDFLKNIMNIWKTQLHLDHITTRFIAIKKGIYQGDSLSPLWFCLALNPISQMLQECGAGYNLKIQNDSTRISHLIYMDDIKIYSKTEKEMETLIDTTLKFSKDINMKFGLDKCKTIHIIKGKIRPGDYVIEEEGKITAMEPNEMYKYLGYYQSKSLDHTKLKSSLVQEYKSRINNICQSLLKGKSLIKAINSYAIPILTYSFGIIKWTKTDIKSIEISTRTCLTKYNNLHPKSAIERMTIKRCNGGRGLINISNLWKKQILNLKIFFHQKAHNSVIHKAVVYNDSNFTPLNLAEETEPRKEEEEEESEQAQIVQWKKKVLHGRHPHDLEQSHIDSIASNKWLINGSLFPETEAFMIAIQDQVVNTRNYRKHIIKDPTVIDDKCRKCHSQPENIQHIIGACPNLTQTDYTHRHNQVANIIHQNLALKYNLIPNTHTPYYKYTPSPVLENNTHKMYFDRAILTDKTIHYNRPDITLQDKKNKTTYLIDIAVPNTHNLQKTIA

SEQ ID NO: 21848 - protein, 1319 aa, Pammene fasciana
MRTSGDVKLNRRASITQSTTAENLASRESSPTSFLSSIPSSPASLFSSIPSSPASYLNHSDSDSSLNSLQHERKQARKKAPRAKTSRLMFNPENPSHSEASIASQLLTQSQTIVGTSQNCRELRSRTVTPLSTEPIGASRPSSNTPTLSVAQEANAFQPASTKAGKPRVRMRWSNDVNLFIMRTYYQVTKLETDFTVYRKLMHEHFTKQYPGVKVSEQRVSDQRRTIIRNKMISDEELAQMREEIRLELEHAGISPSPQTTQNNNVPSLELISTLETSTPHLAEIEQSRQGEPVNNQTESDYLPPLNDTTELKLYENLQTALTLYRGSDPTLRPKLPKLKYSAHLTQLIQLFNQKILNQFISDDSDLTDIHTVIFCSALVISQELGYQIGNNNDQQPRKNVRKPAWCIRLEKDIAQLRSDIGKLTQYINNNRSSRVVNRVKEIFTNFKVHSRHENDNKTPEEYLDTLKQKLTLKAHRLKRYNKALKRKKDNKLFKTNEKIFYRQLGNSERNTPSPTEHELPEVSALEQFWAGIWETELHHNEKAGWIAEEERRWANMEEMKFEEITDIDIQAVTSKLHNWKSPGIDRIHNFWYKKFHFLHKSLGKNITEIIQGHQSTPPFIAKGVTYMLPKGKFTTQPSQYRPITCLPTIYKILTSVITKKMYTHIERNNIIAEEQKGCRRNHMGCKEQLIIDSVIHKHAKDNKSDLHCTYIDYKKAFDSIPHSWLIHVLQIYKIDPVLISFLKNTMRLWKTTLHLNQIQTREIDIKKGIYQGDSLSPLWFCLALNPISHMLRRHELGYHLKHNNEVTSITHLIYMDDIKLYSKNKTEMKILIDITTDFSKDINMQFGFDKCKTIHIVKGKIQPGDYTLDNEDTITAMEPDELYKYLGYQRSKGIDHIKVKKTLIAEYKKRTQTICKSQLTAKSLIKAINSYAIPILTYSFGVIRWTKTDIRRIEITTRTILTKHNKHHPKSAIERMTLKRENGGRGLIAIRALWLKQINSLKTFFFHKTDTSDIHRAIAFNDTNYTPLNLTEQALFPIENESETVRLEQWKKKVLHGRHPQDLLQAHVDSIASNKWLNLGTLFPETEGFIIAIQDQVINTKNYRKHIIKDPRATDDRCRKCHSHPETIQHITGACPTLTQTDYTHRHNQVANIIHQKLAVKYSLVTNSTDTPYYKYTPSPILENNTHKMYFDRAILTDRTTHFNRPDITLTDKINKTTYLIDIAVPNTHNLQKTITEKIHKYTDLKDEVTRIWNQEKVYIVPIVLSTTGVIPKYLHHSLKLLDLQRNTYMQLQKAAILNTCRIVRKFLQIDDERIDVG

SEQ ID NO: 21849 - protein, 775 aa, Pammene fasciana
MEEMKFEEITDIDIQAVTSKLHNWKSPGIDRIHNFWYKKFHFLHKSLGKNITEIIQGHQSTPPFIAKGVTYMLPKGKFTTQPSQYRPITCLPTIYKILTSVITKKMYTHIERNNIIAEEQKGCRRNHMGCKEQLIIDSVIHKHAKDNKSDLHCTYIDYKKAFDSIPHSWLIHVLQIYKIDPVLISFIKNTMRLWKTTLHLNQIQTREIDIKKGIYQGDSLSPLWFCLALNPISHMLRRHELGYHLKHNNEVTSITHLIYVDDIKLYSKNKTEMKILIDITTDFSKDINMQFGFDKCKTIHIVKGKIQPGDYTLDNEDTITAMEPDELYKYLGYQQSKGIDHIKVKKTLIAEYKKRTQTICKSQLTAKSLIKAINSYAIPILTYSFGVIRWTKTDIRRIEITTRTILTKHNKHHPKSAIERMTLKRENGGRGLIAIRALWLKQINSLKTFFFHKTDTSDIHRAIAFNDTNYTPLNLTEQALFPIENESETVRLEQWKKKVLHGRHPQDLLQAYVDSIASNKWLNLGTLFPETEGFIIAIQDQVINTKNYRKHIIKDPRATDDRCRKCHSHPETIQHITGACPTLTQTDYTHRHNQVANIIHQKLAVKYSLATNSTDTPYYKYTPSPILENNTHKMYFDRAILTDRTTHFNRPDITLTDKINKTTYLIDIAVPNTHNLQKTITEKIHKYTDLKDEVTRIWNQEKVYIVPIVLSTTGVIPKYLHHSLKLLDLQRNTYMQLQKAAILNTCRIVRKFLQIDDERIDVGSLREKKLFELIT

SEQ ID NO: 21850 - protein, 974 aa, Viola violella
MQLNQLIELFNTKLLNQFISHDSQLIDIHTLIYCSALVITRELGYKVGEAYQPARNNEKRKPSWQYRIEKDIAQLRSDIGRLTQYINNNRSKKIVKTVEIIFRNTKIHSVHEKNNRKPEEYLDTLKQKLALKANRLARYKKSLKRKEDNNLFNNNEKIFYRKLTNNIDNSIPTHTDLPDKKDLEEFWAGIWEQDEQHNEKATWIEQEENRWLAIEEMKFDQITETDIRNTTTRISNWKSPGVDKIHNFWYKKFYSLHAIIAKNFTQLITGQQNTPKFIAQGITYMLPKGKYSPQPSKYRPITCLPTIYKILTSVITQKITTHIETNNILSEAQKGCKRGHRGCKEQLIIDSLIHRHANTNKRNLHCTYVDYKKAFDSIPHSWLLRILKIYKINPVIIKFLKNTMTLWKTKLHINNILTREIYIKKGIYQGDSLSPLWFCLALNPISHLLNQHKAGYLLKHNNTNTFISHLIYMDDIKIYAKSDKEMKSLVEITIKFSNDINMHFGLDKCKTIHIVKGKIQPGDYAVSENDKIIAMEPSELYKYLGYNQSKGIDHTRIKNTLKTEYVLRVKSICRSYLSGKSLIKAINTYAVPILTYSFGIIKWTKTDINNIEINTRTILTKYKYLHPKSAIERMTLKRQCGGRGLINLNKLWQNQIINLRRFFHQKVTTSNIHKAIVSNDLNYTPLNLAENSDISWDDNSEQVRIESWKKKVLHGRHPHDLEQSHIDAVASNKWLLSGTLFPETEGFIIAIQDQVINTRNYRKHIIKDTTVKDDKCRKCQNQPETIQHITGACPNLTQTDYTHRHNQIANIIHQNLALKHHLIQRNSYTPYYNYKPNPVLENSTHKIYFDRAILTDKTIHFNRPDITLQDKINNTTYLIDIAVPNTHNLHKTISEKIYKYTDLKDEVTRIWKQDNVYIVPIVLSTTGVIPKYLHHSLKLLDLPRNTYTQLQKAAILNTCRIVRKFLQLDDLQLG

SEQ ID NO: 21851 - protein, 1338 aa, Cycloglypha thrasibulus
MRLRNRVIPQAGTSPTSEEESGPGPSSPGCPTYSGGGNVSRMTTQLSAVVVNKPSSSSSSPLQNTSGSSSPTSSIHSIFQSPSSSPHSLQSSTSTTITTESCDVAQEACAIFPAPTAGDITDLTQDTQNSQYSCVDQNSLSCSSTIPARNIFKNMLPATTLAGKTRQRMKWSDEINRELLRTYYIVTNNETDLTAWRSQLHRKFSENVPELCHLSEQRLADQIRVIHRNNRIPATEREQIKQSLTLLSSHSTYKSSVTNNEPDGNSSNIITIHQNDVNDDTQVEVTDKTQFTLISHASTQTENLNILMNNDIEILESTMTTEPLELRLKENLQTTLIEYAGTDPTLRPKLPKLKHDYKLNQLTDLFNRKVLSYFFSDDSQLTDIHTLIYCSAAVISRELGYKIEDASVPKPRSEAQKPNWQIRIENDIAQLRSDIGRLTQYIKNNNRSVKVVRRVETIFQNIKIHSVHEKNNKKPEEFLDTLKQKLSLKANRLARYKRALKRKNDNKLFNTNEKLFYRHLTSETESPVKNNSNLDVNQIEQYWTGMWEIGEKHNEEADWITEEEKRWRALKEMEFEQITEIDVKYVTARLNNWKSPGIDKVHNFWYKKFHSLHKIIAKNLTQVVTGKQTIPKFIAQGITYMLPKEKCVTQPSQYRPITCLPTIYKILTSVLTHKITVHIENNNILSEEQKGCRRGHMGCKEQLIIDSVVHRHAMLNNRNLHCTYIDYKKAFDSVPHSWLLKILQIYKINPILINFLGNIMNLWETKLYLGKVMTRAIPIKKGIYQGDSLSPLWFCLALNPISFILNRNEAGYRLKNHNDNTFISHLIYMDDIKLYSKNEKEMQTLINSTAQFSKDINMTFGLDKCRTIHIKKGKIQPGDYVVDNEQRISAMDSNELYKYLGYHQSKGLDHSKLKVSLTQQYKNRINRICKSLLSGKSFIKALNTYAIPVLTYSFGILKWTKTDINNIEILTRTSLTKHNYLHPKSAIERMTVKRQNGGRGLICLTDLWKNQINNLRSFFHRKSKNSHIHRAIVENDSNYTPLNLKDNIELNRDESSEPSRIEQWKKKVLHGRHPHDLEQPHIDKVASNKWLTTGSLFPETEGFIVAIQDQVINTRNYRKHIIKDPTLTNDRCRKCHSKPENIQHITGACPNLTQTDYTHRHNQIAFIIHQNLAHKHELIPNSTYVPYYNYNPSPVLENKTHKLYFDRAILTDKTIHYNRPDITLLDKINKTTYLIDIAVPNTHNIQKTIAEKIHKYTDLKDEISRLWKQEKVYIVPIVLSTTGVIPRYLHHSLNLIGLPNSYIPAQKAAILNTCRIVRKFMQVEDETTETDLQTDKHI

SEQ ID NO: 21852 - protein, 1271 aa, Piruna aea
MVLTRSRFPQAGTSNGESRPEPSSGSPSYSGVGNMSQLRTQSQTVVGRTQNHQGTPSPSLTDSTDIAQANSENPTIRVTQEANAFQPASTKAGKARVRMKWSYDVNIFIMRTYYRVTKLETDFTIYRKLLHEHFIRQYPEANVTEQRVSDQMRVIVRNKMISDKVLAEIKHEIKLELDQIANISSTSSINEPLSLSPTPVSIDTNLLRQRNLHSHIRSNSQSQISHNTQQTSLHAYTQTETTTILIANDTETLQPVPLSDAAEIRIQENLQSALIEYAGSDPTLRPKLPRLKYSTQLNQLIELFNTKILNQFISNDSQLSDVHTLIYCSALVITQELGYKIGDTYRPPRNNEERKPAWQKRLEKDIAQLRSDIGRLTQYINNNRSKKILNRIEIILQNTKIHSVHESNNRKPEEYLDTLKQKLALKANRLARYKKALKRKHDNKLFINNEKIFYRKLMTDTDNSTPKHTEIPDKNDLEEFWAGIWEQDEQHNENASWIEKEENRWSAVEEMKLDQITETDIKNATSRASNWKSPGIDKIHNFWYKKFHSLHKIIAINFTQIISGQQNTPHFITQGITYMLPKGKYSSQPSQYRPITCLPTIYKILTSVITHKITAHIEENNILAEEQKGCKRGHMGCKEQLIIDSLIHRHATTNKRNLHCTYIDYKKAFDSIPHSWLLRILQIYKINPVLIEFLKNTMKLWKTKLHLNNITTREVTIKKGIYQSDSLSPLWFCLALNPISHLLRQPKAGYHLKHNNTNTYISHLIYMDDIKIYAKSEKEMKSLIDATVGFSKDINMQFGLDKCKTIHIVKGKIRPGDYTVNEEDKITAMEPNELYKYLGYHQSKGLDHTKIKTTLKIEYLNRVKAICRSNLSGKSLIKAINTYAIPILTYSFGIIKWTKTDISNIEINTRTLLTKHNYLHPKSAIERMTLKRQGGGRGLINIHQLWQNQIVNLRLFFHQKAAMSDIHKAIVSNDSNYTPLNLVEDSNPSREDNSEHDRIENWKKKVLHGRHPHDLEQSHIDAIASNKWLTTGTLFPETEGFMIAIQDQVINTKNYRKYIIKDPKIKDDKCRKCHSHPENIQHITGACPNLTQTDYTHRHNQIANIIHQNLSLKHHLIPNNTYIPYYKYKPSPVLENNTHKIYFDRAILTDKTIHFNRPDITLQDKINKTTYLIDIAVPNTHNLQKTIAEKIHKYTDLKDEVTRIWKQDKVYIVPIVLSTTGVIPKHLHHSLRLIDLPSTTYTHLQKAAILNTCRIVRKFLQIDDETNLALV

SEQ ID NO: 21853 - protein, 1187 aa, Atrytonopsis hianna
MVLTRSRVPQAGTSNGESRPEPSSGSPSYSGVGNMSQLHTQSQTVVGRTSPYQGTPSPTFTDSTDIAQANSVNPTLSATQGANAFQPASTKAGKPRVRMKWSYDVNIFIMRTYYRVTKLETDFTTYRKLLHEHFTRQYPETNATEQRVSDQMRVIVRNKMIPDKVLAEIKQEVKLELDHITYDPNTNSFHPTTHSHSLTPDTTDTNMLWPPNSHYTSGDNSHAYTQTETTTILIANDIETLQPSPLSDSTEIKILENLQSALIEYAGSDPTFRPKLPRLKYSMQLNQLLELFNTKILNQFISQDSQLIDVHTLVYCSALVIARELGYKIGETYRSPRNNKERKPSWQYRLEKDIAELRSDIGRLTQYINNNRSKKIVNRVEIIFRNTKIHSVHESSNKKPEEYLDTLKQKLALKANRLARYKKALKRKHDNKLFNNNEKIFYRQLTNGTENSTPKHNEIPDKKELEQFWAGIWEQDEQHNEKATWIETEESRWEAVEEMKFDQITETDIKHATTRVSNWKSPGIDKIHNFWYKKLYILHSIIAKNFTQIISGQQNTPHFIAQGITYMLPKGKYSPQPSQYRPITCLPTIYKILTSVITQKITTHIEENNILSEEQKGCKRGHMGCKEQLVIDSLIHRHATTNKRNLHCTYIDYKKAFDSIPHSWLLRILQIYKINPVLIEFLKNTMKLWNTKLHLNNITTREIKVKKGIYQGDSLSPLWFCLALNPISHLLRQPKAGYHLKHNNTNTYISHLIYMDDIKLYAKSEKEMKSLIDVTVNFSKDINMHFGLDKCKTIHIVKGKIRPGDYAVSDVDKITAMEPNELYKYLGYHQSKGLDHTTLKTTLKIEYVNRVKSICRSNLSGKSLIKAINTYATPILIYSFGIIKWTKTDINNIEINTRTLLTKHKYLHPKSAIERMTLKRQIGGRGLINIHELWQNQIINLRLFFHQKATTTNIHKAIVSNDLNYTPLNLAEESHPPRDDNSEQARIENWKKKVLHGRHPHDLEQSHIDTVASNKWLSSGTLFPETEGFIIAIQDQVINTKNYRKHIIKDPTVKDDKCRKCHSHPENIQHITGACPNLTQTDYTHRHNQIANIIHQHLALKHHLIQKNTYTPYYKYKPSPVLENHTHKIYFDRAILTDKTIHFNRPDITFQDKINRTTYLIDIAVPNTHNLQKFNGRDIFTFFSRIK

SEQ ID NO: 21854 - protein, 776 aa, Euphyes dion
MWIEKEERRWWTVEEMKYDQITETDIKNATTRISNWKSPGVDKIHNFWYKTFHSLHKIIAKNFTQIISGHQHTPHFIAQGITYMLPKGKHSPQPSQYRPITCLPTIYKILTSVITQKITLHVEKNNIISEEQKGCRRGHMGCKEQLVIDSLIHRHATTNKRNLHCTYIDYKKAFDSIPHSWLLRILQIYKINPVLIEFLKNTMKLWKTKLHLNNITTREISIKKGIYQGDSLSPMWFCLALNPISNLLLEENAGYHLKHNNTTTYISHLIYMDDIKIYAKTETEMKHLIEVTVNFSKDINMHFGLDKCKTIHIVKGKIRPGDYAVSDEDKITAMEPNELYKYLGYHQSKGLDHTNIKATLKNEYKNRVKSICRSHLSGKSLIKAINTYAIPILTYSFGIIKWTRTDINNIEIITRTLLTKYNYLHPKSAIERMTIKRINGGRGLINIYQLWQNQILKLRLFFHQKSNTSNIHKAIVYNDFNYTPLNLAEECDTSKEDNSEQARTEKWKKKVLHGRHPHDLEQSHIDSVASNKWLTSGTLFPETEGFMIAIQDQVINTKNYRKHIIKDPTAKDDKCRKCHIHPENIQHITGACPNLTQTDYTHRHNQIANIIHQNLALKHHLIQESKYTPYYKYKPSPVLENNTHKLYYDRAILTDKTIHFNRPDITLQDKINKTTYLIDIAVPNTHNLQKTIAEKIHKYTDLKDEITKIWKQDKVYIVPIVLSTTGVIPKHLHCSFKLINLPSNTYTYLQKAVILNTCRIVRKFLQIDDETNLALI

SEQ ID NO: 21855 - protein, 1024 aa, Piruna pirus
MTSKLFNLYHYQYAAEIRIQENLQSALIEYAGSDPTLRPKLPRLKYSTQLNQLVELFNTKLLNQFISHDSQLFDVHTLIYCSALVITREMGYKIGETYRSPRNNEKRKPAWQKRLEKDIAKLRSDIGRLTQYINNNRSKRILNRIEIILRNTRIHSVHESNNRKPEEYLDTLKQKLALKANRLARYKKAFKRKHDNKLFNNNEKIFYRKLMTDADSSTPKHTQIPDRKDLEHFWAGIWEQDEQHNEKASWIEEEENRWLAVEEMKLDQITETDIKNATSRASNWKSPGIDKIHNFWYKKFHSLHKIIAINFTQIISGQQKTPNFIAQGITYMLPKGKYSPQPSQYRPITCLPTIYKILTSVITHKITAHIEENNILSEEQKGCKRGHMGCKEQLIIDSLIHRHATTNKRNLHCTYIDYKKAFDSIPHSWLLRILQIYKINPVLIEFLKNTMKLWKTKLHLNNITTREITIKKGIYQGDSLSPLWFCLALNPISYLLRQPKAGYHLKHNNTNTYISHLIYMDDIKIYAKSEKEMKSLIEATVDFSKDINMQFGLDKCKTIHIVKGKIRPGDYPVNDEDKIIAMEPNELYKYLGYHQSKGLDHTKIKTTLKLEYVKRVKAICRSNLSGKSLIKAINTYAIPILTYSFGVIKWTKTDISNIEINTRTLLTKHNYLHPKSAIERMTLKRQGGGRGLINIHQLWQNQVANLRLFFHQKAAMSNIHKAVVSNDSNYTPLNLVEESNPSRDDNSEHATLENWKKKVLHGRHPHDLEQSHIDAAASNKWLTSGTLFPETEGFMIAIQDQVINTKNYRKHIIKDPKIKDDKCRKCHSHPENIQHITGACPNLTQTDYTHRHNQIANIIHQNLALKHHLIQENTYIPYYKYKPSPVLENNTHKIYFDRAILTDKTIHFNRPDITLQDKINKTTYLIDIAVPNTHNLQKTIAEKIHKYTDLKDEVIRIWKQSKVYIVPIVLSTTGVIPKHLHHSLKLIDLPSTTYTHLQKAAILNTCRIVRKFLQIDDETNLALV

SEQ ID NO: 21856 - protein, 1272 aa, Hesperia comma
MVRTRSRLPQAGTSNGESRPEPSSGSPSYSGVGNMSQLRTQSPTVVSRTQRHQGTPSPIPTDSTDTAQANSVNPTLCATQGANAFQPASTKAGKARVRMKWSNDVNIFIMRTYYRITKLETDLTMYRKLLHEHFTRQYPEANVTEQRISDQMRAIVRNKMIPDEALEKIRQEIKLELHQSTNASNINSVSPTPHSQSPTPVLINTNLPCTFQSNVHSNTRNNPHSLTIHSTQASSNSHAYTQTETTTVLIVNDVETFQPLPLSDSTEVRIQENLQSALLEYAGSDPSLRPKLPRLKYCTQLNQLIELFNTKILNRFVSNDSQLIDVHTLIYCSALVITQELGYKIGETYRPPHNNKERKPSWQYRIEKDIAQLRSDIGRLTQYINNNRSKKIVNRIEIIFRNTKIHSVHESSNRKPEEYLDTLKQKLALKANRLARYKKALKRKHDNNLFKNNEKIFYRNLINNTHTSTPKHTDIPDKKDLEQYWAGIWEQGELHNESANWIEKEENRWLAVEEMKFDQITETDVKNTTTQISNWKSPGIDKIHNFWYKKFHILHAIIAKNFTQIISGQQSTPNFMTQGITYMLPKGKYSPQPSQYRPITCLPTLYKILTSVITQKITSHIEENNILSEEQKGCKRGHRGCKEQLIIDSLIHRHATINKRNLHCTYIDYKKAFDSIPHSWLLRILQIYKINPVLIEFLKNTMKLWKTKLQLNNITTREINIKKGIYQGDSLSPLWFCLALNPISYLLHQQKAGYHLKHSNTNTNISHLIYMDDIKLYAKSEKEMKHLIDITVNFSKDINMQFGLEKCKTIHIIKGKIRPGDYAVSDDDKILAMEPNELYKYLGYHQSKGLDHTSIKATLKIEYMHRIKSICRSNLSGKSLIKAINTYAVPILTYSFGIIKWTKTDINNIEIKTRTLLTKHNYLHPKSAVERITLKRQSGGRGLINIHQLWQNQIVNLRLFFHQKATTSNIHKAIVFNDTNYTPLNLAEETEPSRDDNSEQARIENWKKKVLHGRHPNDLQQSHIDAIASNKWLTLGTLFPETEGFIIAIQDQVINTKNYRKHIIKDPTVKDDKCRKCHSHPENIQHITGACPNLTQTDYTHRHNQLANIMHQNLAFKHNLIQKNPYTPYYNYKPSPVLENNTHKIYFDRAILTDKTIHFNRPDITLQDKINKTTYLIDIAVPNTHNLQKTIAEKIHKYTDLKDEVTRIWKQNKVYIVPIVLSTTGVIPKYLHHSLKLLDLPRNTYTQLQKAAILNTCRIVRKFLQIDDETIL

SEQ ID NO: 21857 - protein, 1271 aa, Hesperia comma
MVRTRSRLPQAGTSNGESRPEPSSGSPSYSGVGNMSHLRTQSPTVVSRTQPHQGTPSPISTDLTDIAQANSVNPALCATQGANAFQPASTKAGKARVRMKWSYDANIFIMRTYYRVTKLETDLTMYRKLLHEHFTRQYPEANVTEQRVSDQMRVIVRNKMIPDKVLAQIKEEIKLELDHITNAPKINPPHPTLISHSPTPLTINTNLPCTFQTDAHSNTTVNPQSQTIHSTQPSSNSHAYTQTESTTVLIVNDIQTFQPLPLSDSTEVRIQENLKSALLEYAGSDPSLRPKLPRLKYCTQLNQLIELFNTKILNQFVSHDSQLIDIHTLIYCSALVITQELGYKIGEYYPTPHNNKERKPSWQYRLEKEIAQLRSDIGRLTQYINNNRSKKVVNRVEIIFRNTKIHSVHESNNRKPEEYLDTLKQKLALKANRLARYKKALKRKYDNKLFNNNEKIFYRNLTINTDDPTPKHTDLPDKKDLEQYWAGIWEQDEEHNEEATWIGKEENRWLAVDEMKFDQITETDIKNTTIRISNWKSPGIDKIHNFWYKKFHFLHAILAKNFTQIITGQQSTPKFMAQGITFMLPKGKYSPQPSQYRPITCLPTLYKILTSVITQKITSHIEENNILSEEQKGCKRGHRGCKEQLIIDSLIHRHATTNKRNLHCTYIDYKKAFDSIPHSWLLRILQIYKINPVLIDFLKNTMSLWNTKLKLKNITTREINIRKGIYQGDSLSPLWFCLALNPISHLMRQHKAGYHLKHNNTSTYISHLIYMDDIKIYAKSDKEMKKLIDITVNFSKDINMHFGLDKCKTIHIVKGKIQPGDYAVGDEDKIIAMEPNELYKYLGYHQSKGLDHTNIKNTLRIEYLRRIKSICKSNLLGKSLIKAINTYAIPILTYSFGIIKWTKTDINNIEIQTRTQLTKYNYLHPKSAIERMTLKRQSGGRGLINIHQLWQNQIVNLKLFFRQKAATSNIHKAIVSNDSNFTPLNLAEESDSSRGDNSEQGRIERWKAKVLHGRHPHDLEQSHIDAVASNKWLTVGTLFPETEGFIIAIQDQVINTKNYRKHIIKDPTVKDDKCRKCHSHPENIQHITGACPNLTQTDYTHRHNQIANIIHQNLALKHHLIPKSPYTPYYNYKPSPVLENNTHKIYFDRAILTDKTIHFNRPDITLQDKVNKTTYLIDIAVPNTHNLQKTIAEKIHKYTDLKEEVTRIWKQDKVYIVPIVLSTTGVIPKYLHQSLKLINLPSNTYTQLQKAAILNTCRIVRKFLQIDEETI

SEQ ID NO: 21858 - protein, 1113 aa, Notocelia uddmanniana
MIPDEVLTQMRNEIRLELGHTIRSPSPQATLRNNAPSMELLSDPAVSTTPLSNPIDQTPTEVAGVSSTQTLSQQVQVRFSLMQTETNNVQSDTENESLSLLPDTTRKRLYENLQTAIAQYTDSDPTLRPKLPRLRYSRQLTQLILLFNHDILNHFISDESQLIEIHTLVYCSALVISQDLGYKTEETHQPRCFKDKKPAWCIRLEKDISQLRSDIGRLTQYINNNRSRRVVDRVKEIFRNFSVHSSHENNNKTPEEYLDTLKQKLKLKAHRLKRYNKALKRKRDNKLFSFNEKIFYRQLNNPRENETPSEHEIPKVSELEEFWADIWETEKYHNEDSMWINEEVRRWDAMEQMNLEAVTESDIENITSRLHNWKSPGIDRIHNFWYKKFHTLHKALAKCITEVILGQQNTPEFIAKGITYMLPKGKYTTQPSQYRPITCLPTIYKILTSAITRKITTHVEKNDIIAEEQKGCRRNHMGCKEQLIIDSMIHKHAASNKRNLHCTYIDYKKAFDSIPHSWLIRVLQIYKINPVLVNFLKETMKLWKTTLHLNRVTTREISIKKGIYQGDSLSPLWFCLALNPISHLLHKHQSGYRLKHENQETCISHLVYMDDIKLYSKTEAEMKTLIDTTVEFSNDICMEFGFEKCKTIHIVKGKILPGDYTVNNTDSITAMEPDDLYKYLGYQQSKGINHSQIKKALTAEYKKRVHIICKSQLTAKHLIKAINSYAVPILTYSFGIIKWFKTDIHHMEMATRTILTKHNNHHPKSAIERITIKRENGGRGIIAIYSLWIKQINNLKSFFFHKSNDSDIHKAVVVNDANFTPLNLTEQALLAANGSEAVKLEQWKKKVLHGRHPQDLSQAHIDPIASNKWLKLGSLFPETEGFIIAIQDQVINTKNYRKHIIKDPKLVDDRCRKCHSHPETIQHITGACPNLTQTDYTHRHNQVANIIHQKLAVKHSLIPHNNTPYYKYNPSPVLENNTHKMYFDRAILTDRTTHFNRPDITLTDKINKITYLIDIAVPNTHNLQKTIAEKIHKYTDLRDEITRIWNQEKVYIVPIVLSTTGVIPKYLHHSLKLIDLKRNTYMEMQKAAILNTCRIVRKFLQVDDDRTDSDNDG

SEQ ID NO: 21859 - protein, 887 aa, Notocelia uddmanniana
MYCVQPTVRPYLLIIIIIISHENNNKTPEEYLDTLKQKLKLKAHRLKRYNKALKRKRDNKLFSFNEKIFYRQLNNPRENETPSEHDIPKVSDLEEFWADIWETEKHHNEDSMWINEEVRRWDAMEQMNLEAVTESDKENITSRLHNWKSPGIDRIHNFWYKKFHTLHKALAKCITEVILGQQNTPEFIAKGITYMLPKGKYTTQPSQYRPITCLPTIYKILTSAITRKITTHVEKNDIIAEEQKGCRRNHMGCKEQLIIDSMIHKHAASNKRNLHCTYIDYKKAFDSIPHSWLIRVLQIYKIDQVLVNFLKETMKLWKTTLHLNRVTTREISIKKGIYQGDSLSPLWFCLALNPISHLLHKHQSGYRLKHENQETCISHLVYMDDIKLYSKTEAEMKTLIDTTVEFSNDICMEFGFEKCKTIHIVKGKILPGDYTVNNTDSITAMEPDDLYKYLGYQQSKGINHSQIKKALTAEYKKRVHIICKSQLTAKHLIKAINSYAVPILTYSFGIIKWFKTDIHHMEMATRTILTKHNNHHPKSAIERITIKRENGGRGIIAIYSLWIKQINNLKSFFFHKSNDSDIHKAVVVNDANFTPLNLTEQALLAANGSEAVKLEQWKKKVLHGRHPQDLSQAHIDPIASNKWLKLGSLFPETEGFIIAIQDQVINTKNYRKHIIKDPKLVDDRCRKCHSHPETIQHITGACPNLTQTDYTHRHNQVANIIHQKLAVKHSLIPHNNTPYYKYNPSPVLENNTHKMYFDRAVLTDRTTHFNRPDITLTDKINKITYLIDIAVPNTHNLQKTIAEKIHKYTDLRDEITRIWNQEKVYIVPIVLSTTGVIPKYLHHSLKLIDLQRNTYMEMQKAAILNTCRIVRKFLQVDDDRTDSDNDG

SEQ ID NO: 21860 - protein, 1324 aa, Zera sp.
MRLRSRQLPQAGTREGESRPGPSSPGCPAYSGVGNVSHMAAQSRTVAASKTDSHITSNSSSPTSTTSLFRSPSSSPQSYEFSHPSSRSTSVTSRSYDVAQVASANSPVPICDPTSPTHVSENKQNNCVDHHSKSLSSYNKCVLQKMLPSTTLAGKSRQRMKWSDEINRELLRCYYIVTCNESNLTAWRPLLHQKFTELFPELRHLSEQRLADQIRVIHRNNRIKGTDRELIKQSVASVIPTPNSSNEEVGTENQFDIFSNTATITNTFQSNINTHLQPIESTYLTPNDYTLNQTNFTHILVENEIRVSQTENVLNYPEEQMKLKLQTALIEYSGSDPTLRPKLPKLKHSAKLIQLTDWFNRKILNHFVSEDSQLIDIHTLIYCSALVISRELGYKIEVDNQPVRTREKKIPAWQIRLEKDVTQLRSDIGRLTQYINNNRSQKVVDRIHIIFKNFKTHSCHENYNKTPEEYLDTLKQKLTLKSNRLTRYKKAVKRKNDNKLFKSNEKMFYRQLASNGSRPPLNPKETPDVKELEQFWAGIWEVVETHHEEAEWIAEEESRWETLQEMQFNEITESDIKNITAKLHNWKSPGIDKIHNFWYKKFYCLHRMIAVNLSQIILGQQNTPQFIAQGITYMLPKVEHSNQPSQYRPITCLPTIYKILTSVIANKITSHIEENNILSEEQKGCRRGHMGCKEQLIIDSLIHRHAATNKKNLHCTYIDYKKAFDSIPHSWLLRILQIYKINSRVIDFLTKIMNSWKTKLQLDSITTREIAIKKGIFQGDSLSPLWFCLALNPISHMLHKQKSGYLLKNQNTLISHLIYMDDIKLYTNTNEEMKTLIDTTVKFSKDINMQFGFDKCKTIHIIKGKVRPGDYVVNEADKFTAMTPNDVYKYLGCNQSKGLDHAKLKDALVQEYKHRIHNTCKSLLTGKNLIKAVNTYAIPILTYSFGIVKWTKTDIRNIEIVTRTSLTRHNYLHPKSAIERMTLRRQNGGRGLINIYNLWRNQINTLRHFFKFKAKTSDIHRATVKNDLNFTPLNLSEEIEPISDNLLELTTKEQWKKKALHGRHPHDLDQPHIDAVASNRWLTSGSLFAETEGFIIAIQDQVINTRNYRKHIIKDQSVIDDKCRKCHIHPENIQHITGACPNLAQTDYTHRHNQIANIIHQNLALKHKLILTDYIPYYNYTPKPVLENNTHKMYFDRAILTDKTIHHNRPDITLIDKENKVTYIIDIAVPNTHNLQKTIAEKIHKYIDLKDEVARLWKQEKVYIVPIVLSTTGVIPNYLHHSLKLIDLPNSYILAQKAAILNTCRIVRKFLQIDDKTFEINRNT

SEQ ID NO: 21861 - protein, 1316 aa, Cycloglypha thrasibulus
MRLRSRVIPQAGTSPTSEEESGPGPSSSGCPAYSGGGNVSHMTTQTSSVVVDKSPSLLITSNPSSPTSSTHSLFQSPSSSPHSFQIQQSSSRSSTTSPLSVDVAQKANAPTSVPTNDSTNPTRLNTVININATRVDHYNTSCSSNTPVSGVLKDMLPATTLAGKSRKRMKWSDDVNRELLHCYYIVTQNESNLSAWRTSLHQKFTEKIPELSHLSEQRLADQIRVIHKNNRIPLIERERLKHSVISLISSPEDCHEVTPIFNDHLNTETQLPHTTHASSLHIITPVETRHRNVSGTNDMVIIQPTTLSEDTTIKMIEDLHTALAEYTGTDPTLRPQLPKLKYSYKLDQLIKIFNNNILSNFFSDDSQLIDIHTLIYCSALVISKEIGYKIGGKSGPQHNNVTPLKKPAWQIRLEKDVILLRSDIGRLTQYIGNNRSKKVVNRVEIIFKNTKVHSSHENNNRKPEEYLDTLKQKLALKSKRLARYKKALKRKTDNRLFENNEKLFYRKLMTDKDATTSQREIPNVKDLEQFWAGIWEKEKDHNEDAAWIREEENRWEALEEMPFENITESEMKVITGRLSNWKSPGIDKIHNFWYKKFHCLHKILAKNLTQIILGQQNTPHLIAQGISYMLPKMKHTPLPSQYRPITCLTTIYKILTSILTHKINTHIENNNIIAEEQKGCRRGHMGCKEQLIIDSLIHRHATTHRKNLHCTYIDYKKAFDSIPHSWLLHILRVYKISPIIIEFLKNTMSLWKTKLQLDHILTREITIKTGIYQGDSLSPLWFCLALNPISHLLNKNKVGYNLKHQNSNSISLSHLIYMDDIKLYSRTEKEMQTLIDITVSFSKDINMSFGLEKCKTIHIVNGKIEAGDYTIDKQETIAAMEPHEVYKYLGYYQSKGLDHVRLKKTLMQVYKQRVNLICNSLLTSKSLIKAINTYAIPILTYSFGIIKWTKTDINNVEISTRTSLTKHNYLHPKSAVERMTIKRESGGRGLININTLWKNQVVNLRNFFYKKANDSIIHKAIVQNDNNLTPLNLRDENITHIRNNTEKERSEQWKAKVLHGRHPFDLEQQHVDTAASNKWLTKGSLFPETEGFMMAIQDQVINTRNYKKHIIKDRTLTDDKCRKCHIHSENIQHITGACPNLAQTDYTHRHNQIVNIIHQNLAHKHHLIQNTYTPYYNYHPSPVLENNTHKMYFDRAILTDKTIHYNRPDITLQDKKNKTTYLIDIAVPNTHNLQTTIAEKIHKYTDLKDEIARIWRQDKVYIVPIVLSTTGVIPKYLHHSLKLIDLPFSYITAQKAAILNTCRIVRKFLQIDDNND

SEQ ID NO: 21862 - protein, 1260 aa, Nicephellus nicephorus
MRLRNRQIPQAGTREGESRPEPSGSGCPTYSGGGNVSHTAAQSRTVVAENSPPHITSHSSSPISSSHSLFQSPSSSPNSYQFQHSSSRSTTVTPMSCDVAQEAHAKSPVPTDDITNFTRQTRKNLIKRVNHNTPSYPPNTSSRSVLKEMLPATTLAGKSRQRMKWTDDINKELLRCYYIVTHNETNLTAWRSLLHKKFVDSFPELQHLSEQRLADQIRVIHRNNRISAIDREHIKQSVFLLISPTSYNYNEENTTGNRGVEQITMNSTHATNYTEKDAQTAHNTKFTSNTHQSTQIEIVNILMTNDNEYLESTSMSDATVKKIKEELQTALIKYAGTDPTLRPKLPKLKQSLKLNHLTDLFNSKILHHFFSNDSQLTDIHTLIYCSALVLSRELGYKIGETYRHQYKKQTRKPEWQNRIEKDIVKLRSDIGKLTQYINNNNRSKKVVNRVEMIFKDTKVHTVHENNNKKPEEFLDTLKQKLALKANRLARYKKALKRKNDNKLFYTNEKLFYRKLTSDKNSSEANEHSEIPNVKDLEQFWARVWEADEKHNEEAAWIAEEESRWKMLDEMKFEEITELDIKEVAARLKNWKSPGIDKVHNFWYKKFYTLHKIIAKNLTDITFGQQNTPEFITQGITYMIPKMKHTTQPSQYRPITCLPTIYKILTSVLSRKITIHIEKNNILSEEQKGCRQGHMGCKEQLIIDSLIHRHATANKRNLHCTYIDYKKAFDSIPHSWLIHILKIYKINPIIIDFLKNTMSLWKTKLQLDNITTRQIAIKKGIYQGDSLSPLWFCLALNPISHMLHKCNGGYRLQHQNNSICISHLIYMDDIKLYSKTDKEMKYLIDTTVEFSKDIKMAFGLDKCKTIHIANGKIRPGDYIVNREEVITAMEPNDLYKYLGYYQSKGLNHITLKKSLMQEYKHRVNIICKSLLTGKRLVKAINTYAIPILTYSFGIIKWTKTDINNIEISTRTSLTKYNYLHPKSAIERMTLKRQNGGRGLINIENLWKNQIENLRLFFYQKAKDSDIHKAIVQNDSNYTPLNLVDDTELNRAGDSEQTRIEQWKTKTLHGRHPFELEQPHVDATASNVWLTVGSLFPETEGFMIGIQDQVINTRNYRKYIIKDTTLTDDRCRKCHSHPETIQHITGACPNLTQTDYTHRHNQIANIIHQNLAHKHRLIPNTYTPYYKYCPSPVLENNTHKMYFDRAILTDKTVHYNRPDIVLQDKRNKTTYLIDIAVPNTHNLQKSIAQSKVDNRRVANPED

SEQ ID NO: 21863 - protein, 1027 aa, Udranomia kikkawai
MFTNNTDTVQTTILPEIKIEKLKEDLQKTIIEYTGTDPTLRPILPKLKHNNKLIHLIHIFNSDILQNFFSDDSQLIDIHTLIYCSALVISRELGYNIGENNRPQRTNETRKPKWQIRLEKDIEQLRADIGRLTQYINNNRSKKVVKRVEIIFKNTIVHSTHENNNRKPEEFLDTLKQKLALKSNRLARYKKALKRKLDNKIFHNNEKLFYRKLIPNTNSASPNHTEIPNQKDLEKFWADIWEVEEKHNEDATWIAEEENKWQELEEMMFEQVTETDIKIVTMRINNWKAPGIDRVHNFWYKKFQSLHKIIAKNFTEMIKGQQDTPQFISQGKTFMLPKEKYTTQPSQYRPITCLPTIYKILTSVITQKITAHIEKNNILSEEQKGCRRGHMGCKEQLIIDSVVHRHALTKKRNLHCTYIDYKKAFDSIPHSWLLRILEIYKISPLLISFLKNTMNLWKTRLHLDTITTREIAIKKGIFQGDSLSPMWFCLALNPISHMLHKQKAGYDLKHEDNYICISHLIYMDDIKLYSETSKEMQYLIDTVAKFSKDINMTFGLDKCKTINIIKGKIQPGDYITNNLEKITAMEPNELYKYLGYYQSKGLDHCKLKASLMQVYKHRVEIICRSLLNGKRLIKAINTFAVPILTYSFGIVKWTKTDINNIERKTRTTLTKHKYLHPKSAIERITVKRQNGGRGLINIANLWKNQILNLKSFFYLKSNDSNIHKAIVYNDTNLTPLNLTDKTDCNRNADSEQARIERWKTKVLHGRHPHDLGQPHIDAIASNKWITVGSLFPETEGFMLAIQDQVINTRNYRKHIIKDRTLIDDRCRKCHSHPENIQHIIGACPNLTQTDYTHRHNQIANIIHINLAIKHHLIPNTYTPYYKYIPSPVLENDSHKMYFDRAILTDKTIHYNRPDITLQDKKNKITYLIDIAVPNTHNLQRTIAEKIHKYTDLKDEITRIWRQEKVYIVPIVLSSTGVIPKYLHHSLKLIDLPYCFIAAQKAVILNTCRIVRKFLQIDDDTNERDTQT

SEQ ID NO: 21864 - protein, 814 aa, Euriphellus phraxanor
MTGTNRSAAPKCNEIPDVKDLEQFWAGIWEVNEKHNEEAAWIAEEENRWEALGEMNFEEITEIDIRNVTARLKNWKSPGIDKVHNYWYKKLHILHKIIAKNLTQIILKQQNIPQFIAQGITYMLPKDKHTTQPSQYRPITCLPTIYKILTSVITQKISSHVEKNNILSEEQKGCRRGHMGCKEQLIIDSLIHRHAATNKRNLHCTFIDYKKAFDSIPHSWLLYILKIYKINPIIIEFLKDTMNLWKTKLQIHNITTREIAIRKGMYQGDSLSPLWFCLALNPISHILNKCKAGYLLGSQNNRTCISHLIYMDDIKLYSKTEKEMKYLIDTTIEFSKDIKMEFGLDKCKTIHITKGKIQPGDYLISKEEKITAMEPNELYKYLGYYQSKGLDHVNIKNTLMQEYKHRVNIICKSLLVSKSLIKAINTYAIPILTYSFGIIKWTKTDINNIEIKTRTSLTKHNYLHPKSAIERMSLKRQDGGRGLIKIGNLWKNQILNLRNFFYEKANKSDIHNAIVQNDLNYTPLNLIEKTDVHHKGDLEKARIDQWKAKTLHGRHPFDLEQPHIDAIASNKWLTKGTLFPETEGFMVAIQDQVINTRNYRKHIIKDPTLTDDRCRKCHSHPENIQHITGACPNLTQTDYTHRHNQIAYIIHQNLAHKHHLIPNTYTPYYKYKPSPVLENNTHKMYYDRAILTDKTIHYNRPDITLQDKINKITYLIDIAVPNTHNLQKTIAEKIHKYTDLKDEITRIWKQEKVYIVPIVLSTTGVVPKYLHHSLKLIGLPYCYIPSQKAAILNTCRIVRKFLQIDDPTPTERQT

SEQ ID NO: 21865 - protein, 893 aa, Ebrietas anacreon
MTPQRRIEMRKPSWQKRIEKDIVQLRSDIGKLTQYIKNNRSKKVVDRVEVIFRNIKIHSTHEKVNRNPEEFLDTLKQKLALKAKRLARYKKALKRKSDNSLFNTNEKMFYKNLRIGTVRPAVEENEIPEVKDLEDFWAGIWEVEKLHNKEAAWINEEESRWRILQEMKFEEISETDLSTVTSRLNNWKSPGIDRIHNFWYKKLHCLHKIIAKNLTQIIQGYQNAPQFIAQGITYMLPKDKYTNQPSQYRPITCLPTIYKIITSLITNKITIHIEQNKILSEEQKGCRRGHMGCKEQLVIDSLIHRHAAANKRNLHCTYIDYKKAFDSIPHSWLLRVLQIYKVNPVIISFLKNIMEHCKSKLHLGSIITRDISIKKGIFQGDSLSPLWFCLALNPISHLLHNLQVGYRLRQENSETHISHLIYMDDIKLYSRTEKEMKQLIDTTAKFSEDINMEFGLSKCKTIHITKGKIQPGSFTVNDEQLITAMEPHELYKYLGYYQSKGLDHSKLKTSIKQEYVNRVNTICKSLLTGRSLTKAINTYAIPVLTYSFGIIKWSKTDINSIAINTRTILTKHNFLHPKSAIERMTLKRINGGRGLINVSNLWINQIIKLRTFFYQKANSSDIHKAVVHNDFNFTPLNLSDRLELTIDSDQTKTEQWKAKTLHGRHPYDLEQSHVDAAASNKWLTTGSLFPETEGFMVAIQDQIINTKNYRRHIIKDPTITDDRCRKCHTLPENIQHITGACPNLAQTDYTHRHNQVANIIHQNLAIKHHLIQNTHTPYYNYKPSSVLENSFYKLYFDRAILTDKTIHYNRPDITLQDKRNKTIYLIDIAIPNTHNLQKTIAEKIHKYTDLKDEIAQIWKQDKVYIVPIVLSTTGIIPKYLHHSLKLIDLPYAY

SEQ ID NO: 21866 - protein, 1315 aa, Cycloglypha thrasibulus
MRLRNRDIPQAGTSLPRGEEESGPGPSSSGCPTYSGGGNVSHMTTQTSTVVVHTNSTSYISSNPSSPTSTYSLFQTPSSSPHSYQLQQSSSRSSTITPLSIDVAQEELASTSVPTSDINKLTRPIVSENNMEIRVNHNTPSHLPTTSPSSVLKDMLPATTLAGKNRKRMKWTDEINKKLLLCYYTVTNNETNLTAWRTLLHRQFTKNVPELSHLSEQRLADQIRVIHKNNRIPLNERERLKQSITLTITSTSDHEENSTPLPDNHHINIDTQIHTTQISQVTPHLDTYTQTETRHLLITNDIEILQPTTPAEVANMKLIENLHTALTKFAGTDPSLRPKLPKLKYCNKLNQLINTFNNSILPLFFSNDSQLIDIHTIIYCSALVMSQELGFTIDENIAPQRKIEMRTPSWQRRLEKDIIQLRSDIGKLTQYIKNNRSKKVVDRVEVIFRNIKIHSKHEKDNGNPEEFLDTLKQKLALKAKRLARYKKALKRKNDNSLFNNNEKMFYKNLRVGTVRPAVEQSEIPNVKDLEDFWAGLWEVEKEHNKEAAWIKEEESRWSMVQEMKFDEISETDIRIVTSRLNNWKSPGIDRLHNFWYKKLHCLHKIIAKNLTQIIRGHQNPPQFIAQGVTYMLPKENYTNQPSQYRPITCLPTIYKILTSLITHKITIHIEQNEIISEEQKGCRRGHMGCKEQLIIDSLIHRHATSNKRNLHCTYIDYKKAFDSIPHSWLLRVLEIYKVNPVIISFLKNIMEHWKSKLHLGNIITREISIKKGMFQGDSLSPLWFCLALNPISHLLHKLKVGYRLKQENSETHISHLIYMDDIKLYSRTEKEMQQLIDTTAKFSRDINMEFGLNKCKTLHITKGKIQPGSFIVNDNELITAMEPNEMYKYLGYYQSKGLDHSKLKTSLKQDYVNRVNTICKSLLTGKSLTKAINTYAIPILTYSFGIIKWSKTDINSIAINTRTILTKHNFLHPKSAIERMTLKRVNGGRGLVNVTNLWVNQIIKLRTFFYHKANSSDIHKAVVQNDFNFTPLNLSDRTELTSYCDQTSTEQWKAKTLHGRHPYDLEQNHVDAAASNKWLTRGSLFPETEGFMVAIQDQVINTKNYRRHILKDPTITDDRCRKCHTLPENIQHITGACPNLAQTDYTHRHNQVANIVHQSLALKHHLIQNTHTPYYNYKPSSVLENNFYKMYFDRAILTDKTIHYNRPDITLQDKKNKTTYLIDIAIPNTHNLQKTIAEKIHKYTDLKDEIAQIWKQDKVYIVPIVLSTTGIIPKYLHHSLKLIDLPNAYITAQKAVILNTCRIVRKFLQIDYDSI

SEQ ID NO: 21867 - protein, 1281 aa, Timochares trifasciata
MTAQTSSVVVNTSPSLHIITNPLSPTSSTHSLFQSPSSSPYSFQFQQSSSGSSTTTLVSVDVAQEALALTSVPTSDTTNVTRLNVYENNMDIRVNHNTQSCSSIIPVTGVLKNMLPSTTQAGKCRMRMKWTDEINFELLRCYYIVTHNETNLTAWRTLLHRKFSESVPELSHLSEQRLADQIRVIHRNNRIPPSERERLKQSITVTTCPTDNHDELTIQHYTPNCHHINTDTQIHITQTSPLTSNSHAYTQTETSHILITNDIEILQSTTLSETTHTKIMKDLHTCLIKFAGTDPTLRPKLPKLKYSKKLNHLINIFNNDILTNFISDDSQLIDLHTLVYCSAFVISQELGFTIIDHIRPQRSNGTIIPTWQSRIEKDIEQLRSDIGKLTQYIKNNRSKKVVDRVEVIFRNMKIHSIHENNNNTPEEFLDTLKQKLALKAKRLARYKKALKRKNDNNQFKNNEKVFYNKLRVGTLRPVVEQSEIPDVKDLEQFWAGIWEEEKHHNEEAIWIKEEENRWEMLEEMKFEEITETDLNIVTSRLNNWKSPGIDRVHNFWYKKLHCLHKLLAKNLTEIIVGHQNPPQFIAQGVTFLLPKEKYTNQPSQYRPITCLPTIYKILTALITHKITTHIEKNKILSEEQKGCRRGHMGCKEQLVIDSLIHKHANSNKRNLHCTYIDYQKAFDSIPHSWLLRILQIYKINPVIISFLKNIIKHWKTKLHLDKITTREISIKKGIYQGDSLSPLWFCLALNPISHMLNKLKAGYRLKHEDNETHISHLIYMDDIKLYSRTENEMQRLIDTTAQFSKDINMTFGLEKCKTIHIKKGKIQPGSFTVNEEEIITAMGPNELYKYLGYYQSKGLDHCTLRISLRQAYINRVSVICKSLLNGKSLIKAINTYAIPILTYSFGIIKWSKTDINSIAINTRTLLTKHNFLHPKSAIERMSLRRKNGGRGLINVTALWSNQITNLRNFFYQKANTSEIHKAIVHNDINYTALNLSDRTDLIRGRDVDQTSKMQWKAKTLHGRHPYDLEQAHVDAAASNKWLTRGSLFPETEGFMVAIQDQVINTKNYRKHIIKDPTLKDDRCRKCHTHPETIQHITGACPSLAQTEYTHRHNQIANIIHQNLAVKHHLIPNTHIPYYNYKPSPVLENNNYKLYFDRAILTDKTIHYNRPDITLQDKKKKTTYLIDIAVPNTHNLQKTIAEKIHKYTELKDEITRIWKQDKVFIVPIVISTTGVIPKYLHDSLKLIDLPYAYITAQKAAILNTCRIVRKFLQIDYDTNEIN

SEQ ID NO: 21868 - protein, 1044 aa, Ebrietas anacreon
MSNTDTYTQTDTTHILISNDIEILQPTTMPEITHSKIIEDLRTTLIKFAGTDPTLRPKLPKLKYSKKLNQLINIFNNNILSNFISDDSQLTDIHTLVYCSAFLISQELGFTIGENSRPKRNNETRIPSWQSRIEKDIKQLRSDIGKLTQYIKNNRSKKVVDRVEAIFRNMKIHSTHEKSNRKPEEFLDTLKQKLTLKAKRLARYKKALKRKSDNNQFENNEKMFYNTLRSGTIRPVADQIEIPDVKDLELFWAGIWEVEKYHNEEASWIKEEENRWSMLDEMKFEEITERDINIVTSRLNNWKSPGIDKVHNFWYKKLHYLHKIIAKNLTHIVLGYQTPPQFIAQGLTFMLPKEKYTNQPSQYRPITCLPTIYKILTSLITNKITTHIEQNKILSEEQKGCRRGHMGCKEQLIIDSLIHKHANSNKRNLHCTYIDYKKAFDSIPHSWLLRVLEIYKINPVIISFLKNTMEYWKTRLHLDKITTREISIKRGIYQGDSLSPLWFCLALNPISHMLNKSKVGYCLKHENNETRISHLIYMDDIKLYSRSKKDMQHLVHTTAKFSKDINMTFGLDKCKTINISKGTIQPGNFTVSDEEIITAMESNDLYKYLGFCQSKGLDHYKLKANLKQAYLKRVNTICKSLLTGKSLIKAINTYAIPVLTYSFGIIKWSKTDINSITISTRTLLTKHNFLHPKSAIERMSLKRINGGRGLINIIDLWSNQIVILRKFFYQKANSSNIHKAVIQNDFNFTPLNLAVRAEPIRGCDIDQVSTMRWKAKTLHGRHPYDLEQSNVDAAASNKWLSRGSLFPETEGFMLAIQDQVINTKNYRKYIIKDPTITDDRCRKCHTHPETIQHITGACPNLAQTEYTHRHNQIANIIHQNLAFKHHLIPNMHTPYYNYKPNSVLENDSYKMYFDRAILTDKTIHYNRPDITLQDKKKKITYLIDIAVPNTHNLQKTIAEKIHKYTDLKDEVTRIWKQDKVFIVPIVLSTTGVIPKYLHHSLKLIDLPYAYITAQKAAILNTCRIVRKFLQIDHENNEMHGMPDI

SEQ ID NO: 21869 - protein, 1321 aa, Pyrgus malvae
MRLRGRVIPQAGTREGESRPGPSSSGSPAYSGVGTASHLIAQSHTVAVNKETSHTISHSSSPTTSSNSLFPSPSSSPSSYKFHTSFESTTSSSTASCDVAQEACANYPVPITDITNSTRALQNNLSISVDHNTQSSSLSIPSRSVLQDMLPATTLAGKARQRMKWNDQINRELLRCYYIVTQNETNLTAWRTQLQQKFAENIPELGHLSEQRLSDQIRVIHKNNRITVSEREQIKQTLLNTNIPDNNIIASDVMQPNPTIDTPILSTNQSNTQAYMQNCTQHTLNSNACTQTETTIILLENDIEILQHTQSLDKITEEKLKQDLQTALIQYSGTDPALRPKLPKLKYSKKLFQIIDLFNNKILSNFISDDFQLTDLHTLIYCSALIISLEVGYRIGENPRSQRNKEIRLPKWQVRIEKDIAQLRSDIGKLTQYINNNRSSKVVNRVEIIFRNNKIHSTHECYNKTPEEFLDTLKQKLALKAKRLARYKKATKRINDNKLFNVNEKLFYRKLKNMNKTQLNQNVTPDVKELEKFWSEIWETEEKHNENAEWIAEEENKFRVLDEMHFEEVTELDVQEITARIHNWKSPGIDKIHNFWYKKFNALHKLLAKNFTQIILGKQNIPQFIAQGITYLIPKDKHTLQPSQYRPITCLPTIYKILTSIITFKITVHVENNNILAEEQKGCRRGHMGCKEQLVIDSLIHRHAATNKRNLHCTYIDYKKAFDSIPHSWLLRILEIYKINHKLIQFLKNTMSLWKTRLHLNNIKTREIAIRKGIYQGDSLSPMWFCLALNPISHMLQKQNTGYCLKHSNNNTNISHLIYMDDIKLYSRSEKGMQSLINTTIKFSNDINMTFGIEKCRTIHIIKGKIKPGDYEINEEDKISAMEPNELYKYLGYSQSKGLDHTKIKTLLIKEYKQRIKTICQSLLTSKSLVKAINTYAIPILTYSFGIIKWTKTDINNLEICTRTTLTQHNYLHPKSAIERMTLKRQNGGRGLINISTLWKNQIANLRSFFYQKAEISILHKVTVQNDFNYTPLNLCDDSEQNGVDDSEQIRTDRWKMKVLHGRHPHDLEHSHIDATASNKWLTNGSMFPETEGFMLAIQDQVINTRNYKKHIIKDPTITDDKCRKCHAHTENIQHITGACPNLTQTDYTHRHNQVANIIHQHLAQKHNLIPKSHIPYYKYTPSVVLENNTHKIYYDRAILTDKTIHYNRPDITLQDKKNKTTYLIDIAIPNTHNLQKTIAEKIHKYTDLKDEIARIWKQDKVYIVPIVLSSTGVIPKYLHHSLKLIDLPYSYIPAQKAVILNTCRIVRKFLQIEEINESGT

SEQ ID NO: 21870 - protein, 1318 aa, Camptopleura auxo
MRLRNRVIPQAGTSRTREEESGPGPSSSGCPTYSGGGNASHMASQTSSAVVNKSPSSHIITNPSSPTSSTHSLFQSPSSSPQSFQFQQSSSRSSTTTLMSIDVAQEALALSAVPTSDTTYLTRQNVNKRNKVMRVNHETQPYSSTIPVTGVLIDMLPATTQAGKNRMRMKWTDEINFELLRCYYIVTHNETNLTAWRTLLHRKFTESVPELGHLSEQRLADQIRVIHRNNRIPPIERERLKQSTTLTTSSIDNHEYTTQQNTLLLNNGHHTSTDTQSDTHPHRSLFTSNSHTYTQTETTHILITNDIEILQLTTQPEITHSKIKEELHTTLIKFAGTDPTLRPKLPKLKYSKKLDQLINIFNNNILTNFISDDSQLTDIHTLVYCSAYVISQELGFIIGDNIRPPRSNETKIPSWQSRIEKDIEHLRSDIGKLTQYIKNNRSKKVVDRVEVIFKNMKIHSIHENNNNKPEEFLDTLKQKLALKAKRLARYKKAFKRKNDNNLFKNNEKIFYSKLRSGTIRPVPDQTEIPEVKELEKFWAGIWEVEKDHNEEAAWIKEEESRWRMLEEMKFEHITETDLSMVTSKLNNWKSPGVDRVHNFWYKKLHCLHKLIAKNLNEIIVGHHMLPKEKYTNQPSQYRPITCLPTIYKILTSLISHKITTHIEQNKILSEEQKGCRRGHMGCKEQLVIDSLIHKHANSNKRNLHCTYIDYKKAFDSIPHSWLLRVLQIYKINPVIISFLKNIMEHWKTKLHLDKITTREISIKKGIYQGDALSPLWFCLALNPISHMLNKLKVGYRLKHKDKETHISHLIYMDDIKLYSRTEKEMKHLIDTTAKFSKDINMTFGLDKCKAIHITKGKIQPGYFTVNDEEIITAMEPNEFYKYLGYYQSKGLDHCKLKASLKQAYINRVNIICKTLLTGKSLIKAINTYAIPILTYSFGIIKWSKTDVNNIAINTRTLLTKHNFLHPKSAIERMSLKRINGGRGLINVTNLWNNQIINLRNFFYQKANSSDIHKAVVQNDFNYTPLNLADNTELTRGCDIDQTNTVQWKAKTLHGRHPYDLEQSHVDTAASNKWLTRGSLFPETEGFIVAIQDQVINTKNYRKHIIKDPTLKDDRCRKCHTHPETIQHITGACPNLAQTEYTHRHNQIVNIIHQNLALKHHLIPNTHTPYYNYKPSSVLENTSYKMYFDRAILTDKTIHYNRPDITLQDKKKKTTYLIDIAVPNTHNLQKTIAEKIHKYTDLKDEITRIWKQDKVYIVPVVISTTGVIPKYLHHSLKLIDLPYAYITAQKAAILNTCRIVRKFLQIDSDNNETNITTIL

SEQ ID NO: 21871 - protein, 1321 aa, Pyrgus malvae
MRLRGRVIPQAGTREGESRPGPSSSGSPAYSGVGTASHLIAQSHTVAVNKETSHTISHSSSPTTSSNSLFPSPSSSPSSYKFHTSFESTTSSSTASCDVAQEACANYPVPITDITNSTRALQNNLSISVDHNTQSSSLSIPSRSVLQDMLPATTLAGKARQRMKWNDQINRELLRCYYIVTQNETNLTAWRTQLKQKFAENIPELGHLSEQRLSDQIRVIHKNNRITVSEREQIKQTLLNTNIPDNNIIASDVMQPNPTIDTPILSTNQSNTQAYMQNCTQHTLNSNACTQTETTIILLENDIEILQHTQSLDKITEEKLKQDLQTALIQYSGTDPALRPKLPKLKYSKKLFQIIDLFNNKILSNFISDDFQLTDLHTLIYCSALIISLEVGYRIGENPRSQRNKEIRLPKWQVRIEKDIAQLRSDIGKLTQYINNNRSSKVVNRVEIIFRNNKIHSTHECYNKTPEEFLDTLKQKLALKAKRLARYKKATKRINDNKLFNVNEKLFYRKLKNMNKTQLNQNVTPDVKDLEKFWSEIWETEEKHNENAEWIAEEENKFRVLDEMHFEEVTELDVQEITARIHNWKSPGIDKIHNFWYKKFNVLHKLLAKNFTQIILGKQNIPQFIAQGITYLIPKDKHTLQPSQYRPITCLPTIYKILTSIITFKITVHVENNNILAEEQKGCRRGHMGCKEQLVIDSLIYRHAATNKRNLHCTYIDYKKAFDSIPHSWLLRILEIYKINHKLIQFLKNTMSLWKTRLHLNNIKTREIAIRKGIYQGDSLSPMWFCLALNPISHMLQKQNTGYCLKHSNNNTNISHLIYMDDIKLYSRSEKGMQSLINTTIKFSNDINMTFGIEKCRTIHIIKGKIKPGDYEINEEDKISAMEPNELYKYLGYSQSKGLDHTKIKTLLIKEYKQRIKTICQSLLTSKSLVKAINTYAIPILTYSFGIIKWTKTDINNLEICTRTTLTQHNYLHPKSAIERMTLKRQNGGRGLINISTLWKNQIANLRSFFYQKAEISILHKVTVQNDFNYTPLNLCDDSEQTGVDDSEQIRTDRWKMKVLHGRHPHDLEHSHIDATASNKWLTNGSIFPETEGFMLAIQDQVINTRNYKKHIIKDPTITDDKCRKCHAHTENIQHITGACPNLTQTDYTHRHNQVANIIHQHLAQKHNLIPKSHIPYYKYTPSVVLENNTHKIYYDRAILTDKTIHYNRPDITLQDKKNKTTYLIDIAIPNTHNLQKTIAEKIHKYTDLKDEIARIWKQDKVYIVPIVLSSTGVIPKYLHHSLKLIDLPYSYIPAQKAVILNTCRIVRKFLQIEEINESGT

SEQ ID NO: 21872 - protein, 1193 aa, Telemiades fides
MLPATTLAGKTRQRMKWTDNINKELLRCYYIVTHNETNLTAWRPQLHKKITESIPELHHLSEQRLADQIRVIHRNNRITEIDRKQLKQSVASLLNSASNIPNEHSTTRNAELPYILDFTLTNSRHINTDTQTQTTHNIQHADTQTQSTHNIQHLTTSTLTEETNTLVTNDTEIMQSMPISDNVIEKMKLALQTAFIEYMGSDPTLRPKLPKLTQNLKLNQLIDLFNNKILCHFFTQDSQLTDIHTLIYCRALVISRELGYTIRETFRPQVKSEIKKPGWQKRIEKDIAQLRSDIGRLTQNINNNRSSKVLERVKVIFKNAKIHSVHENNNKKPEEYLDTLKQKLALKANRLKRYKKALKRKNDNTLFYTNQKLFFRKLKSETNDSVTNCNDIPDIQELEQFWAKIWEADEKHNDEAAWIIEEESRWELLEEMQFEQITETDIKNVTGRLNNWKSPGIDKIHNFWYKKFYTLHKIIAKNFTEIIFGRQNTPTFITQGITYMIPKVKHTTQPSEYRPITCLPTIYKILTSVITNKITVHIEKNNILSEEQKGCRRGHMGCKEQLIIDSLIHRHATINKRNLHCTYIDYKKAFDSIPHSWLLRILNIYKIHPTIIGFLKNTMNLWKTKLQLNNISSREIAIKKGIYQGDSLSPLWFCLALNPISYMLNKCEAGYRLKHQNNSMCILSHLIYMDDIKLFSKSEKEMQYLIDITAKFSKDINMAFGLDKCRTIHIKKGKIEPGDYLINENEKITAMESNELYKYLGYYQSKGLDHIKLKKTIMQEYKHRVNIICKSLLAGKSLINAVNTYAIPILTYSFGIVKWTKTDINNIEISTRTLLSKHNYLHPKSAIERMTLKRQNGGRGFINITNLWNNQIVTLRNFFYQKANTSIIHRAVVQNDLNYTPLNLIDKTEVNREDDSEQAKTEQWKAKVLHGRHPFDLEQPHIDATASNIWLTKGTLFPETEGFIIAIQDQVINTKNYRKHIIKDPTLIDDRCRKCHSHPENIQHITGACPNLAQTDYTHRHNQIANIIHQNLAHKHHLISNIYTPYYKYCPSPILENNTHKMYFDRAILTDKTIHFNRPDITLLDKRSKTTYLIDIAVPNTHNLQKTIAEKIHKYTDLKDEVTRIWKQDKVYVVPIVLSTTGVIPVCLHRSLKLIGLPNSYIPAQKAAILNTCRIVRKFLQIDEEWTLTDRTI

SEQ ID NO: 21873 - protein, 1373 aa, Plodia interpunctella
MESKRNSILSTQSLTDVENENSSSQNHLQNPVDSNNIMQSNILRRSTRQTRNRYRSPSPQSISDSLEPFSPTSTTSYAPSLSSVDEDPRDHIAINPTLNVTQEAQAFQPASTKAGKPRLRMRWSNDVNIFIMRTYYRVTKLETDLTIYRKLLYEEFMKQYPGVNVSEQRVSDQRRVIVRNKMISEEILNQIKEDVRQELEYTGSTTTPMPSIDLSSHSHTLSTISTIQHPNPTQSTLLPNQMNNNRNRSLTISTNFNTSSQEIVTPISYSQLDHNISILTDPNMDVATQTETVNILVENEVTTLQTTYLLNNNVLQKLRDNLQTALLEYAGMDPILRPRLPKLCFRHSKHLTQILLAFNNHILQHFFSEESQLTDIHTLIYCSAVVISRELGYRIGEDYQPQRRLKRRPAWLLRLEKDIIQLRADIGRLTQYINNNRSQKVVDEVNRIFRNTQVHSRYERNNNKPEEYLDTLKQKLSLKAHRLSRYKKSNKRKEDNKLFQNNEKLFYRQLNEKPDSEERQCRIPEVKELEEFWAGIWEEEVQHNASAKWITDETDRWRTLEEMNFTEITKSDLTNVISRLHNWKSPGIDKIHNFWFKKLYVLHKILAKNLTLIIQEKQITPYFLTQGITYMLPKGKHTNQPSQYRPITCLPTIYKILTSAITQKINEHLETNHILAEEQKGCRRGHMGCKEQLVIDSLIHRHATTNKRNLHCTYIDYRKAFDSIPHSWLLEILKIYKINPMIINFLKNTMKSWKTSLHLKDLNTREIAIKKGIYQGDALSPLWFCLALNPISYLLCGRGVGYHLKHDNSQTYISHLIYMDDIKLYAKSKSDMKTLIDTTTMFSKDINMQFGLEKCKTIHIVKGKIRPGDYAISDDENITAMEPNELYKYLGYHQSKGLDHTSIKLSLTNEYKKRVSALCKSQLAGKSLIKAINTYATPILTYSFGIIKWSKTNINKIDINTRTILTKYNCLHPKSAIERMTIKRHDGGRGLINVVALWKKQISSLKQFFYRKSESSEIHKAIVRNDFNHTPLNLRKEDTEVDTNNIEKNSIEQWKKKVLHGRHPHDLDQPHIDAFASNKWLSIGSLFPETEGFIIAIQDQIINTRNYRKHIIKDVTSTDDRCRKCHNHPETIQHITGACPNLAQTDYTHRHNQIANILHQTLAKKHKLISDTVTPYYKYNPEPILENNTHKMYFDRAILTDRTIHYNRPDITLQDKVNKITYLIDIAVPNTHNLQKTISEKIHKYTDLQDEVTRIWKQNKVYVVPIVLSTTGIIPKYLHHSLQLLDLRPSTYIPMQKAAILNTCRIVRKFLQIDENGQTMTEHKIDKILSFTWFTPVNDMIIPAHAEKKKQKKKKIIINSLFLTITTESVQNN

SEQ ID NO: 21874 - protein, 1346 aa, Ephestia elutella
MRGSVVVDFLSLAARGNHNRVTMKKNKKNTPTQLPAVVENNANINASTSRSQSVPEQQPTIRRSTRRTCNRYRSRSTSPSKSISDVAEPYSPSTASYAPSLSSVDENSIDLIAPNPTSSVTQEAQAFKPASTKAGKPRVRMSWTNDVNVFIMRTYYKITKLETDLTIYRKLLHEEFIKQYPGVSVSEQRVSDQRRVIIRNKMISDETLNQIKEEVRCELEQTDTLTNTQQGFDQSPSISMRSILDISDIQQRTLLSQNQPHLQSQSQTIPTIAVLSTPNSQVHRQTLPNTDTESQYNIQLNNPTSLTLNSNVSTQTETTTILLENEIDTLQPTPLLNHSLQKLHENLQTALIEYAGMDPTVRPNLPKLKYSTHLLQIVEAFNNSILEQFFSDDSQLTDIHTLIYCSAVAISRELGYKIGDDLQPQQTVRKKPAWLIRLEKDITQLRSDIGRLTQYINNNRSPNVINAVNKIFRNTQIHTRHENNNRKPEEYLDTLKQKLALKAHRLSRYTKSYKRRKDNKLFNNNEKLFYRKLFEDKESTPNNAEVPEVEDLERFWAGIWEEEIQHNTTAEWISEEENRCHALEEMNFTELTETDVANVTSRLHNWKSPGIDKIHNFWFKKFYRLHGILAKNLTLIIQGKQSTPSFLAKGITYMIPKGKYSSQPSQYRPITCLPTIYKILTSAIAQKINQHLEANNILAEEQKGCRRGHMGCKEQLVIDSLINKHATTNRRNLHCTYIDYRKAFDSIPHSWLIQILKIYKINPVIIEFLKNTMKLWKTKLHLKEIETREIVIKKGIYQGDSLSPMWFCLALNPISYLLRERRVGYNLKNGDTETIISHLIYMDDIKLYSKTQKDMKSLIDVTTKFSKDINMQFGLDKCKTINIIKGKIRPGDHAVGDDENITAMEPHDLYKYLGYHQSKGLDHTAIKTSLTQEYKKRVTALCHSQLKGKNLIKAINTFAVPVLTYSFGIIKWSKTNIKSIEINTRTILTKYNNLHPKSAIERMTIKRQDGGRGLINITNLWTQQIDTLKKFFYQKTYNSEIHKAVVENDRNHTPLNLSEEIRVTDIDNTQENIREQWKRKVLHGRHPHDLEQSHIDTTASNKWLSIGSLFPETEGFMIAIQDQVINTRNYRKHIIKDPSITDDRCRKCHNHPENIQHITGACPNLAQTDYTHRHNQIVNIIHQTLALKYNLIPNKSTAYYKYIPQPVLENNTHKLYYDRAILTDRTIHYNRPDITLQDKINKITYLIDVAIPNTHNIQKTISEKIHKYTDLRDEVTRIWRQEKVSVVPIVLSTTGIIPKYLHHSIKILDLKPSIYIPMQKAAILNTCRIVRKFLQIDENGQTNLGQ

SEQ ID NO: 21875 - protein, 1261 aa, Jalmenus evagoras
MVLTRSRVPQAGTSGSTIGESRPEPSLGSPSYSGGGNISQVPTQSQTAVGTTPHSLTPATYSGNNSREQSPALCVTQEALAFQPASTKAGKPRVRMKWTNDVNTFIMRTYYRVTKLETDLTIYRKLLYEEFKRQYPGVNVSEQRVSDQRRVIVRNKIISEEVLDQIKQEIRLELEQANHPSALITPTHTNTTIPSQSDISSHNLQSQSTSFTQLTSISTQTETRSILVENDIETLHPNVSLAPDEITQKLQENLQTTLIEYAGTDPTLRPRLPKLNYSVYLRQLIELFNNKILNNYFSDESQLIDIHTLIYCSALVISRELGYKIDTNSRPYFNNERKPSWQYRLEKDVTQLRSDIGRLTQYICNNNRSKKVVNRVEIILKNTKVHSSHENNNNRLEEYLDTLKQKLALKSHRLARYKKSLQRKNDNKLFTTNEKLFYRNLIADKNCSKPNDDEIPDLNDLEQFWGGIWETETQHKEEARWIVDEENRWIELEEMKFDEITEIDIKNVTSRISNWKSPGIDKLHNFWYKKFHSLHNILAKNITQIINGYQNTPHFIALGITYMLPKEKYTSQPSQYRPITCLPTIYKIITSIITQKITTHIEDNRILAEEQKGCRRGHMGCKEQLIIDSLIHRHATANKRNLHCTYIDYKKAFDSIPHSWLIRILQIYKINPTIIAFLKNTMKMWKTTLHLKTITSREIAINKGIYQGDSLSPLWFCLALNPLSQMLRTHQSGYRLIHNNTTTCISHLVYMDDIKLYAKTKKEMKTLIDCTTEFSKDINMAFGFEKCKTIHIIKGKIQPGDYLIDDENCIKAMEPKELYKYLGYHQSKGLDHTQIRKNLFQEYKRRVNAICKKYLLGKNLTKAINTYAVPVLTYSFGIIKWTKTDITNLEINTRTILNKHNYLHPKSAIERITLKRQSGGRGLINIAELWKKQIANLKIFFHQKTTTSDIHKAICCNDSNYTPLNLTIELTQDTGNNTWQNRIDQWKNKVLHGRHPHDLEKPHVDLIASNKWLEVGSLFPETEGFMIAIQDQVINTRNYRKYIIKDPTITNDKCRKCHSHSENIQHITGACPNLAQTDYTHRHNQIAFIIHQNLALKHHLIHNTNTPYYKYTPNPILENRTHKIYFDRAVLTDRTIHFNRPDIILQDKTNKTTYLIDIAVPNTHNLQKTIADKIHKYTDLKEEITRIWKQDKVYIVPIVLSVTGIIPKHLHHSLKLIGLKPNTYIPLQKAAILNTCRIVRKFLEIDETDNIETHEQTDDTP

SEQ ID NO: 21876 - protein, 1311 aa, Pheosia tremula
METRSKSKRIGPLPGGDRRGALGADAECYSMRTVSGEELNRRAPSGSPENATANQTIDRQTDNINRYISPSPSIVDPYSPSTVSYIPSPIHSDENSRELPTPTLEPTLDVAQEVNSFLPASTKAGKPRVRMRWTNDVNIFIMRTYYRVTKLETDLTIYRKLLHEHFIQQYPETTVSEQRVSDQRRAIIRNKMISDDVLAQIKQEVKLELTNHPSHLQASPRNTLNIESIPQSDVGSHTLPNTSHSFMQPDVYLNIPSHVPAQNTHSTQSLPNTHASTQTETTMLLLENDIETLQPIPLPDDISQKLNQILQSALIEYAGIDPTVRPKLPKLKYSTRLTQLTQLFNNTILNQFFSEDSQLIDIHTLIYCSALVISRELGYKIDQHTQSQRINDRKPAWQVRIERDVTQLRSDIGKLTQYINNNRSKKVVDRVNVIFRNTKVHSSHENDNRKPEEFLDTLKQKLALKAHRLARYKKALQRKNDNRLFHTNEKLFYRKLNTDKDITTPNVTEIPKKEELEEYWTSIWENEAQHNEEASWIGQEEARFENIDVMKFEEITEIDIANVTARLHNWKSPGIDKIHNYWYKHFRILHKIIAKNMTQIIHGQQSAPYFIAKGITYMLPKGKYTTQPSQYRPITCLPTIYKILTSAITQKITAHIEQNNIIAEEQKGCRRDHMGCKEQLIIDSLVHRHATINKRNLHCTYVDYKKAFDSIPHSWLIRVLQIYKINPILIKFLKNIMTLWKTKLLLSTLTTRDIEIKKGIYQGDSLSPLWFCLALNPISHLLREREAGYRLKHDGIETCISHLIYMDDIKLYAKTEREMKILIDTTTEFSNNINMQFGLEKCKTIHIVKGKIRPGDYAVGDEQIISAMEPNELYKYLGYHQSKGLNHMKIKTSLKQEYKRRVNAICKSQLTSKSLIKAINTYAIPILTYSFGVIKWTKTDINHIEIKTRTILTKHNCLHPKSAIERMTIKREDGGRGLINISSLWTKQIATLKSFFQQKANNSNIHKAVVCNDLNFTPLNLSDVTQQDAEIYSQNIIIEQWKKKVLHGRHPHDLEQSHIDPIASNKWLKLGSLFPETEGFMIAIQDQIINTRNYRKHIIKDPTLTDDRCRKCHSHPENIQHITGACPNLAQTDYTHRHNQIANIIHQKLALKHKLIPDTHTPYYKYTPNPILENNTHKMYYDRAILTDRTVHYNRPDITLQDKLNKTTYLIDIAVPNTHNLQKTIAEKIHKYTDLKDEVIRIWKQEKVYIVPIVLSTTGIIPKHLHHGLKLIDLKPNTYMQLQKAAILNTCRIVRKFLQIDENDTATDLQT

SEQ ID NO: 21877 - protein, 1311 aa, Pheosia gnoma
METRSKSKRIGPLPGGDRRGALGADAECYSMRTVSGEELNRRAPSGSPENATANQTIDRQTDNINRYISPCPSIVEPYSPSTVSYIPSPIHSDENSRELPTPTLEPTLAVAQEVNSFLPASTKAGKPRVRMRWTNDVNIFIMRTYYRVTKLETDLTIYRKLLHEHFIQQYPETTVSEQRVSDQRRAIIRNKMISDDVLEQIKQEVKLELTNHPSHLQASPRNTLNIESLPQSNVGSHTLPNTSHSFMQPDVYLNIPSHVPTQNTHSTQSLTNTHASTQTETTMLLLENDIETLQPIPLPDDISQKLNQNLQSALIEYAGIDPTVRPKLPKLKYSTRLTQLTQLFNNTILNQFFSEDSQLIDIHTLIYCSALVISRELGYKIDQHTQPQRINDRKPAWQVRIERDVTQLRSDIGKLTQYINNNRCKKVVDRVNIIFRNTKVHSSHENDNRKPEEFLDTLKQKLALKAHRLARYKKALQRKNDNRLFHTNEKLFYRKLNTDKDITTPNVTEIPKKEELEEYWTSIWENEAQHNEEASWIGQEEARFENINVMKFEEITEIDIANVTARLHNWKSPGIDKIHNYWYKHFRILHKILAKNMTQIIHGQQSAPYFIAKGITYMLPKGKYTTQPSQYRPITCLPTIYKILTSAITQKITAHIEQNNIIAEEQKGCRRDHMGCKEQLIIDSLVHRHATINKRNLHCTYVDYKKAFDSIPHSWLIRVLQIYKINPILIKFLKNIMTLWKTKLLLSTLTTRDIEIKKGIYQGDSLSPLWFCLALNPISHLLREREAGYRLKHDGIETCISHLIYMDDIKLYAKTEREMKILIDTTTEFSNNINMQFGLEKCKTIHIVKGKIRPGDYAVGDEQIISAMEPNELYKYLGYHQSKGLNHMKIKTSLKQEYKRRVNAICKSQLTSKSLIKAINTYAIPILTYSFGVIKWTKTDINHIEIKTRTILTKHNCLHPKSAIERMTIKRQDGGRGLINISSLWTKQIATLKSFFQQKANNSNIHKAVVCNDLNFTPLNLSDATQQDAEIYSQNIIIEQWKKKVLHGRHPHDLEQSHIDPIASNKWLKLGSLFPETEGFMIAIQDQIINTRNYRKHIIKDPTLTDDRCRKCHSHPENIQHITGACPNLAQTDYTHRHNQIANIIHQKLALKHKLIPDTHTPYYKYIPNPILENNTHKMYYDRAILTDRTVHYNRPDITLQDKLNKTTYLIDIAVPNTHNLQKTIAEKIHKYTDLKDEVIRIWKQEKVYIVPIVLSTTGIIPRHLHHGLKLIDLKPNTYMQLQKAAILNTCRIVRKFLQIDENDTATDLQT

SEQ ID NO: 21878 - protein, 1346 aa, Ephestia elutella
MRGSVVVDFLSLAARGNHNRVTMKKNKKNTPTQPPAVVENNANINASTSRSQSVPEQQPTIRRSTRRTCNRYRSRSTSPSKSISDVAEPYSPSTASYAPSLSSVDENSIDLIAPNPTSSVTQEAQAFKPASTKAGKPRVRMSWTNDVNVFIMRTYYKITKLETDLTIYRKLLHEEFIKQYPGVSVSEQRVSDQRRVIIRNKMISDETLNQIKEEVRCELEQTDTLTNTQQGLDQSPSISMRSISDISDIQQRTLLSQNQPHLQSQSQTIPTIAVLSTPNSQVHRQTLPNTDTESQYNIQLNNPTSLTLNSNVSTQTETTTILLENEIDTLQPTPLLNHSLQKLHENLQTALIEYAGMDPTVRPNLPKLKYSTHLLQIVEAFNNSILEQFFSHDSQLTDIHTLIYCSAVAISRELGYKIGDDLQPQQTVRKKAAWLIRLEKDITQLRSDIGRLTQYINNNRSPNVINAVNKIFRNTQIHTRHENNNRKPEEYLDTLKQKLALKAHRLSRYTKSYKRRKDNKLFNNNEKLFYRKLFEDKESTPNNAEVPEVEDLERFWAGIWEEEIQHNTTAEWISEEENRCHALEEMNFTELTETDVANVTSRLHNWKSPGIDKIHNFWFKKFYRLHEILAKNLTLIIQGKQSTPSFLAKGITYMIPKGKYSSQPSQYRPITCLPTIYKILTSAIAQKINQHLEANNILAEEQKGCRRGHMGCKEQLVIDSLINKHATTNRRNLHCTYIDYRKAFDSIPHSWLIQILKIYKINPVIIEFLKNTMKLWKTKLHLKEIETREIVIKKGIYQGDSLSPMWFCLALNPISYLLRERRVGYNLKNGDTETIISHLIYMDDIKLYSKTQKDMKSLIDVTTKFSKDINMQFGLDKCKTINIIKGKIRPGDHAVSDDENITAMEPHDLYKYLGYHQSKGLDHTAIKTSLTQEYKKRVTALCHSQLKGKNLIKAINTFAVPVLTYSFGIIKWSKTNIKSIEINTRTILTKYNNLHPKSAIERMTIKRQDGGRGLINITNLWTQQIDTLKKFFYQKTYNSEIHKAVVENDRNHTPLNLSEEIRVTDIDNTQENIREQWKRKVLHGRHPHDLEQSHIDTTASNKWLSIGSLFPETEGFMIAIQDQVINTRNYRKHIIKDPSITDDRCRKCHNHPENIQHITGACPNLAQTDYTHRHNQIVNIVHQTLALKYNLIPNKSTAYYKYIPQPVLENNTHKLYYDRAILTDRTIHYNRPDITLQDKINKITYLIDVAIPNTHNIQKTISEKIHKYTDLRDEVTRIWRQEKVSIVPIVLSTTGIIPKYLHHSIKILDLKPSIYIPMQKAAILNTCRIVRKFLQIDENGQTNLGP

SEQ ID NO: 21879 - protein, 1311 aa, Pheosia gnoma
METRSKSKRIGPLPGGDRRGALGADAECYSMRTVSGEELNRRAPSGSPENATANQTIDRQTDNINRYISPCPSIVEPYSPSTVSYIPSPIHSDENSRELPTPTLEPTLAVAQEVNSFLPASTKAGKPRVRMRWTNDVNIFIMRTYYRVTKLETDLTIYRKLLHEHFIRQYPETTVSEQRVSDQRRAIIRNKMISDDVLEQIKQEVKLELTNHPSHLQASPRNTLNIESLPQSNVGSHTLPNTSHSFMQPDVYLNIPSHVPTQNTHSTQSLTNTHASTQTETTMLLLENDIETLQPIPLPDDISQKLNQNLQSALIEYAGIDPTVRPKLPKLKYSTRLTQLTQLFNNTILNQFFSEDSQLIDIHTLIYCSALVISRELGYKIDQHTQPQRINDRKPAWQVRIERDVTQLRSDIGKLTQYINNNRSKKVVDRVNIIFRNTKVHSSHENDNRKPEEFLDTLKQKLALKAHRLARYKKALQRKNDNRLFHTNEKLFYRKLNTDKDITTPNVTEIPKKEELEEYWTSIWENEAQHNEEASWIGQEEARFENIDVMKFEEITEIDIANVTARLHNWKSPGIDKIHNYWYKHFRILHKILAKNMTQIIHGQQSAPYFIAKGITYMLPKGKYTTQPSQYRPITCLPTIYKILTSAITQKITAHIEQNNIIAEEQKGCRRDHMGCKEQLIIDSLVHRHATINKRNLHCTYVDYKKAFDSIPHSWLIRVLQIYKINPILIKFLKNIMTLWKTKLLLSTLTTRDIEIKKGIYQGDSLSPLWFCLALNPISHLLREREAGYRLKHDGIETCISHLIYMDDIKLYAKTEREMKILIDTTTEFSNNINMQFGLEKCKTIHIVKGKIRPGDYAVGDEQIISAMEPNELYKYLGYHQSKGLNHMKIKTSLKQEYKRRVNAICKSQLTSKSLIKAINTYAIPILTYSFGVIKWTKTDINHIEIKTRTILTKHNCLHPKSAIERMTIKRQDGGRGLINISSLWTKQIATLKSFFQQKANNSNIHKAVVCNDLNCTPLNLSDATQQDAEMYSQNIIIEQWKKKVIHGRHPHDLEQSHIDPIASNKWLKLGSLFPETEGFMIAIQDQIINTRNYRKHIIKDPTLTDDRCRKCHSHPENIQHITGACPNLAQTDYTHRHNQIANIIHQKLALKHKLIPDTHTPYYKYIPNPILENNTHKMYYDRAILTDRTVHYNRPDITLQDKLNKTTYLIDIAVPNTHNLQKTIAEKIHKYTDLKDEVIRIWKQEKVYIVPIVLSTTGIIPRHLHHGLKLIDLKPNTYMQLQKAAILNTCRIVRKFLQIDENDTATDLQT

SEQ ID NO: 21880 - protein, 1170 aa, Pheosia tremula
MRTYYRVTKLETDLTIYRKLLHEHFIQQYPETTVSEQRVSDQRRAIIRNKMISDDVLAQIKQEVKLELTNHPSHLQASPRNTLNIESIPQSDVGSHTLPNTSHSFMQPDVYLNIPSHVPAQNTHSTQSLPNTHASTQTETTMLLLENDIETLQPIPLPDDISQKLNQILQSALIEYAGIDPTVRPKLPKLKYSTRLTQLTQLFNNTILNQFFSEDSQLIDIHTLIYCSALVISRELGYKIDQHTQSQRINDRKPAWQVRIERDVTQLRSDIGKLTQYINNNRSKKVVDRVNVIFRNTKVHSSHENDNRKPEEFLDTLKQKLALKAHRLARYKKALQRKNDNRLFHTNEKLFYRKLNTDKDITTPNVTEIPKKEELEEYWTSIWENEAQHNEEASWIGQEEARFENIDVMKFEEITEIDIANVTARLHNWKSPGIDKIHNYWYKHFRILHKIIAKNMTQIIHGQQSAPYFIAKGITYMLPKGKYTTQPSQYRPITCLPTIYKILTSAITQKITAHIEQNNIIAEEQKGCRRDHMGCKEQLIIDSLVHRHATINKRNLHCTYVDYKKAFDSIPHSWLIRVLQIYKINPILIKFLKNIMTLWKTKLLLSTLTTRDIEIKKGIYQGDSLSPLWFCLALNPISHLLREREAGYRLKHDGIETCISHLIYMDDIKLYAKTEREMKILINTTTEFSNNINMQFGLEKCKTIHIVKGKIRPGDYAVGDEQIISAMEPNELYKYLGYHQSKGLNHMKIKTSLKQEYKRRVNAICKSQLTSKSLIKAINTYAIPILTYSFGVIKWTKTDINHIEIKTRTILTKHNCLHPKSAIERMTIKREDGGRGLINISSLWTKQIATLKSFFQQKANNSNIHKAVVCNDLNFTPLNLSDVTRQDAEIYSQNIIIEQWKKKVLHGRHPHDLEQSHIDPIASNKWLKLGSLFPETEGFMIAIQDQIINTRNYRKHIIKDPTLTDDRCRKCHSHPENIQHITGACPNLAQTDYTHRHNQIANIIHQKLALKQKLIPDTHTPYYKYTPNPILENNTHKMYYDRAILTDRTVHYNRPDITLQDKLNKTTYLIDIAVPNTHNLQKTIAEKIHKYTDLKDEVIRIWKQEKVYIVPIVLSTTGIIPRHLHHGLKLIDLKPNTYMQLQKAAILNTCRIVRKFLQIDENDTATDLQT

SEQ ID NO: 21881 - protein, 1311 aa, Pheosia tremula
METRSKSKRIGPLPGGDRRGALGADAECYSMRTVSGEELNRRAPSGSPENATANQTIDRQTDNINRYISPSPSIVDPYSPSTVSYIPSPIHSDENSRELPTPTLEPTSDVAQEVNSFLPASTKAGKPRVRMRWTNDVNIFIMRTYYRVTKLETDLTIYRKLLHEHFIQQYPETTVSEQRVSDQRRAIIRNKMISDDVLAQIKQEVKLELTNHPSHLQASPRNTLNIESIPQSDVGSHTLPNTSHSFIQPDVYLNIPSHVPAQNTHSTQSLPNTHASTQTETTMLLLENDIETLQPIPLPDDISQKLNQNLQSALIEYAGIDPTVRPKLPKLKYSTRLTQLTQLFNNTILNQFFSEDSQLIDIHTLIYCSALVISRELGYKIDQHTQSQRINDRKPAWQVRIERDVTQLRSDIGKLTQYINNNRSKKVVDRVNVIFRNTKVHSSHENDNRKPEEFLDTLKQKLALKAHRLARYKKALQRKNDNRLFHTNEKLFYRKLNTDKDITTPNVTEIPKKEELEEYWTSTWENEAQHNEEASWIGQEEARFENIDVMKFEEITEIDIANVTARLHNWKSPGIDKIHNYWYKHFRILHKIIAKNMTQIIHGQQSAPYFIAKGITYMLPKGKYTTQPSQYRPITCLPTIYKILTSAITQKITAHIEQNNIIAEEQKGCRRDHMGCKEQLIIDSLVHRHATINKRNLHCTYVDYKKAFDSIPHSWLIRVLQIYKINPILIKFLKNIMTLWKTKLLLSTLTTRDIEIKKGIYQGDSLSPLWFCLALNPISHLLREREAGYRLKHDGIETCISHLIYMDDIKLYAKTEREMKILINTTTEFSNNINMQFGLEKCKTIHIVKGKIRPGDYAVGDEQIISAMEPNELYKYLGYHQSKGLNHMKIKTSLKQEYKRRVNAICKSQLTSKSLIKAINTYAIPILTYSFGVIKWTKTDINHIEIKTRTILTKHNCLHPKSAIERMTIKREDGGRGLINISSLWTKQIATLKSFFQQKANNSNIHKAVVCNDLNFTPLNLSDVTRQDAEIYSQNIIIEQWKKKVLHGRHPHDLEQSHIDPIASNKWLKLGSLFPETEGFMIAIQDQIINTRNYRKHIIKDPTLTDDRCRKCHSHPENIQHITGACPNLAQTDYTHRHNQIANIIHQKLALKHKLIPDTHTPYYKYTPNPILENNTHKMYYDRAILTDRTVHYNRPNITLQDKLNKTTYLIDIAVPNTHNLQKTIAEKIHKYTDLKDEVIRIWKQEKVYIVPIVLSTTGIIPRHLHHGLKLIDLKPNTYMQLQKAAILNTCRIVRKFLQIDENDTATDLQT

SEQ ID NO: 21882 - protein, 1266 aa, Ephestia elutella
MAMGEHSLKYADSGYQGTSSFNYPCRGMRGSAVVDFQSLAARGNRMERESNLILSTQSPTAVENENENVTSQNHPQNPLNSRSQPNILRRSTRQTRNRYRSPSPQSISDICEPFSPASTASYAPSLSSVDEDPRDLIAPNPTLSVTQEAQAFQPVSTKAGKPRVRMSWSNDVNIFIMRTYYRITKLETDLTVYRKLLHEEFMKQYPGVNVSEQRVSDQRRVIIRNKMISEEVLTQIKEDVRQELEQTDSHTTPIPSMDRFPLFHTPSTSISQFPQPVHVTLSSNLADNDSNFSLSSSNLNVISTQSNINLTQTQSHLDPNISRSGAISNVSTQTEIVNILVENEVTTLQTTVLLDDSYLQKLYESLQTALLEFAGMDPTLRPKLPKLKYSKYLTQILQAFNNSILPQFYSEDSQLTDIHTLIYCTAVVISRELGYKIGDDYHPVRKPKRKPAWLVRLEKDITQLRADIGRLTQYINNNRSQRVVNEVNRIFRTTQVHSRHERSNNRPEEYLDTLKQKLSLKAHRLSRYKKSNKRKEDNKLFRNNEKLFYRQLYKETGHGESEDRIPEVKDLEEFWAGIWEEEVEHNSTAEWIVKEEDRWKTLEEMSFSEITETDLANITSRLHNWKSPGIDKVHNFWFKKLNVLHKIIAKNLTLIIQGKQTTPSFLTQGITYMLPKGKHSNLPSQYRPITCLPTIYKILTSAITHKINEHLESNNILAEEQKGCRRGHMGCKEQLVIDSTINRHATTNKRNLHCTYIDYRKAFDSIPHSWLLQILKIYKINPTIVNFLKNTMKMWKTSLHLKDLNTREIAIKKGIYQGDSLSPLWFCLALNPISNLLRRRGVGYNIKHDNNQTYITHLIYMDDIKLYAKSPSEMKTLIDITTMFSKDINMQFGLDKCKTVHIVKGKIQPGDYAVSDDETITAMEPNELYKYLGYHQSKGLDHTAIKQSLIEEYKKRVSALCKSQLAGKSLIKAINTYAIPILTYSFGIIKWSKTNINQIEINTRTILTKHKCLHPKSAIERLSLKREDGGRGLINVVALWVKQISSLRQFFYRKSLSSDIHKAIVKNDFNHTPLNLSTENVEIDLNNIESNRIEQWKKKVLHGRHPHDLEQPHINASASNKWLSIGTLFPETEGFMIAIQDQIINTRNYRKHIIKDSTATDDRCRKCHTHPETIQHITGACPNLAQTDYTHRHNQIANIVHQTLGNKHKLISDTATPYYNYTPKPILENDTHKMYYDRAILTDRTIHYNRPDINVRIPSRTLRVIG

SEQ ID NO: 21883 - protein, 1348 aa, Ectomis labriaris
MPREGRTLDSTSLHNPSDQRSNSTNKYAMRLRNREIPQAGTRKGESRPGPSGSGCPTYSGGGNVSHMTTQSCTVVANKSSSSSPSHISPTSSTDSLFPSPNTSPYSYQTPHSSLRSNTVSPLSCVVAQEAYATYPGPSTGVTNPIRIKQNDLNNRVGSDSISYSPNTRTENVLKDMLPANTLAGKTRQRMKWTYDINKELLRCYYIVTNNETNLTAWRTLLHKKFTDRIPELRHLSEQRLADQIRVINKNNRISALDRELIKQSINSLIYNSESPNNDITTRNTEQTHIINSTPETNECQHNINLQIQSTKCDVTYNNILITDDTDITQHTPLSDTLVKKFKEHLQSAITEYAGTDPTLRPRLPKLIQNVKLNQLVDLFNSKILRHFFSDDSQVNDIHTLIYCTALVISRELGYKIGESSRVHGTTEMKKPKWQIRIEKDIVQLRSDIGRLTQYINNNRSRKVVNRVETIFRNTKIHSVHENNNKKPEEYLDTLKQKLALKANRLARYKKALKRKTDNKLFYTNQKLFYRKLKFETNTSIQKHNDIPDVKELEQFWAGIWERNEKHNEGASWIAEEENRWSLLEEMAFEAITETDIKIITSRLNNWTSPGIDKIHNFWYKKFYVLHQIIAKNFTEIIFRRQETPQFFGQGITYMLPKGKYTTQPSEYRPITCLPTIYKILTAAITRKINAHIEKNNILSEEQKGCRQGHMGCKEQLVIDSLIHRHATSNKRNLHCTYIDYKKAFDSIPHSWLLHILKIYKINPAITNFLKNIMNLWKTRLQLNNIITREITIKKGIYQGDSLSPLWFCLALNPISHMYNKLKTGYRLEHQSNSVYISHLIYMDDIKIYSKTEKQMQHLIDTTVKFSKDINMNFGLDKCKTLHIIKGKIKPGDYSLNENEKITAMEPNELYKYLGYYQSKGLDHIKLKKSLMQEYKHRINIICKTLLAGKSLIKAINTYAVPVLTYSFGIVKWSKTDINNIEIKTRCILTKHNYLHPKSAIERMTLKRQNGGRGLININNLWKNQIASLKKFFYQKANSSDIHRAIVQNDSNYTPLHLRDNTELNREEDSEQSKLEKWKSKALHGRHPFDLEQAHVDTAATNKWLTRGSLFPETEGFMVAIQDQVINTRNYRKYIIRDPNVINDTCRKCHSQPENIQHITGACSYLAQTDYTYRHNQVANIIHQNLAHKHHLITNTYTPYYKYCPSPVLENSTHKMYFDRAILTDKTIHFNRPDITLQDKITKTTYLIDIAVPNTHNLQKTIAEKIHKYTDLKDEIARIWKQQNVYIVPIVLSTTGVIPKYLHHSLKLIGLPNSYIPAQKAVILNTCRIVRKFLGIDEELPLIDRPTGK

SEQ ID NO: 21884 - protein, 1337 aa, Autochton zarex
MCYTMPVTNGAIANIKYAMRLRNRVIPQAGTGVNRTGESSPGPSSSGCPTYSRGGNVSHMTAQTSSVAVHTSSTSQVASSPSSPTSSTYSLFQSPISSPHSFQFEQSSSRSSTTTSLSVDVAQEALATTSVPTNDNSKSTRLNINKNITKRRVDNIHNNHAPSHSSNMPARGVLKDMLPATTQAGKSRTRMKWTDDINRELLRCYYIVTQNESNLTAWRTLLHQKFSENVPELSHLSEQRLADQIRVIHRNNRIPLIERDQLKHSITSLIPSSDSHNEHRTPLTSNHTHTDSQIHTVQETSFTPNSYVYNPTETRHTSLLMAADNEMATILPEDTSLKIIEDLHTALTEYTGTDPTLRPQLPKLKYSHKLNQIINAFNNNILINFFSDDSQLIDIHTLIYCSALVISRELGYKIDDTTRPKRNNQLRKPHWQIRLERDIVLLRSDIGRLTQYINNNRSRKVIDRVQIIFRNTKVHSTYENNNRKPEEYLDTLKQKLALKSKRLARYKKALKRKIDNRVFTTNERLFYRQLTLNKDVTEPSQAIPNVKDLEQFWAEIWEVEEKHNENAVWIAEEEKRCEVMEEMQFENISEIEMKVITGRLNNWKSPGIDRIHNFWYKKFHCLHKIIAKNFTQIILGQQNMPHFIAQGISYMLPKTKHTTQPSQYRPITCLTTIYKILTSILTHKINTHIENNRIIAEEQKGCRRGHMGCKEQLVIDSVIHRHATTHKRNLHCTYIDYRKAFDSIPHSWLLRTLEIYKVSPIIVEFLKNIMKLWKTKLQLGNISTREISIKTGIYQGDSLSPLWFCLALNPISHMLNKNNVGYCLENQNNSTIVSHLIYMDDIKLYSKTEKEMQTLIDTTVGFSNDINMKFGLDKCKTMHIIKGKIKPGDYTIDEKEKITAMEPNEIYKYLGYYQSKGLDHIRLKKSLTQMYKQRVNVICKSLLTSKSLIKAINTYAIPILTYSFGIIKWTKTDINNIEIGTRTALTKYNYLHPKSAVERMTIKRQSGGRGLISIATLWKNQIVNLRSFFYNKSNDSDIHKAITQYDNNYTPLNLANENQIHTNSNTEKHITEQWKGKVLHGRHPFDLEQPHVDTAASNKWLTKGSLFPETEGFMVAIQDQVINTRNYRKHIIKDHKLTDDRCRRCHIHSETIQHITGACPNLAQTDYTHRHNQIANIIHQNLALKHRLIQNTYTPYYNYHPNPVLENNTHKMYFDRAILTDKTIHYNRPDITLQDKKNKTTYLIDIAVPNTHNLQTTIAQKIHKYTDLKDEITRIWKQDKVYIVPIVLSTTGVIPKYLHHSLKLIGLPYSYITAQKAAILNTCRIVRKFLQIDEDNS

SEQ ID NO: 21885 - protein, 1336 aa, Autochton longipennis
MPVTNGAIANIKYAMRLRNRVIPQAGTGANRTGESSPGPSRSGCPTYSGGGNVSHMTAQTSSVVVHTSSPSQVISGASSPTSSTYSLFQSPISSPRSFQFDQSSSRSSTTTPLSVDVAQKALATTSVPTNDNSTSTRLNKNKNIKKRRVDNKNNNHDPSHSSNMPTRGVLKDMLPATTQAGKSRTRMKWTDDINRELLRCYYIVTQNESNLTAWRTLLHQKFTENVPELNHLSEQRLADQIRVIHRNNRIPLTEREQLKHSVLSLIPSSDSLVEHRTSGTSDHTHIDSQMHTLKETLFTPNSYLCTPTETRQTNILMTTDNEMLQPTILPKDINLKLIEDLNTALTEYTGTDPTLRPQLPKLKYNNKLNQIINAFNNNILRIYFSDDSQLIDIHTLIYCSALVISRELGYKIDDTIRPKRNNQLTKPSWQIRLERDIILLRSDIGRLTQYINNNRSRKIIDRVQIIFRNTKVHSTYDNNNRKPEEYLDTLKQKLALKSKRLARYKKALKRKSDNRLFKTNERLFYRQLTLDNDVTENSQAIPNVKELEQFWAEVWEVEEEHNEEAVWIAEEEKRCEVLEEMQFENITEIEMKVITGRLNNWKSPGIDRIHNFWYKKFHCLHKIIAKNLTQIILGQQNTPHFIAQGISYMLPKSKHTTQPSQYRPITCLTTIYKILTSILTNKINTHIENNRVIAEEQKGCRRGHMGCKEQLVIDSAIHRHATTHKRNLHCTYVDYKKAFDSIPHSWLLRTLEIYKISPIIIEFLKNTMKLWKTKLQLGNISSREITIKTGIYQGDSLSPLWFCMALNPISHMLNKHKIGYCFENQNNSTILSHLIYMDDIKLYSKTEKEMQTLIDTTVGFSKDINMKFGLNKCKTIHIIKGTIKPGDYAIDEKEKITAMEPNEIYKYLGYYQSKGLDHIRLKKSLTQLYKQRVNVICRSLLTSKSLIKAINTYAIPILTYSFGIIKWTKTDINNIEIGTRTALTKYNYLHPKSAVERMTLKRESGGRGLISIATLWKKQIQNLRSFFYNKSNDSDIHKTITQFDNNYTPLNLANKNEIHTNSNTDKQMTEQWKGKVLHGRHPFDLEQPHIDTAASNKWLSKGSLFPETEGFMVAIQDQVINTRNYRKHIIKDPKLTDDRCRRCHIHSETIQHITGACPSLAQTDYTHRHNQIANIIHQNLALKHRLIVNTYTPYYNYHPNSVLENNTHKMYFDRAILTDKTIHYNRPDITLQDKKNKTTYLIDIAVPNTHNLQTTIAQKIHKYSDLKDEITRIWKQDKVYIVPIVLSTTGVIPKYLHHSLKLIDLPYSYITAQKAAILNTCRIVRKFLQIDEDNKD

SEQ ID NO: 21886 - protein, 1166 aa, Cycloglypha thrasibulus
MLPATTLAGKSRKRMKWSDDINRELLRCYYIVTHNEANLTAWRPLLHRKFTENIPELGHLSEQRLADQIRVIHKNNRIMPTERDRLKQSVVSLISTSDNHDEHTTSLTNDHMNTDTLIENTPISMTKHSFTPTEISHELVSNNIDMLQSTTLMDDTTSKLKEDLYTALAEYTGTDPTLRPQLPKLKYSNKLNRIIKIFNDNILNDFFSDDSRLVDIHTLIYCSALVISREVGYKIEETYGPRRHSEQKKPTWQIRLEKDITLLRSDIGKLTQFINNNRSKKVVNRVEIIFKNTKIHSSHENNNKKPEEYLDTLKQKLALKSKRLSRYKKSLKRKTDNRLFTTNEKLFYRKLISDEDTTSNAKQIPNEKDLEEFWAGIWEVEENHNENAAWIAEEENRWETMEEMQFQNITETEMKVITGRLNNWKSPGIDRIHNFWYKKLHGLHKILAKNLTQIISGQQNTPHFIAQGISYMLPKSKHTSQPSQYRPITCLTTIYKILTSVLSHRINTHIEKNKIIAEEQKGCRRGHMGCKEQLIIDSLIHRHAATHKRNLHCTYIDYKKAFDSIPHSWLLHILKIYKISPVIIEFLKNTIKLWKTKLQLDHISTREITIKKGIYQGDSLSPLWFCLALNPISYMLNKNKVGYHLGHQNKTTCMSHLIYMDDIKLYSKTEKEMQTLIDTTVGFSKDINMSFGFDKCKTIHIVKGKIKAGDYIIDEQEKIAAMEPREVYKYLGYYQSKSLDHIRLKKSLMQVYKHRVNLICRSLLTSKNLIKAINTYAIPILTYSFGIIKWTKTDINHIEISTRTSFTKYNYLHPKSAVERMTIKRDSGGRGLINIHTLWRNQILNLRSFFYKKTNDSDIHKAIVQNDYNYTPLNLRVENESHTNHHSEKEKTEQWKAKVLHGRHPYDLEQPHVDTAASNKWLTKGSLFPETEGFMMAIQDQVVNTKNYRKHIIKDPTLTDDRCRKCHIHSENIQHITGACPNLAQTDYTHRHNQIVNIIHQSLAIKHHLIQNTYTPYYNYHPSPVLENKTHKMYFDRAILTDKTIHYNRPDITLQDKKNKTTFLIDIAVPNTHNLQITIAEKIHKYTDLKDEVTRIWKQEKVYIVPIVLSTTGVIPKCLHHSLNLIDLPFSYITAQKAAILNTCRIVRKFLQIDEDKGLTNGQTNF

SEQ ID NO: 21887 - protein, 1323 aa, Mylon lassia
MRLRNRVIPQAGTSLPSEEESGPGPSSSGCPTYSGGGNVSHMIAQTSSVAVHTTPSSHITLDSSSPTSSTYSLFQSPSSSPHSFQFQQSSSPSSTTTLLSVDVAQEAHAFTPMPTNDNTNFTRLNTNKNGIESHVNNTQTNIVPLNSSNTPVRGVLKNMLPATTQAGKSRKRMKWTDDINRELLRCYYIVTHNESNLTAWRPLLHHKFTEYIPELSHLSEQRLADQIRVIHKNNRIPPQERDCLKNTVISLLPSSDSQYELTIPFSHGNRNTDSQIHTIHKTSLTSNLHVLSPTETSNATIAVTNEIEILQMTKLTEDTISKMIEDLHTALAEYTGTDPTLRPQLPKLRYSYKLDNMIDIFNKNILSKFFSDESQLTDIHTLIYCSALVMSRELGYKIGDNTKPQRNKEIKKPYWQIRLEKDIILLRSDIGRLTQYINNNRSKKVVNRVEIIFRNTKVHSSHENNNRKPEEYLDTLKQKLALKSKRLARYKKALKRKTDNKLFTTNEKLFYRRLMIDKGSKECNQKKEIPNVKDLEQFWAKIWEVEEKHNEDAAWIKEEQNRWDALGEMQFDDISEIEMKVITGRLNNWKSPGIDRIHNFWYKKLHCLHKIIAKNLTQIIRGQQNTPHFIAQGITYMLPKTQHTTHPSQYRPITCLTTIYKILTSILTHKINVHLENNRIIAEEQKGCRRGHMGCKEQLIIDSLIHRHATSHKQNLHCTYIDYQKAFDSIPHSWLLRSLEIYKISPVIVKFLKNTMKLWKTKLQLDHIFTRELNINTGIFQGDSLSPLWFCLALNPISYMLNKNKIGYCLDSQDNSTCISHLVYMDDIKLYSKTEKEMQTLIETTVGFSNDINMKFGVDKCKTIHIIKGKIKPGDYIIDEQEKITAMEPNEVYKYLGYYQSKGLDHIKLKKSLMQVYKQRVNIICKSLLSSKSLIKAINTYAIPILTYSFGIIKWTKTDIKNIEISTRTTLTKHNYLHPKSAIERTTIKRQNGGRGLITIDTLWKNQIVNLRSFFYKKANNSNIHKAVTQNDNNYTPLNLLDDNEVHAYSSTEKEKTVQWKAKVLHGRHPFDLEQPHVDTAASNKWLSKGSLFPETEGFMVAIQDQVINTRNYRKHIIKDPTLTDDRCRKCHIHSENIQHITGACPNLAQTDYTHRHNQIANIIHQNLALKHQLIQSTYTPYYSYRPSPILENNTHKMYYDRAILTDKTIHYNRPDITLQDKKNKTTYLIDIAVPNTHNLQTTIAEKIHKYTDLKDEITRMWKQKKVYIVPIVLSTTGVIPKYLHHSLKLIDLPSSYITAQKAAILNTCRIVRKFLQIDEDSS

SEQ ID NO: 21888 - protein, 1269 aa, Chrysoteuchia culmella
MHTFETYAANKVKVTHFKMELRSKSKRIESLPGGDRRGTPGAGAGCYSMRSIGGRRLNRRVPTDKITTAETQQTPNNLTQSQTQESTYSFTDRTIPSSQSLTDSSSQPQSNSVTPTERVAQEANAFLPASTKAGKPRIRMKWTNDVNVFIMRTYYRITKLETDLTTYRPLLHQHFTRQYPGIHVSEQRVSDQRRTIVRNKMIPDNVLDQIKQEIRAEQEQGDLTQPPQELQELHSHRSSHTDNHSRYTLPTLEVQPQILQNTQLTFTLNSNVSTQTENLTTLIENEIESLQTESLSDITAQKLVKHLQTALIEYSGMDPTSRPKLPKLKYSQRLTQLVHLFNCNILKQFFSEGSQLVDIHTVIYCTALVISRELGYKIGESNLPYHNKNNKPAWQIRLEKDIAQLRVDIGRLTQYNKNNRTNKIVNTAKKIFQNTKVHSSHENNNKRPEEYLDTLKQKLALKAHRLARYKKTLKRKEDNKLFTINQKAFYRKLSTDKDNNLTTTANNTPEEKELKDFWATIWESKMDHNREAAWIAEEKQTWEHLVEMKFDEVSETDITQVTAKLHNWKSPGVDRIHNFWYKKLNILHKILAYNMTQIIRGTQNIPQFLTKGITYMLPKGKYTIQPSQYRPITCLPTLYKILTSTIAQKITSHITDNNILAEEQKGCRRGHMGCKEQLVIDSVIHRHATKHKRNLHCTYIDYQKAFDSIPHSWLVQILQIYKINPIITEFLEKLMNLWKTKLHLNKMITSEIAINRGIYQGDSLSPLWFCLALNPISQMLRSRGAGYRLKHVNSETIISHLVYMDDIKLYAKTDKEMKTLIETTAQFSQDINMQFGLEKCRTIHIIKGKIRPGDYIVRDQDRISAMEPNEVYKYLGYHQSNGLDHSKIKASLIKAYKNRLNALCKTQLSGKSLIKAINTYAIPILTYSFGIIKWSKTDINNIEINTRSILTKNSYHHPKSAIERITLKRKDGGRGLISITTLWETQIANLHTFFKQKSTNSLIHKAIVKSDHNYTPLNLSENINSHPTAAESEKAKMEQWKKKVLHGRHPHDLVQPHIDPLASNKWLTAGSLFPETEGFMIAIQDQVINTRNYRKHIIKDPTITDDRCRKCHTQPENIQHITGACPNLAQTDYTHRHNQLANIIHQRLALKHGLIPDTHTPYYKYSPKPILENYSYKMYFDRTILTDRTIHYNRPDITLQDKYNKTTYLIDIAVPNTHNLQNTIAEKIHKYTDLKDEISRIWKQDKVFIIPIVLSTTGIIPQYLSSIRV

SEQ ID NO: 21889 - protein, 1375 aa, Chrysoteuchia culmella
MFDILEWLGNILHIIINKLLLINNNNNNNNNNNNNNNNNNNNNNNNNNNNSPLKSYLTSEPNTWFTWGADMHTFETYAANKVKVTHFKMELRSKSKRIESLPGGDRRGTPGAGAGCYSMRSIGGRRLNRRVPTDKITTAETQQTPNNLTQSQTQESTYSFTDRTNPSSQSLTDSSSQPQSNSVTPTERVAQEANAFLPASTKAGKPRIRMKWTNDVNVFIMRTYYRITKLETDLTTYRPLLHQHFTRQYPGIHVSEQRVSDQRRTIVRNKMIPDNVLDQIKQEIRAEQEQGDLTQPPQELQELHSHRSSHTDNHSRYTLPTLEVQPQILQNTQLTFTLNSNVSTQTENLTTLIENEIESLQTESLSDITAQKLVKHLQTALIEYSGMDPTSRPKLPKLKYSQRLTQLVHLFNCNILKQFFSEGSQLVDIHTVIYCTALVISRELGYKIGESNLPYHNKNNKPAWQIRLEKDIAQLRVDIGRLTQYIKNNRTNKIVNTAKKIFQNTKVHSSHENNNKRPEEYLDTLKQKLALKAHRLARYKKTLKRKEDNKLFTINQKAFYRKLSTDKDNNLTTTANNTPEEKELKDFWATIWESKMDHNREAAWIAEEKQTWEHLVEMKFDEVSETDITQVTAKLHNWKSPGVDRIHNFWYKKLNILHKILAHNMTQIIRGTQNIPQFLTKGITYMLPKGKYTIQPSQYRPITCLPTLYKILTSTIAQKITSHITDNNILAEEQKGCRRGHMGCKEQLVIDSVIHRHATKHKRNLHCTYIDYQKAFDSIPHSWLVQILQIYKINPIITEFLEKLMNLWKTKLHLNKMITSEIAINRGIYQGDSLSPLWFCLALNPISQMLRSRGAGYRLKHVNSETIISHLVYMDDIKLYAKTDKEMKTLIETTAQFSQDINMQFGLEKCRTIHIIKGKIRPGDYIVRDQDRISAMEPNEVYKYLGYHQSNGLDHSKIKASLIKAYKNRLNALCKTQLTGKSLIKAINTYAIPILTYSFGIIKWSKTDINNIEINTRSILTKNSYHHPKSAIERITLKRKDGGRGLINITTLWEKQIANLHTFFKQKSTNSLIHKAIVKSDQNYTPLNLSENINSHHTAAESEKAKMEQWKKKVLHGRHPHDLVQPHIDPLASNKWLTAGSLFPETEGFMIAIQDQVINTRNYRKHIIKDPTITDDRCRKCHTQPENIQHITGACPNLAQTDYTHRHNQLANIIHQRLALKHGLIPDTHTPYYKYSPKPILENYSYKMYFDRTILTDRTIHYNRPDITLQDKYNKTTYLIDIAVPNTHNLQNTIAEKIHKYTDLKDEISRIWKQDKVFIIPIVLSTTGIIPQYLHKSLKNLDLKPSTYIQLQKAAILNTCRIVRKFLQLDDHTQT

SEQ ID NO: 21890 - protein, 1305 aa, Chrysoteuchia culmella
MHTFETYAANKVKVTHFKMELRSKNKRIESLPGGDRRGTPGAGAGCYSMRSIGGRRLNRRVPTDKITTAETQQTPNNLTQSQTQESTYSFTDRTIPSSQSLTDSSSQPQSNSVTPTERVAQEANAFLPASTKAGKPRIRMKWTNDVNVFIMRTYYRITKLETDLTTYRPLLHQHFTRQYPGIHVSEQRVSDQRRTIVRNKMIPDNVLDQIKQEIRAEQEQGDLTQPPQELQELHSHRSSHTDNHSRYTLPTLEVQPQILQNTQLTFTLNSNVSTQTENLTTLIENEIESLQTESLSDITAQKLVKHLQTALIEYSGMDPTSRPKLPKLKYSQRLTQLVHLFNCNILKQFFSEGSQLVDIHTVIYCTALVISRELGYKIGESNLPYHNKNNKPAWQIRLEKDIAQLRVDIGRLTQYIKNNRTNKIVNTAKKIFQNTKVHSSHENNNKRPEEYLDTLKQKLALKAHRLARYKKTLKRKEDNKLFTINQKAFYRKLSTDKDNNLRTTANNTPEEKELIDFWATIWESKMDHNREAAWIAEEKQTWEHLVEMKFDEVSETDITQVTAKLHNWKSPGVDRIHNFWYKKLNILHKILAHNMTQIIRGTQNIPQFLTKGITYMLPKGKYTIQPSQYRPITCLPTLYKILTSTIAQKITSHITDNNILAEEQKGCRRGHMGCKEHLVIDSVIHRHATKHKRNLHCTYIDYQKAFDSIPHSWLVQILQIYKINPIITEFLEKLMNLWKTKLHLNKMITSEIAINRGIYQGDSLSPLWFCLALNPISQILRSRGAGYRLKHVNSETIISHLVYMDDIKLYAKTDKEMKTLIETTAQFSQDINMQFGLEKCRTIHIIKGKIRPGDYIVRDQDRISAMEPNEVYKYLGYHQSNGLDHSKIKASLIKAYKNRLNALCKTQLTGKSLIKAINTYAIPILTYSFGIIKWSKTDINNIEINTRSILTKNSYHHPKSAIERITLKRKDGGRGLINITTLWEKQIANLHTFFKQKSTNSLIHKAIVKSDQNYTPLNLSENINSHPTAAESEKAKMEQWKKKVLHGRHPHDLVQPHIDPLASNKWLTAGSLFPETEGFMIAIQDQVINTRNYRKHIIKDPTITDDRCRKCHTQPENIQHITGACPNLAQTDYTHRHNQLANIIHQRLALKHGLIPDTHTPYYKYSPKPILENYSYKMYFDRTILTDRTIHYNRPDITLQDKYNKTTYLIDIAVPNTHNLQNTIAEKIHKYTDLKDEISRIWKQDKVFIIPIVLSTTGIIPQYLHKSLKNLDLKPSTYIQLQKAAILNTCRIVRKFLQLDDHTQT

SEQ ID NO: 21891 - protein, 1315 aa, Eurybia lycisca
MQYWHGQHGKGNPFIMETRSKYRKRIGPLPGGDRRGTPGADAGCYSGRTVGGDELNRRALTGSPENATAKQHYTQISPSSTSSTTSREPYSSSTMSYTPTTTPTFTDEDSNSSVIPTYVVAQEASQTFLPASTKAGKPRVRMKWLPEVNLFIMRTYYYITKLETDLTTYRTLLHQKFIEQYPGVHVTEQRVADQRRTIIRNKLLSIDTLNGLKEEVKLLLDEQIRNESTEINTIIIHDQDYLQSNNTTTTHREIPTQITCTTTQRHSQLHSQSQINMSMTNTSSQTDNNYPLIENDIETLNLITTNDDEKTKQLDHKLQVALLQYAGLDPTKRPRLPKLKYQFNLQKLINIFNNKILNQYISDNAKLTDVHTLIYCTAFVITEELGYKIVIEHNEIHRQNKETKPAWQIRLEKDIQKLRSDIGKLTQYIFHNNRSQKVVDRVIAIFRNITLHTRHEMDNKRPEEFLDTLKQKLALKTSRLKRYKKSQQRKEDNKLFTSNEKLFYRNLNKNSEDISKTPTNTPGVEELEAFWSNIWETETTHNTQADWIAEETTRWESLEEMTFEEITEEDIKHITYKLHNWKSAGIDKIHNFWYKKLQVLHNLLAKNLTEIILQKQNTPEFITKGLTYMLPKGEYTSQPKQYRPITCLPTIYKILTSALTHKIRTHIERHNIMAEEQKGCRRGHMGCKEQLIIDSVIHKNAYSKKRNLHCTYIDYQKAFDSIPHSWLIKVLKIYKINSSIINFLKTIMPLWKTTLHLNGSPAPIITREILIKKGIFQGDSLSPLWFCLAMNPLSQLLNNCLAGYHLKHNNSTTIISHLIYMDDIKLYSKTDKEMKKLIEEVTKFSNDINMHFGLDKCKTLHIVKGKIKAGDYIINETQNQVIAAMEPDELYKYLGYHQLKGLDHRNARDKLITEYKRRLINICKTRLTGKNLIKAINSYGIPVLTYSFGIIKWSKTNIYFIERMTRKILTKFNYHHPKAAMERLVIKRQDGGRGLINIHKLWIKQINNLHNFFQIKSNISNIHRAIVNNDHDYTPLNLSRISLSVIDNIENEDTAKELWKKKVLHGRHSHDLDQLHIDKSASNKWLKIGILFPEIEGFIIAIQDQLINTRNYKKYIIKDSNLTVNKCRKCHISSETIQHITGACPNLAQTDYTHRHNQIVNIIHKNIAIKLKLIQETHTPYYKYTPNPIIENSTHKLYYDRAILTDKTIHFNRPDITLQDKINKITYLIDISVPNTHNITKTIAEKIQKYTELKDEVVRIWKQNKVLIIPIVLSTTGVIPHHLHQSSKQLNLNQHLYTTILYYSESCYSEHMSHS

SEQ ID NO: 21892 - protein, 1343 aa, Spodoptera frugiperda
METRSKSKRIGPLPGGDRRGTPGADAGCGSGRTVGGAELSRRAPTGSPENVTANTLHPSSPSSSIIEPFSPSTTSYAPSSSPLPTDEETREPEIPTFAVAQAVTQTFLPASTKAGKPRVRMRWSPEVNTFIMRTYYYITKLETDLTTYRTLLHQKFIQQYPEINVTEQRIADQRRVIVRNKLLSTEILNQIQEEVKVKLQEEENNIPSLSQNIIHNPTNSQSYNPLIHHHSTIPFSPQSLSHTQHRSQENDTYFSQILLTQHSTSDMSTQTDNTTLLVENEIECLTVENRSENPTVSNLDEKLRSAILLYSGMDPSARPKLPKLKYSKHLLKLVSIFNNNLLEQHLTNDSKLNDIHTQIYCTALVISQELGYKIHNNDRPIQIPRNNRPAWQIRLERQINKLRSDIGKLTQYITNNNRSDKVVNRVTAIFKNATLHTRHEANNKTPQEFLDTLKQKLALKTNRYKRYKTALQRKQDNNLFSNNEKMFYRKLNATPDNNTTLHSTTNEVPSKEELENFWSSIWETQITHNTEAQWIEDEKKRWETIEEMEFHEITKEDITNITDRLHNWKSPGVDKIHNFWYKKLLIFHKYLAKNFTEVLLGQQQPPEFLTKGITYMLPKNQHTSQPSQYRPITCLPTIYKILTSVITHKIRSHVETHNIIAEEQKGCRRGHMGCKEQLIIDSVIHKHTATKKRNLHCTFIDYKKAFDSIPHSWLINILEVYKINSNIIDFLKNVMPLWKTTLLLNNHHSTIVSREISIRKGIYQGDSLSPLWFCLALNPLSQLLNNQRAGFQLRHDNIQTTISHLIYMDDIKLYAKTDKEMDKLIKVTTDFSKDINMQFGLDKCRTIHIIKGKIRAGDYVIENSGDENQIIKAMEPNEMYKYLGYEQAKGLDHKDIKNKLTLEYKRRLNRICKSRLTGKNLIKAINTYAIPVLTYSFGIIKWSQSNINSIERATRTTLTKYNHHHPKSAIERLNIKRQNGGRGLIYITNLWKKQINSLHKFFKQKSLTSNIHKAIVTNDNSYTPLNLQQTYEENILTPNQQETVLKEAWQKKALHGRHYNDLEQTPIDKEASNKWLKLGTLFPETEGFIIAIQDQIINTRNYRKFIIKDPTLTNDKCRKCHIHSETIQHITGACPHLTQTDYTHRHNQVANIIHQSLAIQHNLIADTHTPYYKYTPSTILENSTHKMYYDRAILTDRTIHYNRPDITLQDKINKTTYLIDIAVPNTHNLTKTITEKVHKYADLKDEVTRIWRQDKVYIVPIVLSTTGVIPKHLFHSLKLLNIKDTTYIKLQKAAILNTCRIVRKFMQIDENEISAPPPPPPPPLPQTTEPIDNHRPPTATETE

SEQ ID NO: 21893 - protein, 915 aa, Spodoptera frugiperda
MDRVTAIFRNTTLHTRHEANNGTPEEFLDTLKQKLALKSNRYKRYNKALQRKQDNNIFVNNEKMFYRKLNSRINSNNNDTTNNQTINETPSKEDLENFWANIWETQATHNTEAYWIADEREKWERVEEMEFSEITTEDVTIITNRLHNWKSPGVDKIHNFWYKKLHTLHKYLAKNLTELILQQQETPEFLAKGLTFMLPKSQHTSQPSQYRPITCLPTIYKILTSVIAHKIRTHVEINNIIAEEQKGCRRGHMGCKEQLIIDSVIHKHSATKKRNLHCTYIDYKKAFDSVPHTWLIDVLEIYKINRDLINFLKTLMLCWKTTLQLNNFPNTITTREISIRKGIYQGDSLSPLWFCLALNPLSQLLNNQRAGFQLKHNSTETIISHLIYMDDIKLYAKTDKEMDKLIKTTSEFSKDINMQFGLDKCRTVHIVKGKIRAGDYVVEDSGNGDQVIKAMEPNDIYKYLGYEQTAGLDHKNIKIKLISEYKRRLSNICKSRLTGKHLIKAINTYAIPVLTYSFGIIKWSKSNIYSIERTTRTILTKHNHHHPKSAIERLNIKRQNGGRGLVYITNLWQKQLRSLQNFFKQKSLTSRIHKAIVENDNSYTPLNLHQPCTENVPTNSDQETDLREAWRKKVLHGRHYNDLEQPLIDKEASNKWLKLGTLFPETEGFIIAIQDQIINTRNYRKYIIKDPAATNDKCRKCHIHSETIQHITGACPHLTQTDYTHRHNQVANIIHQSLAIQHNLIADTHTPYYKYTPSTILENSTHKMYYDRAILTDRTIHYNRPDITLQDKVNKITYLIDIAVPNTHNITKTISEKVHKYTELKDEITRIWRQDKVYIVPIVLSTTGVIPKHLHHSLKLLNIKDTTYIKLQKAAILNTCRIVRKFMQIDENDISPPSAPPPPPPLQTIELPDQL

SEQ ID NO: 21894 - protein, 1393 aa, Spodoptera frugiperda
MPPKSNHTSESTIRFTWGADTRLINYWRGQHGNGNPSKMETRSKSKRIGPLPGGDRRGTPGADAGCGSGRTVGGAELSRRAPTGSPENATANTLHSSSPSSSIIEPFSPSTTSYTPSLSPLPTDEESREVENPTFAVAQAVPETFLPASTKAGKPRVRMRWSPEVNTFIMRTYYYITKLETDLTTYRTLLHQKFTQQYPGINVTEQRVADQRRVIVRNKLLSTETLNKLQEEVRIKLQEEDSITHNTPSHSQNFIHNATNLQSHNPLIHDHATMPTEHRSLSRTQQESHAIDTYVSHTLPTQHTISYISHTLSTQHSTSDMSTQTNNTTLIIENEIETLAVESVDENSMVSNLNEKLRSAILQYSGMDPSVRPKLPKLKYSKQLFKLVYIFNTSLLESHVTNDSKLNDIHTLIYCTALVISQELGYKIHDNDRPTQYQQHNKPSWQIRLERQINKLRSDIGKLTQYIIFINNNRSKKVMDRVTAIFRNTTLHTRHEASNRTPEEFLDTLKQKLALKSNRYKRYNKALQRKQDNNIFVNNEKMFYRKLNSRINSNNNDTTNNQTINETPSKEDLENFWANIWETQATHNTEAYWIADEREKWERVEEMEFSEITTEDVTMITNRLHNWKSPGVDKIHNFWYKKLHTLHKYLAKNLTELILQQQETPEFLAKGLTFMLPKSQHTSQPSQYRPITCLPTIYKILTSVIAHKIRTHVEINNIIAEEQKGCRRGHMGCKEQLIIDSVIHKHSATKKRNLHCTYIDYKKAFDSVPHTWLIDILEIYKINRDLINFLKTLMLSWKTTLHLNNFPNTITTREISIRKGIYQGDSLSPLWFCLALNPLSQLLNNQRAGFQLKHNSTETIISHLIYMDDIKLYAKTDKEMDKLIKTTSEFSKDINMQFGLDKCRTVHIVKGKIRAGDYVVEDSGNGDQVIKAMEPNDLYKYLGYEQTAGLDHKNIKIKLISEYKRRLSNICKSRLTGKHLIKAINTYAIPVLTYSFGIIKWSKSNIYSIERTTRTILTKHNHHHPKSAIERLNIKRQNGGRGLVYITNLWQKQLRSLQNFFKQKSLTSRIHKAIVENDNSYTPLNLHQPCTENVPTNNDQETNLREAWRKKVLHGRHYNDLEQPLIDKEASNKWLKLGTLFPETEGFIIAIQDQIINTRNYRKYIIKDPAATNDKCRKCHIHSETIQHITGACPHLTQTDYTHRHNQVANIIHQSLAIQHNLIPDTHTPYYKYTPSTILENSTHKMYYDRAILTDRTIHFNRPDITLQDKVNKITYLIDIAVPNTHNITKTISEKVHKYTELKDEITRIWRQDKVYIVPIVLSTTGVIPKHLHHSLKLLNIKDTTYIKLQKAAILNTCRIVRKFMQIDENDISPPSAPPPPPPLQTIELPDQL

SEQ ID NO: 21895 - protein, 1407 aa, Spodoptera frugiperda
MIPEYVKICMSSVEALTLNKNNNNNKPPKIQPYVRIDHQIHVGGGHAIHKLLARPTWQWKPIINMETRSKSKRIGPLPGGDRRGTPGADAGCGSGRTVGGAELSRRAPTGSPENVTANTLHPSSPSSSIIEPFSPSTTSYAPSSSPLPTDEETREPEIPTFAVAQAVTQTFLPASTKAGKPRVRMRWSPEVNTFIMRTYYYITKLETDLTTYRTLLHQKFIQQYPEINVTEQRIADQRRVIVRNKLLSTEILNQIQEEVKVKLQEEENNIPSLSQNIIHNPTNSQSYNPLIHHHSTIPFSPQSLSHTQHRSQENDTYFSQILLTQHSTSDMSTQTDNTTLLVENEIECLTVENRSENPTVSNLDEKLRSAILLYSGMDPSARPKLPKLKYSKHLLKLVSIFNNNLLEQHLTNDSKLNDIHTLIYCTALVISQELGYKIHNNDRPIQIPRNNRPAWQIRLERQINKLRSDIGKLTQYITNNNRSVKVVNRVTAIFKNTTLHTRHEANNKTPQEFLDTLKQKLALKTNRYKRYKTALQRKQDNNIFSNNEKMFYRKLNATPDNNTTLHSTTNEVPSKEELENFWSSIWETQITHNTEAQWIEDEKKRWETIEEMEFHEITKEDITNITDRLHNWKSPGVDKIHNFWYKKLLIFHKYLAKNFTEVLLGQQQPPEFLTKGITYMLPKNQHTSQPSQYRPITCLPTIYKILTSVITHKIRSHVETHNIIAEEQKGCRRGHMGCKEQLIIDSVIHKHTATKKRNLHCTFIDYKKAFDSIPHSWLINILEVYKINNSIIDFLKNVMPLWKTTLLLNNHHSTIVSREISIRKGIYQGDSLSPLWFCLALNPLSQLLNNQRAGFQLRHDNIQTTISHLIYMDDIKLYAKTDKEMDKLIKVTTDFSKDINMQFGLDKCRTIHIIKGKIRAGDYVIENSGDENQIIKAMEPNEMYKYLGYEQSKGLDHKDIKNKLTLEYKRRLNRICKSRLTGKNLIKAINTYAIPVLTYSFGIIKWSQSNINSIERATRTTLTKYNHHHPKSAIERLNIKRQNGGRGLIYITNLWKKQINSLHKFFKQKSLTSNIHKAIVTNDNSYTPLNLQQTYEENILTPNQQETVLKEAWQKKALHGRHYNDLEQTPIDKEASNKWLKLGTLFPETEGFIIAIQDQIINTRNYRKFIIKDPTLTNDKCRKCHIHSETIQHITGACPHLTQTDYTHRHNQVANIIHQSLAIQHNLIADTHTPYYKYTPTTILENSTHKIYYDRAILTDRTIHYNRPDITLQDKINKTTYLIDIAVPNTHNLTKTITEKVHKYADLKDEVTRIWRQDKVYIVPIVLSTTGVIPKHLFHNLKLLNIKDTTYIKLQKAAILNTCRIVRKFMQIDENEISAPPPPPPPPLPQTTEPIDNHRPPTATETE

SEQ ID NO: 21896 - protein, 1351 aa, Spodoptera frugiperda
METRSKSKRIGPLPGGDRRGTPGADAGCGSGRTVGGAELSRRAPTGSPENATANTLHSSSPSSSIIEPFSSSTTSYAPSLSPLPTDEESREAENPTFAVAQAVPETFLPASTKAGKPRVRMRWSTEVNTFIMRTYYYITKLETDLTTYRTLLHQKFTQQYPGINVSEQRVADQRRVIVRNKLLSTETLNKLQEEVRIKLQEEDNIAHNTPSHSQNFIHNATNLHSHIPPIYDHATMPTEHRSVSRTQHQSHATDTYVSHTLPTQHTISYISHTLSTQHSTSDMSTQTVNTTLIIENEIETLAVENVDENSMVTNLNEKLRSAILQYSGMDPSVRPRLPKLKYSKQLFKLVYIFNTSLLESHVTNDSKLNDVHTLIYCTALVISQELGYKIHDNDRPIQYQKHNKPSWQIRLERQINKLRSDIGKLTQYIINNNRSKKVMDRVTAIFKNTTLHTRHEANNRTPEEFLDTLKQKLALKSNRYKRYNKALQRKQDNNIFVNNEKMFYRKLNSRINSNDTTNDQTINETPNKEELESFWANIWETQATHNTEAYWIADEREKFDRVEEMEFSEITTEDVTMITNRLHNWKSPGVDKIHNFWYKKLHTLHKYLAKNLTELILQQQETPEFLAKGLTFMLPKGQHTSQPSQYRPITCLPTIYKILTSVIAHKIRTHVEINNIIAEEQKGCRRGHMGCKEQLIIDSVIHKHSSTKKRNLHCTYIDYKKAFDSVPHTWLINILEIYKINRDLINFLKTLMLSWKTTLQLNNFRNTITTREISIRKGIYQGDSLSPLWFCLALNPLSQLLNSQRAGFQLKHNNTETIISHLIYMDDIKLYAKTDKEMDKLIKITSEFSKDINMQFGLDKCRTVHIVKGKIRAGDYVVEDSGNGDQIIKAMEPNDMYKYLGYEQTTGLDHKNIKIKLISEYKRRLNNICKSRLTGKHLIKAINTYAIPVLTYSFGVIKWSKSNIYSIERSTRTILTKHNHHHPKSAIERLNIKRQNGGRGLVYITNLWQNQLRSLQNFFKQKSLTSRIHKAIVENDNSYTPINLHQPCTENVPTNSDQETNLREAWRKKVLHGRHNNDLEQPLIDKEASNKWLKLGTLFPETEGFIIAIQDQIINTRNYRKYIIKDPTATNDKCRKCHIHSETIQHITGACPHLTQTDYTHRHNQVANIIHQSLAIQHNLIPDTHTPYYKYTPSTILENSTHKMYYDRAILTDRTIHYNRPDITLQDKINKTTYLIDIAVPNTHNITKTISEKVHKYTELKDEITRIWRQDKVYIVPIVLSTTGVIPKHLHHSLKLLNIKDTTYIKLQKAAILNTCRIVRKFMQIDENDISPPSAPLPPPPLQTIELLDQL

SEQ ID NO: 21897 - protein, 1338 aa, Spodoptera frugiperda
METRSKSKRIGPLPGGDRRGTPGADAGCGSGRTVGGAELSRRAPTGSPENVTANTLHPSSPSSSIIEPFSPSTTSYAPSLSPLLTDEETREPEIPTFAVAQAVTQTFLPASTKAGKPRVRMRWSPEVNTFIMRTYYYITKLETDLTTYRTLLHQKFIQQYPEINVTEQRIADQRRVIVRNKLLSTEILNQIQEEVKAKLQEEENNIPSLSQNIIHDSTNSQSYNPLIHHHSIIPFSPQSLSHTQHRSQENDTYFSQILLTQQSTSDMSTQTDNTTLLVENEIECLTVENRSENPIVSNLDEKLRSAILLYSGMDPSARPKLPKLKYSKHLLKLVSIFNNNLLEQHLTNDSKLNDIHTLIYCTALVISQELGYKIHNNDRPIQIPRNNRPAWQVRLERQINKLRSDIGKLTQYITNNNRSDKVVNRVTAIFKNATLHTRHEANNKTPQEFLDTLKQKLALKTNRYKRYKTALQRKQDNNLFANNEKMFYRKLNATPDNNTTLHSTTNEVPSKEELENFWSNIWETQIMHNTEAQWIEDEKKRWETIEEMEFHEITKEDITSITDRLHNWKSPGVDKIHNFWYKKLLIFHKYLAKNFTEVLLGQQQPPEFLTKGITYMLPKNQHTSQPSQYRPITCLPTIYKILTSVIAHKIRSHVETHKIIAEEQKGCRRGHIGCKEQLIIDSVIHKHTATKKRNLHCTFIDYKKAFDSIPHSWLINILEVYKINSNIIDFLKNVMPLWKTTLLLNNHHNAIVSREISIRKGIYQGDSLSPLWFCLALNPLSQLLNNQRAGFQLRHNNIQTTISHLIYMDDIKLYAKTDKEIDKLIKVTTDFSKDINMQFGLDKCRTIHIIKGKIRAGDYVIENSGDENQIIKAMEPNEMYKYLGYEQAKGLDHKDIKNKLTLEYKRRLNRICKSRLTGKNLIKAINTYAIPVLTYSFGIIKWSQSNINSIERTTRTTLTKYNHHHPKSAIERLNIKRQNGGRGLIYITNLWKKQINSLHQFFKQKSLTSNIHKAIVTNDNSYTPLNLQQTYEENILTPNQQEIVLKEAWQKKALHGRHYNDLEQTPIDKEASNKWLKLGTLFPETEGFIIAIQDQIINTRNYRKFIIKDPTLTNDKCRKCHIHSETIQHITGACPHLTQTDYTHRHNQVANIIHQSLAIQHNLIPDPHTPYYKYTPSTILENSTHKMYYDRAILTDRTIHYNRPDITLQDKINKTTYLIDIAVPNTHNLTKTITEKVHKYADLKDEVTRIWRQDKVYIVPIVLSTTGVIPKHLFHSLKLLNIKETTYIKLQKAAILNTCRIVRKFMQIDENEISAPPPPPLPQTTEPIDNHRLPAATE

SEQ ID NO: 21898 - protein, 1338 aa, Spodoptera frugiperda
METRSKSKRIGPLPGGDRRGTPGADAGCGSGRTVGGAELSRRAPTGSPENVTANTLHSSSPSSSIIEPFSPSTTSYAPSSSPLPTDEETREPENPTFAVAQAVTQTFLPASTKAGKPRVRMRWSPEVNTFIMRTYYYITKLETDLTTYRTLLHQKFIQKYPEINVTEQRIADQRRVIVRNKLLSTEILNQIQEEVRAKLQEEENNIPSLSQNIIHDSANLQSYNPLIHHHSTIPISPQSISHTRHPSQENDTYFSQILLTQQSTSDMSTQTDNTTLLVENEIECLTVENRSENPIVSNLDEKLRSAILLYSGMDPSARPKLPKLKYSKQLLKLVSIFNNNLLEQHITNDSKLNDIHTLIYCTALVISQELGYKIHNNDRPIQIPRNNRPAWQIRLERQINKLRSDIGKLTQYITNNNRSDKVVDRVTAIFKNATLHTRHEANNKTPQEFLDTLKQKLALKTNRYKRYKTALQRKQDNNLFANNEKMFYRKLNATPDNNTTLHSTTNEVPSKEELENFWSNIWETQITHNTEAQWIEEEKKRWETIEEMEFHEITKEDITNITDRLHNWKSPGVDKIHNFWYKKLLIFHKYLAKNFTEVLLGQQQPPEFLTKGITYMLPKNQHTSQPSQYRPITCLPTIYKILTSVIAHKIRSHVETHKIIAEEQKGCRRDHMGCKEQLIIDSVIHKHTATKKRNLHCTFIDYKKAFDSIPHSWLINILEVYKINSNIIDFLKNVMPLWKTTLLLNNHHNAIVSREISIRKGIYQGDSLSPLWFCLALNPLSQLLNNQRAGFQLRHNNIQTTISHLIYMDDIKLYAKTDKEMEKLIKVTTDFSKDINMQFGLDKCRMIHIIKGKIRAGDYVIENSEDENQIIKAMEPNEMYKYLGYEQAKGLDHKDIKNKLTLEYKRRLNRICKSRLTGKNLIKAINTYAIPVLTYSFGIIKWSQSNINSIERATRTTLTKYNHHHPKSAIERLNIKRQNGGRGLIYITNLWKKQINSLHKFFKQKSLTSNIHKAIVTNDNSYTPLNLQQTYEENILTPNQQEIVLKEAWQKKALHGRHYNDLEQAPIDKEASNKWLKLGTLFPETEGFIIAIQDQIINTRNYRKFIIKDPTLTNDKCRKCHIHSETIQHITGACPHLTQTDYTHRHNQVANIIHQSLAIQHNLIPDTHTPYYKYTPSTILENSTYKMYYDRAILTDRTIHYNRPDITLQDKINKTTYLIDIAVPNTHNLTKTITEKVHKYADLKDEVTRIWRQDKVYIVPIVLSTTGVIPKHLFHSLKLLNIKETTYIKLQKAAILNTCRIVRKFMQIDENEISAPPPPPLPQATELIDNHRPPTTTE

SEQ ID NO: 21899 - protein, 1142 aa, Spodoptera frugiperda
MYEDDPNNIPSLSQNIIRGPTNLHSHNPLIHHHSMPISTQSFSHTQHQSQENDTYFSQILLTQHSTSDMSTQTDNTTLLVENEVECLTAENRSENPIVSNLDEKLRSAILLYSGMDPSARPKLPKLKYSKHLLKLVSIFNNNLLEQHITNDSKLNDIHTLIYCTAFVISQELGYKTHNNDRPIQLPRNNRPAWQIRLERQITKLRSDIGKLTQYITNNNRSDKVVNRVTAIFRNATLHTRHEANNKTPQEFLDTLKQKLALKTNRYKRYKTALQRKQDNNLFANNEKMFYRKLNATPENNTTIHSTTNAVPSKEELENFWSNIWETQITHNREAQWIADEKKKWETIEEMEFHEIIKEDITNITDRLHNWKSPGVDKIHNFWYKKLLIFHKYLAKNFTEILLGQQQPPEFLTKGITYMLPKTQHTSQPSQYRPITCLPTIYKILTSVIAHKIRSHVETHKILAEEQKGCRRGHMGCKEQLIIDSVIHKHTATKKRNLHCTFIDYKKAFDSIPHSWLINILEVYKINSSIIDFLKNVMPLWKTNLLLNNHHNTIISREISIRKGIYQGDSLSPLWFCLALNPLSQLLNNQRAGFQLRHDNIQTTISHLIYMDDIKLYAKTDKEMDKLIKVTTEFSKDINMQFGLDKCRTIHIIKGKIRAGDYVIEDSGDENQIIKAMEPNEMYKYLGYEQAKGLDHKDIKNKLTLEYKRRLNRICKSRLTGKNLIKAINTYAIPVLTYSFGIIKWSQSNINSIERTTRTTLTKYNHHHPKSAIERLNIKRQNGGRGLIYITNLWKKQINSLHKFFKQKSLTSNIHKAITTNDNSYTPLNLQQTYEENIPTPNEQETILKEAWQKKALHGRHYNDLEQTPIDKEASNKWLKLGTLFPETEGFIIAIQDQIINTRNYRKFIIKDPTLTNDKCRKCHIHSETIQHITGACPHLTQTDYTHRHNQVANIIHQSLAIQHKLIPDTHTPYYKYTPSTILENSTHKMYYDRAILTDRTIHYNRPDITLQDKINKTTYLIDIAVPNTHNLTKTIAEKVHKYADLKDEVTRIWRQDKVYIVPIVLSTTGVIPKHLFHSLKLLNIKETTYIKLQKAAILNTCRIVRKFMQIDENEISAAPPPPPPQTTEPIDNHRPPATTETE

SEQ ID NO: 21900 - protein, 1337 aa, Spodoptera litura
METRSKSKRIGPLPGGDRRGTLGADAGCGSGRTVGGAELSRRTPTGLPENATALPPSSPSSSIIEPFSPSTTSYAPSLSPLPTDEESRETETPTFAVAQVVQETFLPASTKAGKPRVRMRWSPEVNTFIMRTYYYITKLETDLTTYRTLLHQKFMQQYPEINVTEQRIADQRRVIVRNKLLSPETLNKLQEEVKLKLQEEESTGHNISSYSLNVIHDFTNIQPHNPPIHHHSTMPISTQSLNHTQHQHLENDTYFSQILLTQHSTSDMSTQTDNTTLLVENEIECLTLENRSENPIVLDLDEKLRSAILLYSGMDPSVRPKLPKLKYSKHLLKLVSIFNNSLLEQHITNDSKLTDIHTLIYCTASVISQELGYKTYDSDRPIQSPRDNRPAWQIRLERQINKLRSDIGKLTQYITNNNRSAKLVDRVTAIFKNTALHTRHEANNKTPQEFLDTLKQKLALKTNRYKRYKTALQRKNDNNLFANNEKMFYRKLNATTDNNTTTHSTTNEVPSKEELESFWSNIWETQVTHNTEAQWIADEKKRWETIEEMEFLEIAKEDITSITDRLHNWKSPGVDKIHNFWYKKLVIFHKCLAKNLTEILLGQQQPPDFFTKGITYMLPKNQNTSQPSQYRPITCLPTIYKILTSVIAHKIRSHVETHKIIAEEQKGCRVGHMGCKEQLIIDSVIHKHTATKKRNLHCTFIDYKKAFDSIPHSWLINILELYKINSHIIDFLKKVMPLWKTTLQLNNRHNAIISREISIRKGIYQGDSLSPLWFCLALNPLSQLLNNQDVGFQLKRDNTHTTISHLIYMDDIKLYAKTDKEMDKLIKVTTNFSKDINMQFGLDKCRTIHIQKGKIRAGDYVIEDFDGENQIIKAMEPSEMYKYLGYQQAKGLDHKDIKNKLTSEYKRRLNRICKSRLTGKNLIKAINTYAIPVLTYSFGIIKWSQSNINSIERTTRTTLTKHNHHHPKSAIERLNIKRQNGGRGLIYITNLWKKQINSLHKFFKQKSLTSSIHKAIVANDNSYTPLNLQQAYLENTPTPSEQEAILKEAWQKKVLHGRHYNDLEQQPIDKEASNKWLKLGTLFPETEGFIIAIQDQIINTRNYRKYIIKDPTLMNDKCRKCHIHSETIQHITGACPHLTQTDYTHRHNQVANIIHQTLAIQHNLITDTHTPYYKYTPSTILENSTHKMYYDRAILTDRTIHFNRPDITLQDKLNKTTYLIDIAVPNTHNLTKTIAEKVHKYADLKDEVTRIWRQDKVYIVPIVLSTTGVIPKHLFHSLKLLNIKDTIYIKLQKAAILNTCRIVRKFMQIDENEISPPPPPTQTVEPIDSHNSLTTTE

SEQ ID NO: 21901 - protein, 1342 aa, Spodoptera frugiperda
METRSKSKRIGPLPGGDRRGTPGADAGCGSGRTVGGAELSRRAPTGSPENVTANTLHPSSPSSSIIEPFSPSTTSYAPSSSPLPTDEETREPEIPTFAVAQAVTQTFLPASTKAGKPRVRMRWSPEVNTFIMRTYYYITKLETDLTTYRTLLHQKFIQQYPEINVTEQRIADQRRVIVRNKLLSTEILNQIQEEVKVKLQEEENNIPSLSQNIIHNPTNSQSYNPLIHHHSTIPFSPQSLSHTQHRSQENDTYFSQILLTQHSTSDMSTQTDNTTLLVENEIECLTVENRSENPTVSNLDEKLRSAILLYSGMDPSARPKLPKLKYSKHLLKLVSIFNNNLLEQHLTNDSKLNDIHTLIYCTALVISQELGYKIHNNDRPIQIPRNNRPAWQIRLERQINKLRSDIGKLTQYITNNNRSDKVVNRVTAIFKNATLHTRHEANNKTPQEFLDTLKQKLALKTNRYKRYKTALQRKQDNNLFSNNEKMFYRKLNATPDNNTTLHSTTNEVPSKEELENFWSSIWETQITHNTEAQWIEDEKKRWETIEEMEFHEITKEDITNITDRLHNWKSPGVDKIHNFWYKKLLIFHKYLAKNFTEVLLGQQQSPEFLTKGITYMLPKNQHTSQPSQYRPITCLPTIYKILTSVITHKIRSHVETHNIIAEEQKGCRRGHMGCKEQLIIDSVIHKHTATKKRNLHCTFIDYKKAFDSIPHSWLINILEVYKINSSIIDFLKNVMPLWKTTLLLNNHHSTIVSREISIRKGIYQGDSLSPLWFCLALNPLSQLLNNQRAGFQLRHDNIQTTISHLIYMDDIKLYAKTDKEMDKLIKVTTDFSKDINMQFGLDKCRTIHIIKGKIRAGDYVIENSGDENQIIKAMEPNEMYKYLGYEQAKGLDHKDIKNKLTLEYKRRLNRICKSRLSGKNLIKAINTYAIPVLTYSFGIIKWSQSNINSIERATRTTLTKYNHHHPKSAIERLNIKRQNGGRGLIYITNLWKKQINSLHKFFKQKSLTSNIHKAIVTNDNSYTPLNLQQTYEENILTPNQQETVLKEAWQKKALHGRHYNDLEQTPIDKEASNKWLKLGTLFPETEGFIIAIQDQIINTRNYRKFIIKDPTLTNDKCRKCHIHSETIQHITGACPHLTQTDYTHRHNQVANIIHQSLAIQHNLIADTHTPYYKYTPSTILENSTHKMYYDRAILTDRTIHYNRPDITLQDKINKTTYLIDIAVPNTHNLTKTITEKVHKYADLKDEVTRIWRQDKVYIVPIVLSTTGVIPKHLFHSLKLLNIKDTTYIKLQKAAILNTCRIVRKFMQIDENEISAPPPPPPPLPQTTEPIDNRRPPTATETE

SEQ ID NO: 21902 - protein, 1343 aa, Spodoptera frugiperda
METRSKSKRIGPLLGGDRRGPPGADAGCGSGRTVGGAELSRRAPTGSPENVTANPLHSQSPSSSIIEPFSPSTTSYAPSSSPLPIDEETREPENPTFAVAQAVPQTFLPASTKAGKPRVRMRWSPEVNTFIMRTYYYVTKLETDLTTYRTLLHQKFIQQYPEINVTEQRIADQRRVIVRNKLLSTEILHQIQEEVKAKLQEEENNIPSLSHNIIHGSTNLQSHNPLIHHHSTIPISPQSLSHTRHRSQENDTYFSQILLTQHSTSDMSTQTYNTTLLVENEVECLTVENRSENPIVSDLDEKLRGAILLYSGMDPSARPKLPKLKYSKHLLKLVSIFNNNLLEQHITNDSKLNDIHTLIYCTALVISQELGYKTYNNDRPIQLPRNNRPAWQIRLERQITKLRSDIGKLTQYITNNNRSDKVVDRVTAIFKNATLHTRHEANNKTPQEFLDTLKQKLALKTNRYKRYKTALQRKQDNNLFANNEKMFYRKLNATPENNTTLHSITNEVPSKEELENFWSNIWETQVTHNTEAQWIEDEKKKWETIEEMEFHEITKEDITNITDRLHNWKSPGVDKIHNFWYKKLIIFHKYLAKNLTDILLGQQQPPEFLTKGITYMLPKNQHTSQPSQYRPITCLPTIYKILTSVIAHKIRSHVETHKIIAEEQKGCRRGHMGCKEQLIIDSVIHKHTATKKRNLHCTFIDYKKAFDSIPHSWLINILEVYKINSNIIDFLRNVMPLWKTTLLLNNHHNAIISREISIRKGIYQGDSLSPLWFCLALNPLSQLLNNQRAGFQLKHDNTQTTISHLIYMDDIKLYAKTDKEMDKLIKVTTEFSKDINMQFGLDKCRTIHILKGKIRAGDYVIEDSGDENQIIKAMEPNEMYKYLGYEQAKGLDHKDIKNKLTLEYKRRLNKICKSRLTGKNLIKAINTYAIPVLTYSFGIIKWSQSNINSIERTTRTTLTKYNHHHPKSAIERLNIKRQNGGRGLIYITNLWKKQINSLHKFFKQKSLISNIHKAITTNDNSYTPLNLQQTYEENILTPSEQETVLKEAWQKKALHGRHYNDLEQTPIDKEASNKWLKLGTLFPETEGFIIAIQDQIINTRNYRKFIIKDPTLTNDKCRKCHIHSETIQHITGACPHLTQTDYTHRHNQVANIIHQTLAIQHKLITDTHTPYYKYTPSTILENSTHKMYYDRAILTDRTIHYNRPDITLQDKINKTTYLIDIAVPNTHNLTKTIAEKVHKYADLKDEVTRIWRQDKVYIVPIVLSTTGVIPKHLFHSLKLLNIKDTTYIKLQKAAILNTCRIVRKFMQIDENEISAAPPPPPPPLPQTTEPIDNHRPPTATETE

SEQ ID NO: 21903 - protein, 1340 aa, Spodoptera frugiperda
METRSKSKRIGPLPGGDRRGTPGADAGCGSGRTVGGAELSRRAPTGSPENVTANTLHPSSPSSSIIEPFSPSTTSYAPSLSPLPTDEETREPEIPTFAVAQAVTQTFLPASTKAGKPRVRMRWSPEVNTFIMRTYYYITKLETDLTTYRTLLHQKFIQQYPEINVTEQRIADQRRVIVRNKLLSTEILNQIQEEVKAKLQEEENNIPSLSQNIIHDSTNSQPYNPLIHHHSTIPFSPQSLSHTQHRSQENDTYFSQILLTQHSTSDMSTQTDNTTLLVENEIECLTVENKYENPTVSNLDEKLRSAILLYSGMDPSARPKLPKLKYSKHLLKLVSIFNNNLLEQHLTNDSKLNDIHTLIYCTALVISQELGYKIHNNDRPIQIPRNNRPAWQIRLERQINKLRSDIGKLTQYITNNNRSDKVVNRVTAIFKNATLHTRHEANNKTPQEFLDTLKQKLALKTNRYKRFKTALQRKQDNNLFANNEKMFYRKLNATPDNNTTLHSTTNEVPSKEELENFWSNIWETQITHNTEAQWIEDEKKRWETIEEMEFHEITKEDITNITDRLHNWKSPGVDKIHNFWYKKLLIFHKYLAKNFTEVLLGQQQPPEFLTKGITYMLPKNQHTSQPSQYRPITCLPTIYKILTSVIAHKIRSHVETHNIIAEEQKGCRRGHMGCKEQLIIDSVIHKHTATKKRNLHCTFIDYKKAFDSIPHSWLINILEVYKINSSIIDFLKNVMPLWKTTLLLNNQHSAIVSREISIRKGIYQGDSLSPLWFCLALNPLSQLLNNQRAGFQLRHDNKQTTISHLIYMDDIKLYAKTDKEMDKLIKVTTDFSKDINMQFGLDKCRTIHIIKGKIRAGDYVIENSGDENQIIKAMEPNEMYKYLGYEQAKGLDHKDIKNKLTLEYKRRLNRICKSRLTGKNLIKAINTYAIPVLTYSFGIIKWSQSNINSIERTTRTTLTKYNHHHPKSAIERLNIKRQNGGRGLIYITNLWKKQINSLHKFFKQKSLTSNIHKAIVTNDNSYTPLNLQQTYEDNILTPNQQETVLKEAWQKKALHGRHYNDLEQAPIDKEASNKWLKLGTLFPETEGFIIAIQDQIINTRNYRKFIIKDPTLTNDKCRKCHIHSETIQHITGACPHLTQTDYTHRHNQVANIIHQSLAIQHNLIPDTHTPYYKYTPSTILENSTHKMYYDRAILTDRTIHYNRPDITLQDKINKTTYLIDIAVPNTHNLTKTITEKVHKYADLKDEVTRIWRQDKVYIVPIVLSTTGVIPKHLFHSLKLLNIKDTTYIKLQKAAILNTCRIVRKFMQIDENEISAPPPPPLPQTTEPIDNHRPPTATETE

SEQ ID NO: 21904 - protein, 1340 aa, Apodemia zela
MQSHENRYNLRPLPGGRRGAPGAGAGCFSMRDTGGEALSRRVPVTQYATADRRELNRRTYDVETTADTTTTSPITQPPISPSSTASRQPYSPSTVSYVPTPIHTDIDTDSNNSLTPAFVVAQEASQAFLPVSTKAGKPRVRMKWSPDVNEFIMRTYFYVTKLETDMTMYRVLLHQKFTQKYPGVNVTQQRVSDQKRVILRNKLLSEATLKRLKEEAKSQLDEETSINENTFCEIAQLNANEGTVNDREEYASPNFTTTAQTLTIPQLTLDLSNLTHPQLHSQDQNVTSLSNVTTQTQNIEYESLTLNERLPCLDENATRLNTKLEAMLLQYTNSDPTKRPRLPRLKYQFQLQRLVDVFNNKLLTQYLSDNIKLTQIHTLIYCTAFIISEELGYKIKENSSNISPKIVTKPAWQTRLEKDIQGLRADIGRLTQYIYHNNRSKRVVERVSALFLNSTVHTRHEDENKRPEDFLDTLKQKLALKASRLKRYKKTQQRKDDNNLFTNNQKVFYRKLNVKPGSREKQPTDTPTEEELEIFWSSIWEKETTHNSQANWIAEEASRWDTIEEMQFEDITEDDIKEITSKLHNWKSPGIDRIHNFWYKKLCIFHKSLAKNFTEILLQQQSVPHFITKGMTYMLPKGEYTSQPNQYRPITCLPTIYKILTSIITCKIRAHAEYYNIIAEEQKGCRRGHMGCKEQLIIDSVIHKNTANKKHNLHCTYIDYKKAFDSIPHSWLIEILKIYKINSSIINFLKNVMPLWKTTLHLNAFPLPVQTREIAIKKGIYQGDSLSPMWFCLAMNPLSHLLNNCSAGYRLKYNTQNTLISHLIYMDDIKLYAKTDREMKILVDKTTIFSNDINMEFGMDKCKTVHIIKGKIKTGDYIIEGTQNQVITAMEPNEMYKYLGYFQLKGINHKWVKEKIITEYTKRVRNICKTRLTSKNLIKAVNSYAIPVLTYSFGVIRWSKTNIQTIERTTRTIFTRFNYHHPKSAIERLVIKRQDGGRGLIDIHSLWLKQIHHLYRFFHAKAETSNIHKAVVNNDNNYTPLNLNKPLTLESFDTHNEHTLIETWKAKALHGRHPHDLELPHIDKEASNKWLKVGSLFPETEGFILAIQDQVINTRNFKKYIIKDPAVVDDKCRKCHLHSETIQHITGACPNLSQTDYTHRHNQIVNIIHKYIATKHKLISDTATPYYKYTPKTVLENSTHKMYYDRAILTDKTIHYNRPDITLRDKVHKITYLIDIAVPNTHNVTKTIAEKAHKYTELKEEVIRIWQQKYVYIIPIVLSATGVIPSHLHHSLKQLGINQHLYITLQKASILNTCRIVRKFLQIPDSETQDITDQLSQLMQ

SEQ ID NO: 21905 - protein, 1317 aa, Apodemia duryi
MQSYENRYNLRPLPGGRRGASGAGAGCFSMRDTGGEALSRRASVTQHATADRRKLNRRAYDVEITADTTTTSIITQPLISPSSTASRQPYSPSTISYVPTPIHTDIDTDSNNSITPTFAVTQEVSQAFLSASTKAGKPRVRMKWSPDINEFIMRTYYYITKLETDMTMYRVLLHHKFTQKYPGINVTQQRVSDQKRVILRNKLLSEETLKRLKEEVKAQLDEEQSLSATEGTATYREDYTSPNFASTAQLHTISHLTPDKSDFTHPQICSHDQNITNLSNLSTQTQNIDYETLALNESVPYLDENATHLDTKLRLILLRYANSDPTKRPRLPRLKYQFKLQKLVDIFNNKLLPQFLTTDTKLTHIHTLIYCTALVITEELGYKIKENSSNIHHKTQAKPAWQIRLEKEIQELRADIGRLTQYISHNNRSKRVVDRVSALFVNRTVHTRHEDNNKCPEDFLDTLKQKLALKASRLKRYKKTQQRKDDNNLFTNNQKIFYRKLNFNPGDREQESLNTPTREELETFWSNIWENETTHNSKADWIAEEAKRWESIEEMQFKDITVEDIKQITSKIQNWKSPGIDRIHNFWYKKLIIFHEPLAKNFTEILLQQQSVPDFITKGMTFMLPKGEYTSQPSQYRPITCLPTIYKILTAIITHKIHAHTEYHNIIAEEQKGCRRGHMGCKEQLIIDSVIHKNTSSKKHNLHCTYIDYRKAFDSIPHSWLIEILKIYKINSSIISFLKNVMPLWKTTLYLNTLHIPIQTRNISIRKGIYQGDSLSPLWFCLAMNPLSYLLKNCLAGYRLKYNTTNTIISHLIYMDDIKLYAKTDREMKKLIDKTTIFSKDINMEFGIDKCKTVHIIKGKIKTGDYIIEGTQNQIIVAMESNEMYKYLGYYQLKGINHKCVKEKIITEYKKRVKNICKTRLTSKHLIKAVNSYAIPVLTYSFGVIQWNKTNIQSIERTTRTILTRFNYHHPKSAMERLIIKRQDGGRGLIDIQSLWLKQLHQLYTFFHNKAGTSNIHKAVASSDNNYTPLNLSKPFIHEPYNTDSEIRLIDSWKTKTLHGRHPHDLDLPHIDKEASNKWLGVGDLFPETEGFIMAIQDQVINTRNYKKHIIKDRELLNDSCRKCHLHSETIQHITGACPSLSQTDYMHRHNQIVNIIHKYLAIKHKLIPETTTPYYQYTPTTVLENSTHKMYYDRAILTDKTIHFNRPDITLRDKINKITYLIDIAVPNTHNITKTIAEKAHKYTELKEEVTRIWQQKHVHIIPIVLSTTGVIPYHLHHSLKQLEMNQYLYITLQKAAILNTCRIARKFLQIPENET

SEQ ID NO: 21906 - protein, 1344 aa, Apodemia walkeri
MQSHEYRYNLRPLPGGRRGAPGAGAGCFSMRDTGDEALSRRASVTQYVTADRRELNRRAYDVGTTAETETTLPMAQSPITRSSTSSRQPYSPSTISYVPAQTQTDRHSDTDTDSSNSVTPTFVVAQEASQAFLPASTKAGKPRVRMKWSPDVNEFIMRTYFYITKLETDMTMYRVLLHQKFTQKYPGVKVTQQRISDQRRAILRNKLLSEATIQRLKKEVKTQLSEEQSNNGNTCCEVAQSNDMELTENYREEYTTPNFTNTLQMDTNPQLTPGISNLTHPRLYTQDQNNANLSNLPIQTQNIEYEPVTLNGRIRCLDENATHLNSRLQSMLLQYANSDPTERPKLPRLKYQYKLQKLVDIFNDKLLPQYLYEDTQLTQIHTLIYCTALIITQELGYKIKENSNNIQSKIVAKPTWQIRLEKDIQELRADIGRLTQYIYHNNRSKRVVERVSALFINSTVHTRHEEDNKRPEDFLDTLKQKLALKASRLKRYKKTQQRKDDNNLFTNNQKVFYRNLNGKPESREQQPTNTPTREELETFWSNIWENETIHNSQANWIVEEAKRWNTIEEMQFEEITEEDIKEITTKLQNWKSPGIDRIHNFWYKKLCIFHKSLAKNFTEILLQQQSIPHFITKGMTFMLPKGEYTSQPNQYRPITCLPTVYKILTSIITHKIRTHIEYHNIIAEEQKGCRRGHMGCKEQLIIDSVIHKNISNKKHNLHCTYIDYKKAFDSIPHSWLIEILKIYKINSSIVNFLKNVMPLWKTTLYLNVLPSPIQTREIAIKKGIYQGDSLSPMWFCLALNPLSYLLNNCSAGYRLNHNSTKTLISHLIYMDDIKLYAKTDREMKKLINKTTTFSNDINMEFGIDKCKTVHIIKGKIKTGDYIIEGIQNQVITAMEPNDMYKYLGYFQLKGINHKYVKEKIITEYKKRVKTICKTSLTSKNLIKAINSYAIPVLTYSFGVIRWSKTNIQAIERTSRTILTRFNYHHPKSATERLVIKRQDGGRGLININSLWLKQIHHIYRFFHAKALTSNIHKAVVNNDNNYTPLNLNKPLTLESYDTHNEHTLIESWKAKALHGRHPHDLELPHVDQEASNKWLKLGSLFPETEGFLIAIQDQIINTRNFKKYIIKDPKLTDDKCRKCHLHSETIQHITGACPSLSQTDYTHRHNQIVNIIHKYIATKYKLIMDNTTPYYNYTPKTVLENSTHKMYYDRAILTDRTIHYNRPDITLRDKVNKTTYLIDIAVPNTHNITKTIAEKAHKYAELKEEVIRIWQQKHVYVVPIVLSATGVIPYHLHHSLKQLEISQHLYITLQKAAILNTCRIVRKFLQIPDNETQDITERPSQLLP

SEQ ID NO: 21907 - protein, 1002 aa, Apodemia mormo
MLLRYANSDPTKRPRLPRLKYQFKLQKLVDIFNNKLLPQFLTTDTKLTHIHTLIYCTALVITEELGYKIKENSSNIHHKTQAKPAWQIRLEKEIQELRADIGRLTQYISHNNRSKRVVDRVSALFVNRTVHTRHEDNNKCPEDFLDTLKQKLALKASRLKRYKRTQQRKDDNNLFTNNQKIFYRKLNFNPGDREQESLNTPTREELETFWSNIWENETTHNSKADWIAEEAKRWESIEEMQFKDITVEDIKQITSKIQNWKSPGIDRIHNFWYKKLIIFHEPLAKNFTEILLQQQSVPDFITKGMTFMLPKGEYTSQPSQYRPITCLPTIYKILTAIITHKIHAHTEYHNIIAEEQKGCRRGHMGCKEQLIIDSVIHKNTSSKKHNLHCTYIDYRKAFDSIPHSWLIEILKIYKINSSIISFLKNVMPLWKTTLYLNTRHIPIQTRGISIRKGIYQGDSLSPLWFCLAMNPLSYLLKNCLAGYRLKYNTTNTIISHLIYMDDIKLYAKTDREMKKLIDKTTIFSKDINMEFGIDKCKTVHIIKGKIKTGDYIIEGTQNQIIVAMESNEMYKYLGYYQLKGINHKCVKEKIITEYKKRVKNICKTRLTSKHLIKAVNSYAIPVLTYSFGVIQWNKTNIQSIERTTRTILTRFNYHHPKSAMERLIIKRQDGGRGLIDIQSLWLKQLHQLYTFFHNKAGTSNIHKAVASSDNNYTPLNLSKPFIHEPYNTDSEIRLIDSWKTKTLHGRHPHDLDLPHIDKEASNKWLGVGNLFPETEGFIMAIQDQVINTRNYKKHIIKDRELLNDRCRKCHLHSETIQHITGACPSLSQTDYMHRHNQIVNIIHKYLAIKHKLIPETTTPYYQYTPTTVLENSTHKMYYDRAILTDKTIHFNRPDITLRDKINKITYLIDIAVPNTHNITKTIAEKAHKYTELKEEVTRIWQQKHVHIIPIVLSTTGVIPYHLHHSLKQLEMNQYLYITLQKAAILNTCRIARKFLQIPENET

SEQ ID NO: 21908 - protein, 1298 aa, Apodemia walkeri
MRDTGDEALSRRASVTQHATADRRELNRRAYDVETTADNTTTSPVKQPPISPSSTTSRQPYSPSTASYVPTPIHTDIDTDSNNSVPPTFVVTQKASQAFLSASTKAGKPRVRMKWSPDVNEFIMRTYYYITKLETDMTMYRVILHQKFTQKYPGINVTQQRVSDQKRVILRNRLLSDATLKRLREEAKLQLNEELSRNESTFGENTQMNATERTITYREGYTSPSYTISHLTPHLLNPTDPQHYICNQNITNSSNLLTETQNIDHETVALNERVPSLDDNATYLDTKLRLMLLQYENSDPTKRPRLPRLKYQSKLQKLVDTFNNKLLPPLVSLDKNLTQIHTLIYCTAIVITQELGYTIKENSNNTQQKPKAKPTWQVRLEKDIQELRADIGRLTQYIYHNNRSRRVVERVSALFVNATVHTRHESNNKRPEDFLDTLKQKLALKASRLKRYKKTQQRKDDNNLFTNNQKVFYRNLNANSGSREQEITNTPTREELEIFWSNIWENETTHNSQADWIAEEAKRCDSIEEMHFVDITTEDIKQITSKLQNWKSPGIDRIHNFWYKKLYIFHETLAKNFTNIILQKESVPNFLTKGMTFMLPKGEYTSHPHQYRPITCLPTIYKILTSIITHKIREHTEYHNIIAEEQKGCRRGHMGCKEQLIIDSVIHKNTSSKKHNLHCTYIDYKKAFDSIPHSWLLEILKIYKINSSIINFLRSIMPLWTTTLHLNTYPVPIQTREISIKKGIFQGDSLSPLWFCLAMNPLSHLLHNCSAGYRLKHNTTNTFISHLIYMDDIKLYAKTDREMKKLIDKTTTFSNDINMEFGIDKCKTVHIIKGKITNGDYLIEGTQNQVITAMEPYEMYKYLGYHQLKGINHKCAKENIITEYKKRVKNICKTRLTSKNLIKAINSYAIPVLTYSFGVIKWNKTNIQSIERTTRTILTKFNYHHPKSAIERLIIKRQDGGRGLINLNSLWLKQLHQLYTFFHAKADTSNIHKAVVSNDNNYTPLNLSKLFTQESYDTDSEHRLIEFWKTKALHGRHPLDLELPHIDQKASNKWLRVGNLFPETEGFITAIQDQVISTRNYKKYIMKDPELIDDRCRKCHLHSETIQHITGACPNLAQTDYTHRHNQIVSIIHKYIATKHKLIPESTTPYYKYTPITVLENSTHKMYYDRAILTDKTIHYNRPDITLRDKVNKITYLIDIAVPNTHNVTKTIAEKAHKYTELREEVIRIWQQKHVYIIPIVLSATGVIPYHLHHSLEQLEINQHLYITLQKAAILNTCRIVRKFLQIPDSQTHVNIIQ

SEQ ID NO: 21909 - protein, 1340 aa, Apodemia chisosensis
MQSHENRYNLRPLPGGRRGASGAGAGCFSMRDTGGEALSRRAPVTQNATADRRELNRRAYDVETTADTTTTSPITQLAISPSSTASKRPYSPSTISYVPTPIHTDIDTDSNNSLTPTFVVTQEVSQAFLPASTKAGKPRVRMKWSPDVNEFIMRTYFYITKLETDMTMYRVLLHHKFTQKYPGVNVTQQRISDQKRVILRNKLLSEATLKRLKEEAKSQLDEEQRINENTFCEITQPNATERTVNYREEYVSPNFTSTAQMHTISHLTPDISNLTYSQLHSQDQNVTNLSDLATQMQNTEYETVTLNERIPCLEENATLLNTKLESMLLQYANSDPTKRPRLPRLKYQFKLQKLIDVFNNKLLSQYLSDDIKLTQIHTLIYCTAFIITQELGYKIKENSSNIQPKVVAKPTWQIRLEKDIQELRADIGRLTQYIYHNNRSKRVVDRISALFMNSTVHTRHEDNNKRPEDFLDTLKQKLALKASRLKRYKKTQQRKDDNNLFTNNQKVFYKKLNIKPGSGEKQPTDTPTREELETFWASIWENETTHNSQANWIAEEASRWDIIEEMQFEEITEDDIKEITSKLQNWKSPGIDRIHNFWYKKLCIFHKSLAKNFTEILLQQQSIPHFMTKGMTYMLPKGQYTSQPDQYRPITCLPTIYKILTSIITYRIRTHTEYHNIIAEEQKGCRRGHMGCKEQLIIDSVIHKNTSNKKHNLHCTYIDYKKAFDSIPHSWLIEILKIYKINSSIINFLKNVMPLWKTTLHLNTFPSPVQTREIAIKKGIYQGDSLSPMWFCLAMNPLSHLLNNCSTGYRLKYNTKNTLISHLIYMDDIKLYAKTDREMKKLIDKTTTFSNDVNMKFGVDKCKTVHIIKGKIKTGDYIIEGTENQVITAMEPNEMYKYLGYFQLKGINHKWVKEKIITEYKKRLKNICKTRLTSKNLIKAVNSYAIPVLTYSFGVIGWNKTNIQTIARTTRTTLTRFNYHHPKSAIERLVIKRQDGGRGLIDIHSLWLKQIHHLYRFFHAKAGTSNIHKAVVNNDNNYTPLNLSKSLTLEPCDTHNEHTLIETWKTKALHGRHPHDLELPHIDQEASNKWLKVGNLFPETEGFIMAIQDQVINTRNFKKYIVKDPALIDDKCRKCHLHSETIQHIIGACPNLSQTDYTHRHNQIVNIIHKYIATKHKLISDTTTPYYKYIPKTVLENSTHKMYYDRAILTDKTIHYNRPDITLRDKVNKITYLIDIAVPNTHNITKTIAEKAHKYTELKEEVLRIWQQKHVYIIPIVLSATGVIPYHLHHSLRQLGMTQHLYITLQKAAILNTCRIVRKFLQIPDNETQDITDQLSQLLQ

SEQ ID NO: 21910 - protein, 1340 aa, Apodemia ares
MQSHENRYNLRPLPGGRRGASGAGAGCFSMRDTGGEALSRRAPVTQHATADRRELNRRTYDVETTADTTTTSPITQSPISPSSTASRQPYSPSTISYVPTPIHTDIDTDSNNSLTPTFVVAQEASQAFLPASTKAGKPRVRMKWSPDVNEFIMRTYFYVTKLETDMTMYRVLLHHKFTQKYPGINVTQQRVSDQKRVILRNKLLSEATLKRLKEEAKSQLDEEQSINENTFYEIAQSNATEGTVNYREEYASPNFTSTAQMHTIPQLTPDISNLTHPQLHSQDQYVTNLSNGTTQTQNIEYESVTLNEIIPCLDENATHLNTKLESMLLQYANSDPTKRPRLPRLKYQFKLQKLVDVFNNKLLTQYLSDDIKLTQIHTLIYCTAFIISQELGYKIKENSSNIQPKIVAKPAWQTRLEKDIQELRADIGRLTQYIYHNNKSKRVMERVSALFINSTVHTRHEDDNKCPEDFLDTLKQKLALKASRLKRYKKTQQRKDDNNLFTNNQKVFYRKLNVKSGSREKQPTDTPTIEELETFWSSIWENETTHNSQANWIAEEASRWDTVEEMQFEEITEDDIKEITSKLQNWKSPGIDRIHNFWYKKLSIFHKSLAKNFTEILLQQQSIPHFITKGMTYMLPKGEYTSQPNQYRPITCLPTIYKILTSIITYKIRAHTEYHNIIAEEQKGCRRGHMGCKEQLIIDSVIHKNTSNKKHNLHCTYIDYKKAFDSIPHSWLIEILKIYKINSSIINFLKNVMSLWKTTLYLNTFPFPVQTREIAIKKGIYQGDSLSPMWFCLAMNPLSHLLNNCSAGYRLKYDTKNTLISHLIYMDDIKLYAKTDREMKKLVDKTTTFSNDINMEFGIEKCKTVHIIKGKIKTGDYIIEGTQNQVITSMEPNEMYKYLGYFQLKGINHKWVKEKIITEYKKRLRNICKTRLTSKNLIKAVNSYAIPVLTYSFGVIRWSKTNIKTIERTTRTILTRFNYHHPKSAIERLVIKRQDGGRGFIDIHSLWLKQIHHLYRFFHAKAGTSNIHKVVVNNDNNYTPLNLSKPLTLESCDTHNEHKLIETWKTKALHGRHPHDLELPHIDQEASNKWLKVGNLFPETEGFIMAIQDQVINTRNFKKYIIKDPAVVDDKCRKCHLHSETIQHITGACPNLSQTDYTHRHNQIVNIIHKYIATKHKLISDTTTPYYKYTPKTVLENSTHKMYYDRAILTDKTIHYNRPDITLRDKVHKITYLIDIAVPNTHNITKTIAEKAHKYTELKEEVIRIWQQKHAYIIPIVLSATGVVPYHLHHSLKQLGMTQHLYITLQKAAILNTCRIVRKFLQIPDNETQDIIDQLSQLLQ

SEQ ID NO: 21911 - protein, 763 aa, Apodemia virgulti
MQFKDITVEDIKQITSKIQNWKSPGIDRIHNFWYKKLIIFHEPLAKNLTEILLQQQSVPDFITKGMTFMLPKGEYTSQPSQYRPITCLPTIYKILTAIITHKIHAHTEYHNIIAEEQKGCRRGHMGCKEQLIIDSVIHKNTSSKKHNLHCTYIDYRKAFDSIPHSWLIEILKIYKINSSIISFLKNVMPLWKTTLYLNTRHIPIQTRSISIRKGIYQGDSLSPLWFCLAMNPLSYLLKNCLAGYRLKYNTTNTIISHLIYMDDIKLYAKTDREMKKLIDKTTIFSKDINMEFGIDKCKTVHIIKGKIKTGDYIIEGTQNQIIVAMESNEMYKYLGYYQLKGINHKCVKEKIITEYKKRVKNICKTRLTSKHLIKAVNSYAIPVLTYSFGVIQWNKTNIQSIERTTRTILTRFNYHHPKSAMERLIIKRQDGGRGLIDIQSLWLKQLHQLYTFFHNKAGTSNIHKAVASSDNNYTPLNLSKPFIHEPYNTDSEIRLIDSWKTKTLHGRHPHDLDLPHIDKEASNKWLGTGDLFPETEGFIMAIQDQVINTRNYKKHIIKDRELLNDRCRKCHLHSETIQHITGACPSLSQTDYMHRHNQIVNIIHKYLAIKHKLIPETTTPYYQYTPTTVLENSTHKMYYDRAILTDKTIHFNRPDITLRDKINKITYLIDIAVPNTHNITKTIAEKAHKYTELKEEVTRIWQQKHVHIIPIVLSTTGVIPYHLHHSLKQLEMNQYLYITLQKAAILNTCRIARKFLQIPENET

SEQ ID NO: 21912 - protein, 1285 aa, Emesis temesa
MQLNKNRYNLRPLPGGRRGASGAGAGCYSMRDTGGEMLNRRASVTQHATADRRELNRRAYDVETTADASSIPQTSPHSPSLNAPREPYSPSTASYMPTPTQTDTDTESNKSVAPTFAVTQEVSQAFFPASTKAGKQRVRMKWSSDANEFIMRTYYYITKLETDMTIYRTLLHQKFTQKYPGLNITQQRLSDQKRVILRNKLLSETTLKRLKEEAKLQLEEEKSRHESTFYEITQPNDTEEVVNHREEHTSPIFVNNTQIHTISRNTPDVLNLNNPHSQDQNITHNISYYSTQVVNSDHEMDMLSERVPSLDENETYLNIKFQSMLSQYVNSDPTNRPRLPRLKYQFKLHKLVNIFNNKLLSHYLSIDTNLLHIHTLIYCTALVITQELGYKIHENSNNFHYKSQTKPAWQIRLEKDIQELRADIGRLTQYIYHNNRSKRVVERVSSLFMNTRVHTRHENHNKRPEDFLDTLKQKLALKASRLKRYKKTQQRKDDNNLFTNNQKVFYRNLNVKPGNTEQLSPDVPTGEELELFWSTLWENETTHNSQADWINEEATQWDSIEEMQFKEITEEDIKQITSKLQNWKSPGIDRIHNFWYKKLCILHKSLAKNFTEIILQKQSIPHFITKGMTFMLPKGAYTPEPNQYRPITCLPTIYKILTSIITHKIRAHTECHNIIAEEQKGCRRGHMGCKEQLIIDSVIHKNTSIKKHNLHCTYIDYKKAFDNIPHSWLIEILKIYKVNSSILNFLKNVMSLWKTTLHLNSFPVPIQTREISIKKGIFQGDSLSPLWFCLAMNPLSRLLNNSLAGYRLRHNNTYTSISHLIYMDDIKLYAKTNREMKKLIEITTTYSNDINMEFGIDKCKTVHIVKGKIKDGDYIVEDTQNQIIAALEPNEMYKYLGYYQLKGINHNSVKEKLIAEYKKRVKNICKTRLISKNLIKAINSYAVPVLTYSFGVIKWNKTNIQSLERSTRTILTRFNYHHPKSAIERLSIKRQIGGRGLIDICFLWLKQIDLLYSFFHSKARSSNIHKAVAINDYNYTPLNLSKPFTTDNCNEHTVLESWKKKALHGRHPHDLELPNIDKDASNKWLKIGNLFPETEGFIIAIQDQVMNTRNYKKYIIKDPKLIDDKCRKCHLHSETIQHITGACPNLSQTDYTHRHNQIVNIIHKSIATKHKLISETTTPYYKYTPKTVLENSTHKMYYDRAILTDKTIHYNRPDITLRDKVNEITYLIDIAVPNTHNITKTIAEKSHKYIELKEEIIRIWQQKNVYIIPIVLSATGVIPYHLHHS

SEQ ID NO: 21913 - protein, 1334 aa, Emesis brimo
MQLNKNRYDLRPLPGGRRGASGAGAGCYSMRDTGGEALNRRASVTQYATADRRELNRRAYDVETTAEATSIPQTSPNSPSLNVSKEPYSPSTISYMPTPTQTDTETESNNSVTPTFVVTQEVSQAFLPASTKAGKQRVRMKWSSDVNEFIMRTYYYITKLETDMTMYRTLLHQNFTQKYPGINITQQRLSDQKRVILRNKLLSEATLKRLKEEAKLQLDEVQSRNESTVCVITQLNGTEEPINYTKEYMSPNDINTTQIHTIPHFTPDASNHIHPQVYSQDQNITNTSFLSTQVENRVHETDILNEEVPCLDENETYLNYKLQSMLSQYANSDPTNRPRLPRLKYQFKLHKLVNIFNNKLLSHYLSTDTNLSHIHTLIYCTALVITQELGYKIHENNNNIRYKTKTKPAWQIRLEKDIQELRADIGRLTQYIYHNNRSKRVVERVSSLFMNTKIHTRHENCNERPEDFLDTLKQKLALKASRLKRYKKTQQRKDDNNLFTNNQKVFYRNLNTKAGNKEQLSPDVPTGEELELFWSSIWENETTHNSQADWINEETSEWDSIEEMQFKEITEEDIKQITTKLQNWKSPGIDRIHNFWYKKLCILHQSLAKNFTEILLQKQSIPHFITKGMTFMLPKGAYTSEPNQYRPITCLPTLYKILTSIITHKIHAHIEYHNIIAEEQKGCRQGHMGCKEQLIIDSVIHKNTSVKKHNLHCTYIDYKKAFDSIPHSWLIEILKIYKVNSSIVNFLKNVMPLWKTTLHLNSFPVPIQTREISIKKGIYQGDSLSPLWFCLAMNPLSRLLNNCLAGYRLKHNNTNVSISHLIYMDDIKLYAKTNKEMQKLIDITTTFSNDINMEFGIDKCKTVHIIKGKINSGNYIIGGTHNQIIAALEPKEMYKYLGYYQLKGIDHNSAKEKLIAEYKKRVRNVCKSRLTSKNLIKAINSYAIPVLTYSFGVIKWNKTNIQSLERSTRTMLTKFNYHHPKSAIERLIIKRQDGGRGLIDICSLWLKQIHHLYSFFHSKVRSSNIHKAVIINDHNYTPLNLSKPLTIDSCNEHTAIETWKKKALHGRHPHDLELPHIDKDASNKWLKVGNLFPETEGFILAIQDQVMNTRNYKKYIIKDPKLIDDKCRKCHLHSETIQHITGACPNLSQTDYTHRHNQIVNVIHKNLATKHKLIPETTTPYYKYTPKTVLENSTHKMYYDRAILTDKTIHYNRPDITLRDKVNKITYLIDIAVPNTHNITKTIAEKAHKYIELKEEIIRIWQQKNVYIIPIVLSTTGVIPYHLHNSLKQLEINQHLYTTLQKAAILNTCRMVRKFLQIPENETHPDVTNQTLSH

SEQ ID NO: 21914 - protein, 1296 aa, Ctenoptilum multiguttatum
MVKKKNAMRLRSANKLPQAGTGANREGESRPDHSGSGCPTYSGGDTASHTSAQDKTVADNITYTITNQIDVNNSPNSCTLISEPYSPSTASYIPSPVSSGEQSPRETPTLDVAQEGNPLLPASTKAGKQRVRMSWSKEVNIFIMRTYYLITRLETDMTCYRKQLHELFSRQYPQINVSEQRISDQRRTIVRNKLLSQNILNQLKEEARIKLQVQAITTTTVPENLSHNQTHSQNYINTNHTRSESQTSHRQMSHMATQTETETLILENDIEVLVEHNSVNDSYAEEMHNKFKTALTKYSGMDPTARHNLPKLKYSPKLSKLIHIFNQIILHQYISDHIQLIDIHTLIYCTAAVIAEELKYKITEKVSFNRPKNSQQPYWQTRLEKDIEKLRVDCGRLTQYINNNRSKKVIKGVEEIFKRRITHTRHENNNKNPEEFLDTLKQKLALKVHRLRRYKKAQQRKNDNNLFTLNEKIFYRNLLKSKTNNATVEVPSQTQLETFWANIWEERVQHNNKASWITQEENKWSNIEEMNFDTITELDITNVTAKLHNWKSPGVDKVHNYWYKKLTSLHKVIAKNLTDIILGRQKIPQFIATGITYMLPKTNYSSQPSQYRPITCLPTIYKILTSAITHKINAHIEENHIISEEQKGCRRGHMGCKEQLVIDSTIHKHATTKNRNLHCTYIDYTKAFDSIPHSWLLQILQIYKINSKIISFLRKIMCYWKTSLQLNIHEKKIVSRQISIKKGIYQGDSLSPLWFCLALNPLSNLLNNCKAGYRFTPKQTPISHLIYMDDIKLYSKTETDMKTLIDTITNFSRDINMKFGLDKCKTLHIVRGKIKSGNYTIDDDNTIMAMEPTDLYKYLGYKQSKGLDHSTIKHTLRTEYKKRINAICKTQLSGKSLIKAINTYAIPVLSYSFGIIKWSKTDIEQLERITRTTLTKHNHLHPKSAVERLIIKRHAGGRGLIDIHFLWQKQIHNLKTFFHMKSDTSNIHKAIGQNDHNYTPLNLTEQPSTFNLSNNDRQIEKVQNWKKKTLHGRHPHDLEQKHIDPIASNKFLKIGNLFPETEGFIVAIQDQVINTKNYRKFIIKDPTITNDKCRKCHIHSETIQHITGACTSLTQTDYTHRHNQIANIIHQKLALKYNLINDTATPYYKYSPQTVLENASYKLYYDRAILTDKTIHFNRPDITLRNKITNTTYLIDIAVPNSHNIQKTITEKIYKYEELKTEIARIWKQDKVYIVPIVLSTTGIIPYHLQHSLKLLNLKGTLYITLQKAAILNTCRIVRKFMQIEENVSNPYHISI

SEQ ID NO: 21915 - protein, 1291 aa, Apotomis turbidana
MEMNLRSKRLGPLPGGDRRGTPGADAGCLSMRTVSGEELNRRAPSGSSENATANQTDDRLTDHDDVSLNSAVEPYSPSTASYIPSPVSSVGASSRRTPTPDLDVAQVANAFLPASTKSGKPRVRMSWSKDVNLFIMRTYYYITKLETDMTTYRKQLHELFTRQYPTVKVTEQRVSDQRRAIIRNKLLTDHELTRLKNEVETQLNNEDVVNSSNMTLSIPSHSQTQTQDDTQHHSQNTHAPYTLSHMSHTSTQTESITLTLENDIEALVDPETITEPNTQEILDKFNAAITKYSGMNPASRPKLPKLKYSNKLSQLVYLFDRDVLNRFLSDDTQLIDIHTLIYCTAVVISEELNYKITEQTTHGRKKDIKKPPWQIRLERDIEKLRADCGRLTQYIHNNRSHKVVKRVEEIFRSRITHTRHESDNRKPEEYLDTLKQKLALKVHRLRRYMKAQKRKDDNILFTTNEKGFYRNLHTDTQQTQTHTDTAIPTQTQLETFWGSIWEEHIQHNDQADWIETERSKWDTIEEMKFVDFTETDITNITAKLHNWKSPGIDKIHNYWYKKLTSLHTYIAKNLTDIVLGKQNIPEFIATGITYMLPKGTHSILPSQYRPITCLPTIYKILTSAITKKINSHIEHNQIISEEQKGCRRGHMGCKEQLIIDSTIHKHATAKNRNLHCTYIDYKKAFDSVPHSWLLQILEIYKIDPKITHFLRNIMSKWKTTLHLTAGNNTVSTRTISINKGIYQGDSLSPMWFCLALNPLSHLLNKTRVGYNFKNTPTDTRISHLIYMDDIKLYAKTDKDMKKLVDITETFSKDIHMEFGIDKCKTLHIVKGKIQPGNYTLHDSSTITAMETNDLYKYLGYKQLKGLDHTITKQTLSTEYKNRLNKICKTQLTGKNLIKAINTYAIPILTYSFGVIKWSKTDIETIERTTRTTLTKHNHLHPKSAIERLTIKRQEGGRGMININHLWQKQIHSLKNFFHTKSHTSNIHNTIVQNDLNYTPLNLHEHDTQNNNSNDPQARLIDNWKKKVLHGRHPHDLEQSHIDTTASNTWLKIGSLFPETEGFIIAIQDQIVNTKNYRKYIIKDNSLTNDKCRRCHTQSETIQHITGACTTLTQTDYTHRHNQIANIIHQNLAHKHNLFQNTHTPYYKYSPPTVLENTTHKLYYDRAILTDRTIHYNRPDITLIDKINKTTYLIDISVPNTHNIQKTTTEKITKYTELKDEVARIWRQEKVYIVPIVLSTTGVIPKHLHHSLKLLGLKSYIYTILQKAAILNTCRIVRKFMQLDPDNTQIAI

SEQ ID NO: 21916 - protein, 1291 aa, Apotomis turbidana
MEMNLRSKRLGPLPGGDRRGTPGADAGCLSMRTVSGEELNRRAPSGSSENATANQTDDRLTDHDDVSLNSAVEPYSPSTASYIPSPVSSVGASSRRTPTPDLDVAQVANAFLPASTKAGKPRVRMSWSKDVNLFIMRTYYYITKLETDMTTYRKQLHELFTRQYPTVKVTEQRVSDQRRAIIRNKLLTDHELTRLKNEVETQLNNEDVVNSSNMTLSIPSHSQTQTQDDTQHHSQNTHAPYTLSHMSHTSTQTESITLTLENDIEALVDPETITEPNTQEILDKFNAAITKYSGMNPASRPKLPKLKYSNKLSQLVYLFDRDVLNRFLSDDTQLIDIHTLIYCTAVVISEELNYKITEQTTHGRKKDIKKPPWQIRLERDIEKLRADCGRLTQYIHNNRSHKVVKRVEEIFRSRITHTRHESDNRKPEEYLDTLKQKLALKVHRLRRYMKAQKRKDDNILFTTNEKGFYRNLHTDTQQTQTHTDTAIPTQTQLETFWGSIWEEHIQHNDQADWIETERSKWDTIEEMKFVDFTETDITNITAKLHNWKSPGIDKIHNYWYKKLTSLHTYIAKNLTDIVLGKQNIPEFIATGITYMLPKGTHSILPSQYRPITCLPTIYKILTSAIKKKINSHIEHNQIISEEQKGCRRGHMGCKEQLIIDSTIHKHATAKNRNLHCTYIDYKKAFDSVPHSWLLQILEIYKIDPKITHFLCNIMSKWKTTLHLTAGNNTVSTRTISINKGIYQGDSLSPMWFCLALNPLSHLLNKTRVGYNFKNTPTDTRISHLIYMDDIKLYAKTDKDMKKLVDITETFSKDIHMEFGIDKCKTLHIVKGKIQPGNYTLHDSSTITAMETNDLYKYLGYKQLKGLDHTITKQTLSTEYKNRLNKICKTQLTGKNLIKAINTYAIPILTYSFGVIKWSKTDIETIERTTRTTLTKHNHLHPKSAIERLTIKRQEGGRGMININHLWQKQIHSLKNFFHTKSHTSNIHNTIVQNDLNYTPLNLHEHDTQNNNSNDPQARLIDNWKKKVLHGRHPHDLEQSHIDTTASNTWLKIGSLFPETEGFIIAIQDQIVNTKNYRKYIIKDNSLTNDKCRRCHTQSETIQHITGACTTLTQTDYTHRHNQIANIIHQNLAHRHNLIQNTHTPYYKYSPPTVLENTTHKLYYDRAILTDRTIHYNRPDITLIDKINKTTYLIDISVPNTHNIQKTTTEKITKYTELKDEVARIWRQEKVYIVPIVLSTTGVIPKHLHHSLKLLGLKSYIYTILQKAAILNTCRIVRKFMQLDPDNTQIAI

SEQ ID NO: 21917 - protein, 843 aa, Apotomis turbidana
MKAQKRKDDNILFTTNEKGFYRNLHTDTQQTQTHTDTAIPTQTQLETFWGSIWEEHIQHNDQADWIETERSKWDTIEEMKFVDFTETDITNITAKLHNWKSPGIDKIHNYWYKKLTSLHTYIAKNLTDIVLGKQNIPEFIATGITYMLPKGTHSILPSQYRPITCLPTIYKILTSAITKKINSHTEHNQIISEEQKGCRRGHMGCKEQLIIDSTIHKHATAKNRNLHCTYIDYKKAFDSVPHSWLLQILEIYKIDPKITHFLRNIMSKWKTTLHLTAGNNTVSTRTISINKGIYQGDSLSPMWFCLALNPLSHLLNKTRVGYNFKNTPTDTRISHLIYMDDIKLYAKTDKDMKKLVDITETFSKDIHMEFGIDKCKTLHIVKGKIQPGNYTLHDSSTITAMETNDLYKYLGYKQLKGLDHTITKQTLSTEYKNRLNKICKTQLTGKNLIKAINTYAIPILTYSFGVIKWSKTDIETIERTTRTTLTKHNHLHPKSAIERLTIKRQEGGRGMININHLWQKQIHSLKNFFHTKSHTSNIHNTIVQNDLNYTPLNLHEHDTQNNNSNDPQARLIDNWKKKVLHGRHPHDLEQSHIDTTASNTWLKIGSLFPETEGFIIAIQDQIVNTKNYRKYIIKDNSLTNDKCRRCHTQSETIQHITGACTTLTQTDYTHRHNQIANIIHQNLAHKHNLIQNTHTPYYKYSPPTVLENTTHKLYYDRAILTDRTIHYNRPDITLIDKINKTTYLIDISVPNTHNIQKTTTEKITKYTELKDEVARIWRQEKVYIVPIVLSTTGVIPKHLHHSLKLLGLKSYIYTILQKAAILNTCRIVRKFMQLDPDNTQIAI

SEQ ID NO: 21918 - protein, 843 aa, Apotomis turbidana
MKAQKRKDDNILFTTNEKGFYRNLHTDTQQTQTHTDTAIPTQTQLETFWGSIWEEHIQHNDQADWIETERSKWDTIEEMKFVDFTETDITNITAKLHNWKSPGIDKIHNYWYKKLTSLHTYIAKNLTDIVLGKQNIPEFIATGITYMLPKGTHSILPSQYRPITCLPTIYKILTSAITKKINSHIEHNQIISEEQKGCRRGHMGCKEQLIIDSTIHKHATAKNRNLHCTYIDYKKAFDSVPHSWLLQILEIYKIDPKITHFLRNIMSKWKTTLHLTAGNNTVSTRTISINKGIYQGDSLSPMWFCLALNPLSHLLNKTRVGYNFKNTPTDTRISHLIYMDDIKLYAKTDKDMKKLVDITETFSKDIHMEFGIDKCKTLHIVKGKIQPGNYTLHDSSTITAMETNDLYKYLGYKQLKGLDHTITKQTLSTEYKNRLNKICKTQLTGKNLIKAINTYAIPILTYSFGVIKWSKTDIETIERTTRTTLTKHNHLHPKSAIERLTIKRQEGGRGMININHLWQKQIHSLKNFFHTKSHTSNIHNTIVQNDLNYTPLNLHEHDTQNNNSNDPQARLIDNWKKKVLHGRHPHDLEQSHIDTTASNTWLKIGSLFPETEGFIIAIQDQIVNTKNYRKYIIKDNSLTNDKCRRCHTQSETIQHITGACTTLTQTDYTHRHNQIANIIHQNLAHKHNLIQNTHTPYYKYSPPTVLENTTHKLYYDRAILTDRTIHYNRPDITLIDKINKTTYLIDISVPNTHNIQKTTTEKITKYTELKDEVARIWRQEKVYIVPIVLSTTGVIPKHLHHSLKLLGLKSYIYTILQKAAILNTCRIVRKFMQLDPDNTQIAI

SEQ ID NO: 21919 - protein, 1315 aa, Phalera bucephala
MKMVLTRSRVPQAGTSANPAGESRPEPSSGSPSYSGGGNMSQLPTQSQTVVGIQQNPGLNIRTPSPTPTDSTDNSRPNSVTPTLSVTQEANAFHPASTKAGKPRVRMKWTNDVNLFIMRTYYRVTKLETDLTIYRKLLHEHFMRQYPGVIVSEQRVSDQRRVIIRNKMIPHAVLAQIKDEVRIELEQLQSAESQSIYPEPINAISPINTNASSHSVVNSCIEANLTNTNTLSQTYPFSQPLANTPSTNTLLQPFSYTYHTHLQDLRSSLLTSSTHAFTQTETSSLLIVNDIETLQPAPLLDATAHKLKELLQSTLIEYGGTDPRLRPKLPKLRHNTDLTQITELFNKTILNQFFSEDSQLTDIHTLIYCSALVISHELGYKTEGNNRSPRNCDRKPAWQVRLEKDIAQLRSDIGRLTQYINNNRSKRVVARVETIFKNTKTHSIHESNNRKPEEYLDTLKQKLALKAHRLARYKKSLKRKNDNKLFNTNEKLFYRKLNNKDVSTPNSNEIPTVNDLEQFWAGIWEKEEQHNEKASWIAEEERSWETLEGMKFEEITETDMRSVTARLNNWKSPGIDKIHNFWYKKFHSLHKIIAKNLTQIIHGQQNLPHFIAQGITYMLPKDKYTSQPSQYRPITCLPTIYKILTSAITQKISTYVEENHILAEEQKGCRRGHMGCKEQLIIDSIVHRHAATNKRNLHCTYIDYKKAFDSIPHSWLLRILQIYKINPVLIEFLRRTMNIWKTKLYLNNIISREIVIKKGIYQGDSLSPLWFCLALNPLSRILRQHGAGYRLKYDNTDTSISHLIYMDDIKIYAKTEKEMKLLIDTTVEFSKDVNMQFGLDKCKAIHIAKGKIRPGDYLIGEEDRIIAMEPNEVYKYLGYHQSKGLEHTKLKATLSQEYKRRITVICKSQLTGKSLIKAINTYAIPILTYSFGIIKWTKTDIGNLEISTRTILTKHKYLHPKSAIERMTLKRLNGGRGLINLAMLWSKQITNLRLFFQQKAISSDIHTTIVRNDFNYSPLNLAEETVPNIENDSEEVRTEQWKKKVLHGRHPHDLDQPHVDSIASNKWLTIGSLFPETEGFLIAIQDQVINTRNYRKHIIKDPAITDDRCRKCHSHPENIQHITGACPYLTQTDYTHRHNQIANIIHQNLAIKYTLTPNKHTPYYKYSPDPILENSTCKMYFDRAILTDRTIHYNRPDITLQDKINKTTYLIDIAVPNTHNLQKTIAEKVHKYTDLKDEVTRIWKQDKVYIVPIVLSTTGIIPRYLHHSLKLIGLNPSIYIQIQKAAILNTCRIVRKFLQIEEETNETDRQLDTRS

SEQ ID NO: 21920 - protein, 1315 aa, Phalera bucephala
MKMVLTRSRVPQAGTSANPTGESRPEPSSGSPSYSGGGNMSQLPTQSQTVVGIQQNPGLNIRTPSPTPTDSTDNSRPNSVTPTLSVTQEANAFHPASTKAGKPRVRMKWTNDVNLFIMRTYYRVTKLETDLTIYRKLLHEHFMRQYPGVIVSEQRVSDQRRVIIRNKMIPHAVLAQIKDEVRIELEQLQSAESQSIYPEPINAISPINTNASSHSVVNSCIEANLTNTNTLSQTYPFSQPLANTPSTNTLLQPFSYTYHTHLQDLRSSLLTSSTHAFTQTETSSLLIVNDIETLQPAPLLDATAHKLKELLQSTLIEYGGTDPRLRPKLPKLRHNTDLTQITELFNKTILNQFFSEDSQLTDIHTLIYCSALVISHELGYKTEGNNRSPRNCDRKPAWQVRLEKDIAQLRSDIGRLTQYINNNRSKRVVARVETIFKNTKTHSIHESNNRKPEEYLDTLKQKLALKAHRLARYKKSLKRKNDNKLFNTNEKLFYRKLNNKDVSTPNSNEIPAVNDLEQFWAGIWEKEEQHNEKASWIAEEERSWETLEGMKFEEITETDMRSVTARLNNWKSPGIDKIHNFWYKKFHSLHKIIAKNLTQIIHGQQNLPHFIAQGITYMLPKDKHTSQPSQYRPITCLPTIYKILTSAITQKISTYVEENHILAEEQKGCRRGHMGCKEQLIIDSIVHRHAATNKRNLHCTYIDYKKAFDSIPHSWLLRILQIYKINPVLIEFLRRTMNIWKTKLYLNNIISREIVIKKGIYQGDSLSPLWFCLALNPLSRILRQHGAGYRLKYDNTDTSISHLIYMDDIKIYAKTEKEMKLLIDTTVEFSKDVNMQFGLDKCKAIHIVKGKIRPGDYLIGEEDRIIAMEPNEVYKYLGYHQSKGLEHTKLKATLSQEYKRRITVICKSQLTGKSLIKAINTYAIPILTYSFGIIKWTKTDIGNLEISTRTILTKHKYLHPKSAIERMTLKRLNGGRGLINLAMLWSKQITNLRLFFQQKAISSDIHTTIVRNDFNYSPLNLAEETVPNIENDSEEVRTEQWKKKVLHGRHPHDLDQPHVDSIASNKWLTIGSLFPETEGFLIAIQDQVINTRNYRKHIIKDPAITDDRCRKCHSHPENIQHITGACPYLTQTDYTHRHNQIANIIHQNLAIKYTLTPNKHTPYYKYSPDPILENSTCKMYFDRAILTDRTIHYNRPDITLQDKINKTTYFIDIAVPNTHNLQKTIAEKVHKYTDLKDEVTIIWKQDKVYIVPIVLSTTGIIPRYLHHSLKLIGLNPSIYIQIQKAAILNTCRIVRKFLQIEEETNETDRQLDTRS

SEQ ID NO: 21921 - protein, 1315 aa, Phalera bucephala
MKMVLTRSRVPQAGTSANPTGESRPEPSSGSPSYSGGGNMSQLPTQSQTVVGIQQNPGLNIRTPSPTPTDSTDNSRPNSVTPTLSVTQEANAFHPASTKAGKPRVRMKWTNDVNLFIMRTYYRVTKLETDLTIYRKLLHEHFMRQYPGVIVSEQRVSDQRRVIIRNKMIPHAVLAQIKDEVRIELEQLQSAESQSIYPEPINAISPINTNASSHSVVNSCIEANLTNTNTLSQTYPFSQPLANTPSTNTLLQPFSYTYHTHLQDLRSSLLTSSTHAFTQTETSSLLIVNDIETLQPAPLLDATAHKLKELLQSTLIEYGGTDPRLRPKLPKLRHNTDLTQITELFNKTILNQFFSEDSQLTDIHTLIYCSALVISHELGYKTEGNNRSPRNCDRKPAWQVRLEKDIAQLRSDIGRLTQYINNNRSKRVVARVETIFKNTKTHSIHESNNRKPEEYLDTLKQKLALKAHRLARYKKSLKRKNDNKLFNTNEKLFYRKLNNKDVSTPNSNEIPAVNDLEQFWAGIWEKEEQHNEKASWIAEEERSWETLEGMKFEEITETDMRSVTARLNNWKSPGIDKIHNFWYKKFHSLHKIIAKNLTQIIHGQQNLPHFIAQGITYMLPKDKHTSQPSQYRPITCLPTIYKILTSAITQKISTYVEENHILAEEQKGCRRGHMGCKEQLIIDSIVHRHAATNKRNLHCTYIDYKKAFDSIPHSWLLRILQIYKINPVLIEFLRRTMNIWKTKLYLNNIISREIVIKKGIYQGDSLSPLWFCLALNPLSRILRQHGAGYRLKYDNTDTSISHLIYMDDIKIYAKTEKEMKLLIDTTVEFSKDVNMQFGLDKCKAIHIVKGKIRPGDYLIGEEDRIIAMEPNEVYKYLGYHQSKGLEHTKLKATLSQEYKRRITVICKSQLTGKSLIKAINTYAIPILTYSFGIIKWTKTDIGNLEISTRTILTKHKYLHPKSAIERMTLKRLNGGRGLINLAMLWSKQITNLRLFFQQKAISSDIHTTIVRNDFNYSPLNLAEETVPNIENDSEEVRTEQWKKKVLHGRHPHDLDQPHVDSIASNKWLTIGSLFPETEGFLIAIQDQVINTRNYRKHIIKDPAITDDRCRKCHSHPENIQHITGACPYLTQTDYTHRHNQIANIIHQNLAIKYTLTPNKHTPYYKYSPDPILENSTCKMYFDRAILTDRTIHYNRPDITLQDKINKTTYLIDIAVPNTHNLQKTIAEKVHKYTDLKDEVTRIWKQDKVYIVPIVLSTTGIIPRYLHHSLKLIGLNPSIYIQIQKAAILNTCRIVRKFLQIEEETNETDRQLDTRS

SEQ ID NO: 21922 - protein, 1315 aa, Phalera bucephala
MKMVLTRSRVPQAGTSANPTGESRPEPSSGSPSYSGGGNMSQLPTQSQTVVGIQQNPGLNIRTPSPTPTDSTDNSRPNSVTPTLSVTQEANAFHPASTKAGKPRVRMKWTNDVNLFIMRTYYRVTKLETDLTIYRKLLHEHFMRQYPGVIVSEQRVSDQRRVIIRNKMIPHAVLAQIKDEVRIELEQLQSAESQSIYPEPINAISPINTNASSHSVVNSCIEANLTNTNTLSQTYPFSQPLANTPSTNTLLQPFSYTYHTHLQDLRSSLLTSSTHAFTQTETSSLLIVNDIETLQPAPLLDATAHKLKELLQSTLIEYGGTDPRLRPKLPKLRHNTNLTQITELFNKTILNQFFSEDSQLTDIHTLIYCSALVISHELGYKTEGNNRSPRNCDRKPAWQVRLEKDIAQLRSDIGRLTQYINNNRSKRVVARVETIFKNTKTHSIHESNNRKPEEYLDTLKQKLALKAHRLARYKKSLKRKNDNKLFNTNEKLFYRKLNNKDVSTPNSNEIPTVNDLEQFWAGIWEKEEQHNEKASWIAEEERSWETLEGMKFEEITETDMRSVTARLNNWKSPGIDKIHNFWYKKFHSLHKIIAKNLTQIIHGQQNLPHFIAQGITYMLPKDKHTSQPSQYRPITCLPTIYKILTSAITQKISTYVEENHILAEEQKGCRRGHMGCKEQLIIDSIVHRHAATNKRNLHCTYIDYKKAFDSIPHSWLLRILQIYKINPVLIEFLRRTMNIWKTKLYLNNIISREIVIKKGIYQGDSLSPLWFCLALNPLSRILRQHGAGYRLKYDNTDTSISHLIYMDDIKIYAKTEKEMKLLIDTTVEFSKDVNMQFGLDKCKAIHIVKGKIRPSDYLIGEEDRIIAMEPNEVYKYLGYHQSKGLEHTKLKATLSQEYKRRITVICKSQLTGKSLIKAINTYAIPILTYSFGIIKWTKTDIGNLEISTRTILTKHKYLHPKSAIERMTLKRLNGGRGLINLAMLWSKQITNLRLFFQQKAISSDIHTTIVRNDFNYSPLNLAEETVPNIENDSEEVRTEQWKKKVLHGRHPHDLDQPHVDSIASNKWLTIGSLFPETEGFLIAIQDQVINTRNYRKHIIKDPAITDDRCRKCHSHPENIQHITGACPYLTQTDYTHRHNQIANIIHQKLAIKYTLTPNKHTPYYKYSPDPILENSTCKMYFDRAILTDRTIHYNRPDITLQDKINKTTYLIDIAVPNTHNLQKTIAEKVHKYTDLKDEVTRIWKQDKVYIVPIVLSTTGIIPRYLHHSLKLIGLNPSIYIQIQKAAILNTCRIVRKFLQIEEETNETDRQLDTRS

SEQ ID NO: 21923 - protein, 1315 aa, Phalera bucephala
MKMVLTRSRVPQAGTSANPTGESRPEPSSGSPSYSGGGNMSQLPTQSQTVVGIQQNPGLNIRTPSPTPTDSTDNSRPNSVTPTLSVTQEANAFHPASTKAGKPRVRMKWTNDVNLFIMRTYYRVTKLETDLTIYRKLLHEHFMRQYPGVIVSEQRVSDQRRVIIRNKMIPHAVLAQIKDEVRIELEQLQSAESQSIYPEPINAISPINTNASSHSVVNSCIEANLTNTNTLSQTYPFSQPLANTPSTNTLLQPFSYTYHTHLQDLRSSLLTSSTHAFTQTETSSLLIVNDIETLQPAPLLDATAHKLKELLQSTLIEYGGTDPRLRPKLPKLRHNTDLTQITELFNKTILNQFFSEDSQLTDIHTLIYCSALVISHELGYKTEGNNRSPRNCDRKPAWQVRLEKDIAQLRSDIGRLTQYINNNRSKRVVARVETIFKNTKTHSIHESNNRKPEEYLDTLKQKLALKAHRLARYKKSLKRKNDNKLFNTNEKLFYRKLNNKDVSTPNSNEIPTVNDLEQFWAGIWEKEEQHNEKASWIAEEERSWETLEGMKFEEITETDMRSVTARLNNWKSPGIDKIHNFWYKKFHSLHKIIAKNLTQIIHGQQNLPHFIAQGITYMLPKDKHTSQPSQYRPITCLPTIYKILTSAITQKISTYVEENHILAEEQKGCRRGHMGCKEQLIIDSIVHRHAATNKRNLHCTYIDYKKAFDSIPHSWLLRILQIYKINPVLIEFLRRTMNIWKTKLYLNNIISREIVIKKGIYQGDSLSPLWFCLALNPLSRILRQHGAGYRLKYDNTDTSISHLIYMDDIKIYAKTEKEMKLLIDTTVEFSKDVNMQFGLDKCKAIHIVKGKIRPGDYLIGEEDRIIAMEPNEVYKYLGYHQSKGLEHTKLKATLSQEYKRRITVICKSQLTGKSLIKAINTYAIPILTYSFGIIKWTKTDIGNLEISTRTILTKHKYLHPKSAIERMTLKRLNGGRGLINLAMLWSKQITNLRLFFQQKAISSDIHTTIVRNDFNYSPLNLAEETVPNIENDSEEVRTEQWKKKVLHGRHPHDLDQPHVDSIASNKWLTIGSLFPETEGFLIAIQDQVINTRNYRKHIIKDPAITDDRCRKCHSHPENIQHITGACPYLTQTDYTHRHNQIANIIHQNLAIKYTLTPNKHTPYYKYSPDPILENSTCKMYFDRAILTDRTIHYNRPDITLQDKINKTTYLIDIAVPNTHNLQKTIAEKVHKYTDLKDEVTRIWKQDKVYIVPIVLSTTGIIPRYLHHSLKLIGLNPSIYIQIQKAAILNTCRIVRKFLQIEEETNETDRQLDTRS

SEQ ID NO: 21924 - protein, 1173 aa, Phalera bucephala
MRQYPGVIVSEQRVSDQRRVIIRNKMIPHAVLAQIKDEVRIELEQLQSAESQSIYPEPINAISPINTNASSHSVVNSCIEANLTNTNTLSQTYPFSQPLANTPSTNTLLQPFSYTYHTHLQDLRSSLLTSSTHAFTQTETSSLLIVNDIETLQPAPLLDATAHKLKELLQSTLIEYGGTDPRLRPKLPKLRHNTDLTQITELFNKTILNQFFSEDSQLTDIHTLIYCSALVISHELGYKTEGNNRSPRNCDRKPAWQVRLEKDIAQLRSDIGRLTQYINNNRSKRVVARVETIFKNTKTHSIHESNNRKPEEYLDTLKQKLALKAHRLARYKKSLKRKNDNKLFNTNEKLFYRKLNNKDVSTPNSNEIPTVNDLEQFWAGIWEKEKQHNEKASWIVEEERSWETLEGMKFEEITETDMRSVTARLNNWKSPGIDKIHNFWYKKFHSLHKIIAKNLTQIIHGQQNLPHFIAQGITYMLPKDKHTSQPSQYRPITCLPTIYKILTSAITQKISTYVEENHILAEEQKGCRRGHMGCKEQLIIDSIVHRHAATNKRNLHCTYIDYKKAFDSIPHSWLLRILQIYKINPVLIEFLRRTMNIWKTKLYLNNIISREIVIKKGIYQGDSLSPLWFCLALNPLSRILRQHGAGYRLKYDNTDTSISHLIYMDDIKIYAKTEKEMKLLIDTTVEFSKDVNMQFGLDKCKAIHIVKGKIRPGDYLIGEEDRIIALEPNEVYKYLGYHQSKGLEHTKLKATLSQEYKRRITVICKSQLTGKSLIKAINTYAIPILTYSFGIIKWTKTDIGNLEISTRTILTKHKYLHPKSAIERMTLKRLNGGRGLINLAMLWSKQITNLRLFFQQKAISSDIHTTIVRNDFNYSPLNLAEETVPNIENDSEEVRTEQWKKKVLHGRHPHDLDQPHVDSIASNKWLTIGSLFPETEGFLIAIQDQVINTRNYRKHIIKDPAITDDRCRKCHSHPENIQHITGACPYLTQTDYTHRHNQIANIIHQNLAIKYTLTPNKHTPYYKYSPDPILENSTCKMYFDRAILTDRTIHYNRPDITLQDKINKTTYLIDIAVPNTHNLQKTIAEKVHKYTDLKDEVTRIWKQDKVYIVPIVLSTTGIIPRYLHHSLKLIGLNPSIYIQIQKAAILNTCRIVRKFLQIEEETNETDRQLDTRS

SEQ ID NO: 21925 - protein, 1315 aa, Phalera bucephala
MKMVLTRSRVPQAGTSANPTGESRPEPSSGSPSYSGGGNMSQLPTQSQTVVGIQQNPGLNIRTPSPTPTDSTDNSRPNSVTPTLSVTQEANAFHPASTKAGKPRVRMKWTNDVNLFIMRTYYRVTKLETDLTIYRKLLHEHFMRQYPGVIVSEQRVSDQRRVIIRNKMIPHAVLAQIKDEVRIELEQLQSAESQSIYPEPINAISPINTNASSHSVVNSCIEANLTNTNTLSQTYPFSQPLANTPSTNTLLQPFSYTYHTHLQDLRSSLLTSSTHAFTQTETSSLLIVNDIETLQPAPLLDATAHKLKELLQSTLIEYGGTDPRLRPELPKLRHNTDLTQITELFNKTILNQFFSEDSQITDIYTLIYCSALVISHELGYKTEGNNRSPRNCDRKPAWQVRLEKDIAQLRSDIGRLTQYINNNRSKRVVARVETIFKNTKTHSIHESNNRKPEEYLDTLKQKLALKAHRLARYKKSLKRKNDNKLFNTNEKLFYRKLNNKDVSTPNSNEIPTVNDLEQFWAGIWEKEEQHNEKASWIAEEERSWETLEGMKFEEITETDMRSVTARLNNWKSPGIDKIHNFWYKKFHSLHKIIAKNLTQIIHGKQNLPHFIAQGITYMLPKDKHTSQPSQYRPITCLPTIYKILTSAITQKISTYVEENHILAEEQKGCRRGHMGCKEQLIIDSIVHRHAATNKRNLHCTYIDYKKAFDSIPHSWLLRILQIYKINPVLIEFLRRTMNIWKTKLYLNNIISREIVIKKGIYQGDSLSPLWFCLALNPLSRILRQHGAGYRLKYDNTDTSISHLIYMDDIKIYAKTEKEMKLLIDTTVEFSKDVNMQFGLDKCKAIHIVKGKIRPGDYLIGEEDRITAMEPNEVYKYLGYHQSKGLEHTKLKATLSQEYKRRITVICKSQLTGKSLIKAINTYAIPILTYSFGIIKWTKTDIGNLEISTRTILTKHKYLHPKSAIERMTLKRLNGGRGLINLAMLWSKQITNLRLFFQQKAISSDIHTTIVRNDFNYSPLNLAEETVPNIENDSEEVRTEQWKKKVLHGRHPHDLDQPHVDSIASNKWLTIGSLFPETEGFLIAIQDQVINTRNYRKHIIKDPAITDDRCRKCHSHPENIQHITGACPYLTQTDYTHRHNQIANIIHQNLAIKYTLTPNKHTPYYKYSPDPILENSTCKMYFDRAILTDRTIHYNRPDITLQDKINKTTYLIDIAVPNTHNLQKTIAEKVHKYTDLKDEVTRIWKQDKVYIVPIVLSTTGIIPRYLHHSLKLIGLNPSIYIQIQKAAILNTCRIVRKFLQIEEETNETDRQLDTRS

SEQ ID NO: 21926 - protein, 1315 aa, Phalera bucephala
MKMVLTRSRVPQAGTSANPTGESRPEPSSGSPSYSGGGNMSQLPTQSQTVVGIQQNPGLNIRTPSPTPTDSTDNSRPNSVTPTLSVTQEANAFHPASTKAGKPRVRMKWTNDVNLFIMRTYYRVTKLETDLTIYRKLLHEHFMRQYPGVIVSEQRVSDQRRVIIRNKMIPHAVLAQIKDEVRIELEQLQSAESQSIYPEPINAISPINTNASSHSVVNSCIEANLTNTNTLSQTYPFSQPLANTPSTNTLLQPFSYTYHTHLQDLRSSLLTSSTHAFTQTETSSLLIVNDIETLQPPPLLDATAHKLKELLQSTLIEYGGTDPRLRPKLPKLRHNTDLTQITELFNKTILNQFFSEDSQLTDIHTLIYCSALVISHELGYKTEGNNRSPRNCDRKPAWQVRLEKDIAQLRSDIGRLTQYINNNRSKRVVARVETIFKNTKTHSIHESNNRKPEEYLDTLKQKLALKAHRLARYKKSLKRKNDNKLFNTNEKLFYRKLNNKDVSTPNSNEIPAVNDLEQFWAGIWEKEEQHNEKASWIAEEERSWETLEGMKFEEITETDMRSVTARLNNWKSPGIDKIHNFWYKKFHSLHKIIAKNLTQIIHGQQNLPHFIAQGITYMLPKDKHTSQPSQYRPITCLPTIYKILTSAITQKISTYVEENHILAEEQKGCRRGHMGCKEQLIIDSIVHRHAATNKRNLHCTYIDYKKAFDSIPHSWLLRILQIYKINPVLIEFLRRTMNIWKTKLYLNNIISREIVIKKGIYQGDSLSPLWFCLALNPLSRILRQHGAGYRLKYDNTDTSISHLIYMDDIKIYAKTEKEMKLLIDTTVEFSKDVNMQFGLDKCKAIHIVKGKIRPGDYLIGEEDRIIAMEPNEVYKYLGYHQSKGLEHTKLKATLSQEYKRRITVICKSQLTGKSLIKAINTYAIPILTYSFGIIKWTKTDIGNLEISTRTILTKHKYLHPKSAIERMTLKRLNGGRGLINLAMLWSKQITNLRLFFQQKAISSDIHTTIVRNDFNYSPLNLAEETVPNIENDSEEVRTEQWKKKVLHGRHPHDLDQPHVDSIASNKWLTIGSLFPETEGFLIAIQDQVINTRNYRKHIIKDPAITDDRCRKCHSHPENIQHITGACPYLTQTDYTHRHNQIANIIHQNLAIKYTLTPNKHTPYYKYSPDPILENSTCKMYFDRAILTDRTIHYNRPDITLQDKINKTTYLIDIAVPNTHNLQKTIAEKVHKYTDLKDEVTRIWKQDKVYIVPIVLSTTGIIPRYLHHSLKLIGLNPSIYIQIQKAAILNTCRIVRKFLQIEEETNETDRQLDTRS

SEQ ID NO: 21927 - protein, 1315 aa, Phalera bucephala
MKMVLTRSRVPQAGTSANPTGESRPEPSSGSPSYSGGGNMSQLPTQSQTVVGIQQNPGLNIRTPSPTPTDSTDNSRPNSVTPTLSVTQEANAFHPASTKAGKPRVRMKWTNDVNLFIMRTYYRVTKLETDLTIYRKLLHEHFMRQYPGVIVSEQRVSDQRRVIIRNKMIPHAVLAQIKDEVRIELEQLQSAESQSIYPEPINAISPINTNASSHSVVNSCIEANLTNTNTLSQTYPFSQPLANTPSTNTLLQPFSYTYHTHLQDLRSSLLTSSTHAFTQTETSSLLIVNDIETLQPAPLLDATAHKLKELLQSTLIEYGGTDPRLRPKLPKLRHNTNLTQITELFNKTILNQFFSEDSQLTDIHTLIYCSALVISHELGYKTEGNNRSPRNCDRKPAWQVRLEKDIAQLRSDIGRLTQYIKNNRSKRVVARVETIFKNTKTHSIHESNNRKPEEYLDTLKQKLALKAHRLARYKKSLKRKNDNKLFNTNEKLFYRKLNNKDVSTPNSNEIPTVNDLEQFWAGIWEKEEQHNEKASWIAEEERSWETLEGMKFEEITETDMRSVTARLNNWKSPGIDKIHNFWYKKFHSLHKIIAKNLTQIIHGQQNLPHFIAQGITYMLPKDKHTSQPSQYRPITCLPTIYKILTSAITQKISTYVEENHILAEEQKGCRRGHMGCKEQLIIDSIVHRHAATNKRNLHCTYIDYKKAFDSIPHSWLLRILQIYKINPVLIEFLRRTMNIWKTKLYLNNIISREIVIKKGIYQGDSLSPLWFCLALNPLSRILRQHGAGYRLKYDNTDTSISHLIYMDDIKIYAKTEKEMKLLIDTTVEFSKDVNMQFGLDKCKAIHIVKGKIRPGDYLIGEEDRIIAMEPNEVYKYLGYHQSKGLEHTKLKATLSQEYKRRITVICKSQLTGKSLIKAINTYAIPILTYSFGIIKWTKTDIGNLEISTRTILTKHKYLHPKSAIERMTLKRLNGGRGLINLAMLWSKQITNLRLFFQQKAISSDIHTTIVRNDFNYSPLNLAEETVPNIENDSEEVRTEQWKKKVLHGRHPHDLDQPHVDSIASNKWLTIGSLFPETEGFLIAIQDQVINTRNYRKHIIKDPAITDDRCRKCHSHPENIQHITGACPYLTQTDYTHRHNQIANIIHQKLAIKYTLTPNKHTPYYKYSPDPILENSTCKMYFDRAILTDRTIHYNRPDITLQDKINKTTYLIDIAVPNTHNLQKTIAEKVHKYTDLKDEVTRIWKQDKVYIVPIVLSTTGIIPRYLHHSLKLIGLNPSIYIQIQKAAILNTCRIVRKFLQIEEETNETDRQLDTRS

SEQ ID NO: 21928 - protein, 1315 aa, Phalera bucephala
MKMVLTRSRVPQAGTSANPTGESRPEPSSGSPSYSGGGNMSQLPTQSQTVVGIQQNPGLNIRTPSPTPTDSTDNSRPNSVTPTLSVTQEANAFHPASTKAGKPRVRMKWTNDVNLFIMRTYYRVTKLETDLTIYRKLLHEHFMRQYPGVIVSEQRVSDQRRVIIRNKMIPHAVLAQIKDEVRIELEQLQSAESQSIYPEPINAISPINTNASSHSVVNSCIEANLTNTNTLSQTYPVSQPLANTPSTNTLLQPFSYTYHTHLQDLRSSLLTSSTHAFTQTETSSLLIVNDIETLQPAPLVDATAHKLKELLQSTLIEYGGTDPRLRPKLPKLRHNTDLTQITELFNKTILNQFFSEDSQLTDIHTLIYCSALVISHELGYKTEGNNRSPRNCDRKPAWQVRLEKDIAQLRSDIGRLTQYINNNRSKKVVARVETIFKNTKTHSIHESNNRKPEEYLDTLKQKLALKAHRLARYKKSLKRKNDNKLFNTNEKLFYRKLNNKDVSTPNSNEIPTVNDLEQFWAGIWEKEEQHNEKASWIAEEERSWETLEGMKFEEITETDMRSVTARLNNWKSPGIDKIHNFWYKKFHSLHKIIAKNLTQIIHGQQNLPHFIAQGITYMLPKDKHTSQPSQYRPITCLPTIYKILTSAITQKISTYVEENHILAEEQKGCRRGHMGCKEQLIIDSIVHRHAATNKRNLHCTYIDYKKAFDSIPHSWLLRILQIYKINPVLIEFLRRTMNIWKTKLYLNNIISREIVIKKGIYQGDSLSPLWFCLALNPLSRILRQHGAGYRLKYDNTDTSISHLIYMDDIKIYAKTEKEMKLLIDTTVEFSKDVNMQFGLDKCKAIHIVKGKIRPGDYLIGEEDRIIAMEPNEVYKYLGYHQSKGLEHTKLKATLSQEYKRRITVICKSQLTGKSLIKAINTYAIPILTYSFGIIKWTKTDIGNLEISTRTILTKHKYLHPKSAIERMTLKRLNGGRGLINLAMLWSKQITNLRLFFQQKAISSDIHTTIVRNDFNYSPLNLAEETVPNIENDSEEVRTEQWKKKVLHGRHPHDLDQPHVDSIASNKWLTIGSLFPETEGFLIAIQDQVINTRNYRKHIIKDPAITDDRCRKCHSHPENIQHITGACPYLTQTDYTHRHNQIANIIHQNLAIKYTLTPNKHTPYYKYSPDPILENSTCKMYFDRAILTDRTIHYNRPDITLQDKINKTTYLIDIAVPNTHNLQKTIAEKVHKYTDLKDEVTRIWKQDKVYIVPIVLSTTGIIPRYLHHSLKLIGLNPSIYIQIQKAAILNTCRIVRKFLQIEEETNETDRQLDTRS

SEQ ID NO: 21929 - protein, 1282 aa, Graphium sarpedon
MEMNLRSKRLRPLPGGDRRGTPGADAGCLSMRTVSGEELIRRAPSGYSENVTANQLDNRLTDFDTISSISTVEPNNFSTASSVASPSVGASGAPTLNLDVAQVANAFLPVSTKSGKPRVRMSWSKNVNLFIMRTYFYITKLETDMTTYRKQLYELFSRRYPTVKVTEQRVSDQKRAIIRNKLLSEQELTRLKEEVQTQLSIDLEHNSNTATITLSQDQNLEITQFQSQHTTNRHMSNMSTQTETTTVTLENEILTLIDPVKITEPNTQVILDKLHTAITKYSGMNPASRPKLPKLKYSYKLSQLVYLFDQDILHRFLSDGIQLIDIHTLIYCTAVVISEELNYEITEHTTQNNKKCNNKPAWQVRLERDIEKLRADCGRLTQFINNNRSRKVVKRVEEIFKRRSTHTRHEIDNKTPEEYLDTLKQNLALKVHRLRRYMKAQNRKTDNILFTTNEKGFYRNLHNYKQNTRTHTNTTIPSQTQLEEFWSSIWEEQTQHNDRADWIETERSKYNKIKEMEFENITETDIANITAKLHNWKSPGIDKIHNFWYKKLKSLHKSIATNITDIITGQQTIPEFIATGITYMLPKTTHTSQPSQYRPITCLPTIYKILTSAITRKINSHIEHNQILSEEQKGCRQGHMGCKEQLIIDSIIHKHVAAKNRNLHCTYIDYKKAFDNIPHSWLLQILEIYKIDQKLIHFLKNIMSKWKTTLQLNADNNIVTTRTISIKKGIYQGDSLSPMWFCLALNPLSHLLNNSRVGYSFKNTTTDTRISHLIYMDDIKLYAKTDKDMKKLVDITAKFSSDINMEFGIDKCKTLHIIKGKIQPGNYIINDNNIIAAMEPNDLYKYLGYKQLKGLDHTATKQTLSIEYKNRLIKICKTQLSGKNLIKAINSYAIPILTYSFGVIKWSKTDIETIERTTRTTLTKHNHLHPKSAIERLTIKRQEGGRGMIHIIHLWQKQVQSLQTFFHKKSYTSNIHNTIVQNDNNYTPLNLREQHDTQNITGNDSQVLLINNWKKKALHGRHPHDLGQTHIDATASNTWLKIGSLFPETEGFIIAIQDQIVNTKNYRKYIIKDPSLSNDKCRRCHTHSETIQHITGACTTLTQTDYTHRHNQIANIMHQNLAHKHNLIENNHTPYYKYTPQTVLENTTHKLYYDRAILTDRTIHYNRPDITLIDKINKITYLIDIAVPNTHNIQKTITEKVTKYAELKEEVARIWRQEKVYVVPIVLSTTGVIPKHLHHSLKLLNMKPYIYTILQKAAILNTCRIVRKFMQLDPENIPLEST

SEQ ID NO: 21930 - protein, 1345 aa, Calephelis perditalis
MENKRYNLRPLPGGRRGAPGAGAGCFSMRDTGDEVLNRRVPVTQYTTAERRELNRRATDDNATAEALDVHSSNNRNQALDVMSINQNSETGNTSPSFSFQEPYSPSTTSYAPTPTLTDENSNDSFRPTFDVTRQACQAFLPASTKAGKPRVRMKWSFEVNAFIMRTYFYITKLETNMTAYRQILHQKFKEKYPEVNVTEQRLSDQRRVILKNKLLNEDILIGLKEEVKTILEQEEYSDTLTTIEKATHTPTQQSMEPHNVTTTQSLPIDNPPESTQTHLLVNLQNYTNTCTSELSSQSRNIIANDENSLGHEIIEENCDIKELENKLDLALQQYARLDPMKRPTLPKLRYTKKLVGLVHVFNTRVLGRYILDDIKLTDVHTLIYCTAYVITQELGYTIKEDQNNRHYNSQSKKTKPIWQIRLEKDIQNLRADIGRLTQYINHDNRSKKVMKSVTRIFQNQTLHTRHEGINKNPEEFLDTLKQKLALKASRLKRYNKSLQRKEDNKLFLINQKAFYRKLNLGLTHTTNERETETPNISELETFWSNIWETEITHNTSAEWISKEYSRWDSLEEMPFEEVTGEEIKQITCNLHNWKSPGIEKVHNFWLKKLTILHEILGKNITEIILLKQEIPNFIVKGVTYMIPKEQHTTQPSKYRPITCLPTIYKLITSVITNKIRLHTEKHNIIAEEQKGCRRGHMGCKEQLVIDSVIHRNASTKNRNLHCTYIDYQKAFDSVPHSWLINVLKIYKINTSVIEFLKKTMQLWKTTLYVNNSTTREISIKRGIFQGDSLSPLWFCLAMNPLSRLLCSCNAGYSLKHGNSQTKISHLIYMDDIKLYSKSDVEMRRLIEKTSTFSRDINMQFGLDKCRTLHIVKGKVQTGNYIINGDQNQIIEAMGTNDVYKYLGYQQLKKGIDQKNVRECLISEYNKRVSNICKTRLNGKHLVRAINTYAVPVLTYSFGVIQWSKTSILSLQRSTRKILTKHNHHHPKSAVERLTIKREEGGRGLIDIHVLWRKQIQNLQSFFFLKSGSSDIHRAIVFNDNHYTPLNLVHIQQTGPQNTANLDITKELWRKKALHGRHPHDLDQPMIDKEASNKFLKIGSLFPETEGFIIAIQDQVINTRNHKKYIIKDPTVTNDRCRKCHIHSETIQHITGACPNLTQTDYTHRHNQIVNIIHKNLAINHKLIQDTHTPYYKYKPDTILENSTHKIYYDRAILTDRTIHFNRPDITLQDKINKITYLIDIAVPNTHNITKTITEKIHKYTELKDEILTIWKQKKVYIVPIVLSTTGVIPKHIHNSLKLLNLSKYTYTILQKAAILNTCRIVRKFLEINEEDITPHSIEPFINTST

SEQ ID NO: 21931 - protein, 1174 aa, Emesis fastidiosa
MPASTKAGKTRVRMRWSKEINIFIMRTYLYITKLETDMTTYRQQLHELFSRQYPEISISEQRIADQRRTIVRNKLLSQEEVNQLREEVRIELDNAVENNTSLNTNTLPEIHTQSPTNIQTHSQLQTQTSHTSTQTESITLTLENDIEILVVDPITETHIQGIKDKFRSTLTQYAGMDPASRPKLPKLKYSANLFRLVNLFNESILKQFISKDTQLIDVHTLIYCTAVVISEEINFKITENTRNIINRHNTKPPWQQRLEKDIEKIRADLGRLTQYINNNRSNKIVKRVEAIFKNCYIHTKHENNNVKPEQFLDTLKQKLALKVHRLKRYKMTQQRKDDNSIFATNEKIFYRKIQKPQVDTSINNENDTPTKEDLETFWSNIWENQIQHNEKATWIGEEETKWRTIEEMEFAEITGSDITNITARLHNWKSPGIDKIHNFWYKKLNSLHETIARNLTNIILGKQNVPNFLTTGITYMLPKTKHTSLPSQYRPITCLPTIYKILTSAIAIKINTHIVKHNIIAEEQKGCRRGHMGCKEQLIIDSVIHKHASTKNRNLHCTYIDYQKAFDSIPHSWLIQILQIYKINSKIIDFLHNIMSQWKTTLHLNNSHNTIITREIGIKKGIYQGDSLSPLWFCFALNPLSSLLHRCRVGYNLKYNNEETIISHLIYMDDIKLYGKTEKEMKTLIETTTKFSQDINMQFGIDKCKTLHIIKGKIKRGNYEVSDTDTITAMEPTDLYKYLGYRQLKGIDHTLTKQTLNTEYRRRINVLCKTQLSSKHLIKALNTFAIPILTYSFGVIKWSKTEIAQLERTTRTTLTKHNNHHPKSAIERLTLKRENGGRGLIDIHHLWQKQVTKLKTFFHIKSRTSTLHKAITLTDHNYTPLNLHEETNTQNMINTDKQKEKMEDWKKKVLHGRHPHDLEQTHINTIASNKWLKIGSLFPETEGFIIAIQDQIINTKNYRKHIIKDTTITNDKCRRCHSQSETIQHITGACTTLTQTDYTHRHNQIANIIHQKLALKHTLIQNTNTPYYNYTPQTVLENDTHKMYFDRAILTDKTIHYNRPDITLQDKIRKITYLIDIAVPNTHNLQKTISEKINKYSELKDEVTRIWRQDKVYIIPIVLSTTGVIPNNLLHSLKILNLEESVYISLQKAAILNTCRIVRKFMQVEENCPTNQLF

SEQ ID NO: 21932 - protein, 1292 aa, Emesis aurimna
METRAKRKRRGSLPGGDRRGTPGADAGCFSMRTVSGEELSRRAPTDKDTTAGINDDGNTLSEGALTPIPIEPYSPITSSYAPSSRAPSVSIPSSSPTSKCNADPSIPNLRVAQGVNTFMPASTKAGKTRVRMRWSKEVNIFIMRTYLYITKLETDMTTYRQQLHKLFSRQYPEISVSEQRIADQRKTIVRNKLLSQEEVNQLREEVRIELDNAVENNTSLNTNTLPEIYTQSPTNIQTHSQLQTQTSHTSTQTESITLTLENDIEILVVNPITETHIQGIKDKFRLTLTQYAGMDPASRPKLPKLKYSPNLFRLVNLFNESILKQFISKDTQLIDVHTLIYCTAVVISEELNFKITENTRNTINRHNTKPPWQQRLEKDIEKIRADLGRLTQYINNNRSNKIVKRVETIFKNCYIHTKHENNNVKPEQFLDTLKQKLALKVHRLKRYKKTQQRKDDNSIFATNEKIFYRKIQKPQVDTSINNDNDTPTKEDLETFWSNIWENQIQHNEKATWIGEEETKWKTIEEMEFAEITGSDITNITARLHNWKSPGIDKIHNFWYKKLNSLHGTIARNLTNIILGKQNVPNFLTMGITYMLPKTKHTSLPSQYRPITCLPTIYKILTSAIAIKINTHIVKHNIIAEEQKGCRRGHMGCKEQLIIDSVIHKHASKKNRNLHCTYIDYQKAFDSIPHSWLIQILQIYKINSKIIDFLHNIMSQWKTTLHLNNSHNTIITREIGIRKGIYQGDSLSPLWFCLALNPLSSLLHRCRVGYNLKYNNEETIISHLIYMDDIKLYGKTEKEMKTLIETTTKFSQDINMQFGIDKCKTLHIIKGKIKRGNYEVSDTDTITAMEPTDLYKYLGYRQLKGIDHTLTKQTLNTEYRRRINVLCKTQLSSKHLIKALNTFAIPILTYSFGVIKWSKTEIAQLERTTRTTLTKHNNHHPKSAIERLTLKRENGGRGLIDIHHLWQKQVTKLKTFFHKKSRTSTLHKAITLTDHNYTPLNLHEETNTQNMINTDKQKEKMEDWKKKVLHGRHPHDLEQTHINTIASNKWLKIGSLFPETEGFIIAIQDQIINTKNYRKHIIKDTTITNDKCRRCHSQSETIQHITGACTTLTQTDYTHRHNQIANIIHQKLALKHTLIQNTNTPYYNYIPQTVLENDTHKMYFDRAILTDKTIHYNRPDITLQDKIRKITYLIDIAVPNTHNLQKTISEKINKYSELKDEVTRIWRQNKVYIIPIVLSTTGVIPNNLLHSLKILNLEESVYISLQKAAILNTCRIVRKFMQVEENCPTNQLF

SEQ ID NO: 21933 - protein, 1289 aa, Nicephellus nicephorus
METRSKRKRKGPLPGGDRRGTPGADAGCFSMRTVSGEELSRRAPTDKDTTAGINDDGTTLSEGALTLIPIEPYSPITSSYAPSSRASSVSLPSSSPTSKCNAYPSIPTLRVAQGVNTFMPASTKAGKTRVRMRWSKEVNIFIMRTYLYITKLETDMITYRQQLHELFSRQYPEISVSEQRIADQRRTIVRNKLLSQEEINQLREEVRIELDNAVENNTSLNTSTLPEIHTQSPTNIQTHSQLQTQTSHTSTQTESITLTLENDIEILVVDPITETHIQGIKDKFRSTLTQYAGMDPASRPKLPKLKYSPNLFRLVNLFNESILKQFISKDTQLIDVHTLIYCTAVVISEELNFKITENTRNTINRHNTKPPWQQRLEKDIEKIRADLGRLTQYINNNRSNKIVKRVEAIFKNCYIHTKHENNNVKPEQFLDTLKQKLALKVHRLKRYKKTQQRKDDNSIFATNEKIFYRKIQKPQVDTSINNDNDTPTKEDLETFWSNIWENQIQHNEKATWIGEEETKWRTIEEMEFAEITGSDITNITARLHNWKSPGIDKIHNFWYKKLNSLHETIARNLTNIILGKQNVPNFLTTGITYMLPKTKHTSLPSQYRPITCLPTIYKILTSAIAIKINTHIVKHNIIAEEQKGCRRGHMGCKEQLIIDSVIHKHASTKNRNLHCTYIDYQKAFDSIPHSWLIQILQIYKINSKIIDFLHNIMSQWKTTLHLNNSHNTIITRGIGIRKGIYQGDSLSPLWFCLALNPLSSLLHRCRVGYNLKYNNEETIISHLIYMDDIKLYGKTEKEMKTLIETTAKFSQDINMQFGIDKCKTLHIIKGKIKRGNYEVRDTDTITAMEPTDLYKYLGYKQLKGIDHTLTKQTLNTEYRRRLNVLCKTQLSSKHLIKALNTFAIPILTYSFGVIKWSKTEIAQLERTTRTTLTKHNNHHPKSAIERLTLKRENGGRGLIDIHHLWEKQVTKLKTFFHKKSSTSTLHKAITLTDHNYTPLNLHEETNTQNMINTDKQKEKMEDWKKKVLHGRHPHDLEQTHINTIASNKWLKIGSLFPETEGFIIAIQDQIINTKNYRKHIIKDTTITNDKCRRCHSQSETIQHITGACTTLTQTDYTHRHNQIANIIHQKLALKHTLIQNTNTPYYNYTPQTVLENDTHKMYFDRAILTDKTIHYNRPDITLQDKIRKITYLIDIAVPNTHNLQKTISEKINKYSELKDEVTRIWRQDKVYIIPIVLSTTGVIPNNLLHSLKILNLEESVYISLQKAAILNTCRIVRKFMQVEENRPTN

SEQ ID NO: 21934 - protein, 1316 aa, Symmachia rubina
METRSKRKRIGPLPGGNRRGTPGADAGCDSGRAVGGEELNRRALTGSPEYTTANQQHYTQNTSPSISSHDPYSPSTVSYVPTPTLTDENTNDSANPTFDVAREVSQTFLPASTKAGKPRVRMKWSPEVNTFIMRTYYYITKLETDMTTYRTLLHQKFKENYPEVNVTEQRVSDQKRVILRNKLLGEEILNRIKEEVRLILDHEQVLDTITNIGTELCTHTQFNSQTNDVITPQTHINSLTISQESSQTHLQSNPQLYINSNTSDVFTQTDVTCTIIENEIESLNRELTNENTNVQDLDNKLKSALLQYAGLDPIERPKLPKLRYGNNLLNLVHIFNTSVLPKYLSDDAKLPDIHTLIYCTAYVITQELEYKIREHVTNNNQHSQDRNLKPSWQIRLEKDIQKLRADIGKLTQYIHYNNRTTRVVARVESIFKNLAVHTRHEEMNQNPEDFLDTLKQKLSVKASRLKRYKRSLKRKEENKLFTTNQKLFYRNLNSGATEPKNILQTEIPSTTKLEEFWSKIWESEEMHNATADWILEEESRWKMIEEMPFGKITEEEIKLITDKLHNWKSPGIDRVHNFWYKKLTILHKVLAKTFTEIILLKQDIPDFITKGITYMVPKGEHTTQPSQYRPITCLPTVYKLLTSIIAHKIRLHTEQHHIIAEEQKGCRRGHMGCKEQLVIDSVIHRNASIKKRNLHCTYIDYQKAFDSVPHSWLINILKIYKINSSVIQFLEKIMQHWKTSLHLNTIVTREIIVKRGIFQGDSLSPLWFCLAMNPLSNLLNTCQAGYRLKHDSTETIVSHLIYMDDIKLYSKTDKEMKNLVDITTEFSRDINMEFGLEKCRTLHIVKGRIKCGDYVVNENQRQVIKAMVPSDVYKYLGYQQLKIGIDQKNVKQTLNTEYKRRVTSICKTHLNGKNLIKAINTYAIPILTYSFGVIQWSKSNIISLERTTRKILTKHNHHHPKSAIERLTIKRQEGGRGLIHIQALWQKQILNLQNFFHLKAGLSNIHKAIAFNDKNYTPLNLSQTQYTYINNTEHETNAKESWKKKVLHGRHPHDLEQPLIDKDASNKFLKLGTLFPETEGFITAIQDQVINTKNYRKYIIKDPTLQSEKCRKCHTQSETIQHITGACPNLAQTDYTHRHNQIANIIHKQLAIKHNLINDNRTPYYKYKPATILENSTHKMYYDRAILTDRTIHYNRPDITLQDKINKITFLIDIAVPNTHNITKTIADKVHKYTELKEEVISIWKQEKVYVIPIVLSTTGVIPKQLHNSLKLLGLKQYTYTTLQKAAILNTCRIVRKFLQINEDEILYHSVETTPH

SEQ ID NO: 21935 - protein, 1327 aa, Theope publius
METRNMYRKRIGPLPGGDRRGTPGAGAGCDSGRTVGGAELNRRALTGSPENATAKQHCTQNSPSSTLSRDPYSPSTISYAPSDTPILTDEESNSSVTSTLAVAQEVSQTFLPASTKAGKPRVRMKWSTEVNEFIMRTYFYVTKLETDLTTYRTLLHQKFTDRFPDVHVTEQRVSDQRRVIVRNKLLSINTLNKLKAEVQVLLDEEELQNTNLYDEVTETNTIAFDSSRLNVDFLEYSNINPTQTQTVSLATPYMTSLNQSQSYLQTQINSNLSTIATQTENSYVLIQNEVETLDVITPCENENILRLNSNLQTVLLQYSGTDPTQRPMLPRLKYQFKLNNLVNIFNNKLLNQYISDSIILIDIHTLIYCTAYVITQELGYKIREHNGNPSNTRKNKASWQIRLEKDIQRLRADIGRLTQYIYHNNRSKKVVERVSALFKNSILHSRHEENNQKPEEFLDTLKQKLALKSNRLKRYKKSQQRKEDNKLFTHNEKIFYRNFNKISEISEKTPTDTPNIKELETFWSNIWETEIAHNSQAEWISEEAKRWEAIEEMQFEEITEIDIKHITSKLQNWKSPGIDNIHNYWYKKLSVFHKPLSKNLTEILLQKQSIPDFMTKGLTYMIPKGKYTSEPNQYRPITCLPTIYKILTSTITHKIRAHAEFHNIISEEQKGCKRGHMGCKEQLTIDSVIHKNASTKKHNLHCTYIDYKKAFDSIPHSWLIDILKIYKVNESIINFLKTIMSNWKTTLHLNCQPVYLKTREISIKKGIYQGDSLSPLWFCLAMNPLSSLLNNCSVGYRLKHENTNTLISHLIYMDDIKLYAKSDRDMKKLIDKTTTFSNDINMHFGFDKCRTLHILKGKIKAGDYVLDETQNHIITAMEPNEMYKYLGYNQLYGIDHKNIKDNLITEYKKRVINICKTQLSSKNLVKAINSYAIPVLTYSFGIIKWNKTNINFIERMTRKILTKHNYHHPKSALERLIIKRQDGGRGLISIQYLWQKQIQTLKNFFHLKANTSNIHKAVVCNDNNCTPLNLSNSLLPITNNTDHEHSIKESWKKKSLHGRHAHDLEQPHIDKNASNKWLKIGSLFPETEGFIIAIQDQVINTRNYKKFIIKEPNLHNDKCRKCHIHSETIQHITGACPSLSQTDYTHRHNQVVNIVHKNIATKYKLIPETQTPYYKYTPNKILENKTHKMYYDRAILTDKTIHCNRPDITLQDKINKITYLIDIAVPNTHNITKTITEKTQKYIELKEEVTRIWKQNKVYIVPIVLSTTGVIPKHLHYSLKQLDLNPFIYATLQKAAILNTCRIVRKFLQTSDNETLPVTQEHTALSQ

SEQ ID NO: 21936 - protein, 1317 aa, Pachythone gigas
METRSKYRNRIGPLPGGDRRGTPGADAGCDSGRAVGGVELNRRALAGSPENATAKQNNTHNSPSSISSIEPYSPSTLSYAPTPAPTLTDEYSNSSVATTFAAAQEASQTFLPASTKAGKSRIRMKWTSEVNEFIMRTYYIITKLETDMTTYRTRLHQRFTEKYPGIHVTEQRVSDQKRVIIRNKLLSDETLNKLKEDVKLVLDEEQMQNKTSFHQSTEYNTDAFSLNTEITEPSPAFASLSLLTQHHAPTQNSSQLSSQFQFNTNMSNMSTQTETNYVLIENEIETLNVISPCNDEETVHLSNNLQSVILQYAGTDPTKRPMLPRLRRQPKLFTLVDIFNNKILNQYISETAKVVDIHTLIYCTAFTITQELGYKIKEHTDNPQNKHEAKPAWQMRLEKDIQRLRVDIGRLTQYIYHNNRSKTVVERVTTLFRNATLHTRHEENNKRPEEFLDTLKQKLALKANRLKRYKKSQQRKEDNKLFISNEKVFYRNLNRHSENKENTPTDIPNIQELETFWSNIWETEVTHNIQADWITEEAKRWETIEEMQFEEITDEDIKHITLKLQNWKSPGIDKIYNFWYKKLSVFHKLLAKNLTEIILQKQSIPTFMTKGLTYMLPKGKYSSQPNQYRPITCLPTIYKILTSTIAHKIRVHTERHNIIAEEQKGCRRGHMGCKEQLIIDSVIHKSATTKKRNLHCTYIDYKKAFDSIPHSWLIDILKIYKINSSIINFLKTVMPLWKTTLNLNCHRISIQTREISIKNGIYQGDSLSPLWFCLAMNPLSSLLNNCLIGYRLEHNNTNTIVSHLIYMDDIKLYTKTDKEMKTLIDKTTTFSRDINMDFGLDKCKTLHIIKGKVKTGDYVVGETQDKIITAMEPNEMYKYLGYQQLKGLDHKNIKEELITEYKKRITNICKTHLTGKNLIKAVNTYVIPVLTYSFGIIKWNKTNIHFIERITRKIFTKYNYHHPKSAIERLVIKRQDGGRGLINLQALWQKQIQNLHRFFQLKAETSPMHKAVVNSDINYTPLNLSRQLTPGSHNTDFELVMKESWKKKELHGRHPHDLEQPHIDLEASNRWLKIGDLFPETEGFIIAIQDQVINTRNYKKFIIKDPNAENDKCRKCHIHSETIQHITGACPNLSQTDYTHRHNQIVNIIHRSIATKYKLIPKTNTPYYKYKPNTILENTTHKIYYDRAILTDKTIHCNRPDITLQDKTNKVTYLIDIAVPNTHNITKTIAEKLNKYSELREEVIRIWKQNKVYIIPIVLSTTGVIPRHLHLSLKQLDLNQHLYVTMQKAAILNTCRIVRKFLQISEDETQPYTTDYT

SEQ ID NO: 21937 - protein, 1325 aa, Idaea aversata
METRQKKKRMTPLPGGYRPGTLGADAGCCSGRAVGGEELSRRAPTGSPEDMTANQQQLDPPSSPSTIEPFSPSTVSYAPTPTPVLTDEDSRDSVNPSFAVAREAPEAFLPASTKAGKPRVRMRWSSEVNTFIMRTYYYITKLETDLTTYRTILHQKFIEKYPGINVSEQRVSDQRRVIVRNKLLSTEILNRLQEEVRVQLSEEENLESSLGNTLTNNTESQAYNLSNIPHTSLRQPIITQQHTLSPTITPLTQNRDLMSDMSTQTDTLITNTLLIENEVETLTSDETNTDSTIAQLNEKLQTSILQYAGMDPTARPKLPKLKYSIKLQKLLNVFNNVILNQHVSESAQLTDIHTLIYCTAFVISQELGYKITEVERPKRNIQDARPAWQIRLERDINKLRSDIGKLTQYINNNNRSRKVVDRVTAIFRNITLHTRHESNNKTPEEFLDTLKQKLALKTHRLRRFKKSLQRKQDNNLFTNNEKIFYRKLNSPTENSEIDTTSNNSHHEAPNKEDLEQFWSSIWEIEVSHNTEANWLEEEKTRFETIEEMEFEEITVDNLQNITDRLHNWKSPGVDKIHNFWYKKLRVLHKYLAKNLTEIILQKQNIPQFITKGLTYMLPKTQHASQPSQYRPITCLPTIYKILTSAIAHKVRTHTEKNNIIAEEQKGCRRGHMGCKEQLIIDSVIHKHAAAKKRNLHCTYIDYQKAFDSIPHSWLIEVLKIYKINSRLIEFLQILMPLWKTNLHLNSYPNQIVTREISIKKGIYQGDSLSPLWFCLALNPLSQLLNSQRAGFQLKHNNTDTTVSHLVYMDDIKLYAKTDREMNKLIKVTSEFSRDINMQFGLDKCKTVHIVKGKICGGDYSVDQGDSQNQIILAMEPNDVYKYLGYNQLRGLDHKQIKQSLTNEYKRRVTKICKSRLTGKHLIKAVNTYAVPVLTYSFGVIKWSKSNIISLERATRSIFTKHNHHHPKSAIERLTIKRQNGGRGLINLLNLWQKQLQTLQAFFHQKSSTSTLHKAIKQNDFNYTPLNLHQTTTDTTVNPALDPEQDAKEAWRKKVLHGRHYNDLEQPSIDKDASNKWLKIGSLFPETEGFIIAIQDQIINTRNFRKYIIKDPSIADDKCRKCRIHSETIQHITGACPLLTQTDYTHRHNQVANIIHQILAIQHNLIPDNHTPYYKYNPNTILENSTHKMYFDRAILTDRTIHYNRPDITLQDKRNKITYLIDIAVPNTHNITKTITEKVHKYADLKDEISRIWRQEKVYIVPIVLSTTGVIPKHLHNSLKLLNIKDTTYIKLQKAAILNTCRIVRKFLQIEENQTISNFTEQTTTD

SEQ ID NO: 21938 - protein, 1327 aa, Nymphidium onaeum
METRSRIRKRIGPLPGGDRRGTSGAGAGRDSRRTVGGAELNRRALTGSPENVTAKPNSPSSNSSLNSPSSISSREPYSPSTTSYKPTPTSSPTLTDENSNHSALSTFAVTQEASQAFLPVSTKAGKPRLRMKWSKEVNEFIMRTYFHITKLETDMTTYRTLLYQKFKEKYPAVQVTQQRISDQRRVIVRNKLLNEETLNKLKEEVKLSLEEEQAQNEEFLRASNERNILIDEHPRLDEDYAYNHNIIDTQFSHLPSSQTPTHNHFLSQSQSLINTNTANMSTQTETNYLIIENEIETLNTITSLEGDILHLKIKLESALLQYAGSDPTKRPKLARLKYQYKLHSLVKIFNNHLLPQYLSDALKLVDIHTLIYCTAFVITQELGYKIREHCDNPQNKHDVKPSWQIRLEKDIQRLRVDIGRLTQYIYYNNRSKKVVEKVSAIFKNTKIHTRHENDNKRPEEFLDTLKQKLVLKANRLKRYKKSQQRKDDNKQFTINEKVFYRKFNKNPETEKERTLDVPNIQELETFWASIWENEVMHNSQASWISEEAKRWESIEEMPFEDITEEDIKQITSKLQNWKSPGIDKIHNFWYKKLIVFHKPLATNLTEIVLQKQNIPDFMTKGLTYMLPKGKYTSQPNQYRPITCLPTIYKILTSTITYKIRSHTEQYNIIAEEQKGCRSGHMGCKEQLIIDSVIHKNASIKKRNLHCTYIDYKKAFDSIPHSWLLDILKIYKINTSLITFLKTVMHLWKTTLHLNCNSVSIQTREINIKKGIFQGDSLSPLWFCLAMNPLSFLLNTSTAGYRLKHNDSHTSISHLIYMDDVKLYAKSDKEMKTLIEKTTTFSNDINMNFGLDKCKTLHIIKGKIKPGDYVVNETQNHVITAMEPNEMYKYLGYQQLKGLDHKIIKANLITEYKKRITNICKTQLTSKNLIKAVNTYAIPVLTYSFGIIKWSKTNIHFIERTTRKIFTKNNYHHPKSALERLIMKRQDGGRGLINIHALWQKQVFNLHKFFCLKARTSNIHKAIVHNDNDYTPLSLNKPVTLESETIDYYNTAKESWKGKVLHGRHPHDLEQPHVDKEASNKWLKIGSLFPETEGFMLAIQDQVINTRNYKKFIIKDPNLVDDKCRKCHLHSETIQHVIGACPSLAQTDYTHRHNQVVNIIHKSIAIKYKLITDTHTPYYKYKPSIILENATHKIYYDRAILTDRTIHCNRPDITLQDKLNKITYLIDVAVPNTHNINKTIAEKIHKYAELKEEVTRIWKQNHVYIIPIVLSTTGVIPRHLHHSLSQLELNNNIYATLQKAAILNTCRIVRKFLQITEHETQTYTTDNT

SEQ ID NO: 21939 - protein, 1310 aa, Ptilodon capucinus
METRSKSKRIGPLPGGDRRGALGADAECYSIRTVGGEELNRRAPSGSPENVTANQTNDRQTDYNTISPCPSITEPYSPSTVSYIPSPIPSENSRELPTPTLDVAQGVNPFLPASTKAGKPRVRMRWTNDVNLFIMRTYYRVTKLETDLTIYRKLLHEQFIQQYPEANVSEQRVSDQRRTIVRNKMISDDILTQIKEEVRLELEQADISSQLHAPRDELTYPRIIPNTHSLVQSDHLHTRSNSHSFIQAEQQTLPNTHSQNTRNTQLTSNSHASTQTETTSLLMENEIETLQIIPLSDSLAEKLQQNLQTALVEYAGTDPTLRPRLPKLKYSTHLNQLTQSFNSSILSQFFTEDSQLTDIHTLIYCCALVISRELGYKIEQDYIQPRRNNDRKPAWQVRLETDVVKLRSDIGKLTQYIKNNRSKKVVDRVNTIFKNLRVHSSYEKDNRKPEEFLDTLKQKLALKAHRLARYKKALQRKTDNILFHTNEKLFYRKLNNDNKDNAMPNVTELPKINELENYWTGIWETEIQHNDEALWIKQEEDRFKAIDIMRFEDITEIDLATVTVRLHNWKSPGIDQIHNFWYKKFTILHKIIAKNLTHIIHGHQNTPRFIAKGITYMLPKGKYSDQPSQYRPITCLPTIYKILTSAITHKILAHIESNNILAEEQKGCRRFHMGCKEQLIIDSLVHRHATTNKRNLHCTYIDYKKAFDSIPHSWLLRILQIYKINPILIEFLKNTMHLWRTKLHLNTITTREIEIRKGIYQGDSLSPLWFCLALNPISHMLRERRAGYRLKHDSTETCISHLIYMDDIKLYAKTEKEMKILIDTTTEFSNDINMQFGLEKCKTIHIVKGKIRPGDYAVGDEQVISAMEPNELYKYLGYHQSRGLDHITIKTSLKQEYNRRVNAICKSQLTSKSLIKAINTYAIPILTYSFGVMKWTKTDINQLEIKTRTILTKHNCLHPKSAIERMTLKRQEGGRGLINIANLWTKQITNLKTFFQQKANNSDIHKAIVWNDLNSTPLNLTDRTELNTDNYSEKTRIEQWKKKVLHGRHPHDLEQSHIDRIASNKWLTLGSLFPETEGFMIAIQDQIINTRNYRKHIIKDPTLTDDRCRKCHSHPENIQHITGACPNLAQTDYTHRHNQIANIIHKKLALKHKLIPDTHTPYYKYTPNPILENTTHKMYYDRAILTDRTIHYNRPDITLQDKINKTTYLIDIAVPNTHNLQKTIAEKVHKYTDLQDEVTRIWKQEKVYIVPIVLSTTGIIPKHLHHSLKLIDLQPNTYMLLQKAAILNTCRIVRKFLQIDEDDNVTDLRT

SEQ ID NO: 21940 - protein, 1310 aa, Ptilodon capucinus
METRSKSKRIGPLPGGDRRGALGADAECYSIRTVGGEELNRRAPSGSPENVTANQTNDRQTDYNTISPCPSITEPYSPSTVSYIPSPIPSENSRELPTPTLDVAQGVNPFLPASTKAGKPRVRMRWTNDVNLFIMRTYYRVTKLETDLTIYRKLLHEQFIQQYPEANVSEQRVSDQRRTIVRNKMISDDILTQIKEEVRLELEQADISSQLHGPRDELTYPRIIPHTHSLVQSDHLHTRSNSHSFIQAEQQTLPNTHSQNTRNTQLTSNSHASTQTETTSLLMENEIETLQIIPLSDLIAEKLQQNLQTALVEYAGTDPTLRPRLPKLKYSTHLNQLTQLFNSSILSQFFTEDSQLTDIHTLIYCCALVISRELGYKIEQDYIQPRRNNDRKPAWQVRLETDVVKLRSDIGKLTQYINNNRSKKVVDRVNTIFKNLRVHSSYEKDNRKPEEFLDTLKQKLALKAHRLARYKKALQRKTDNILFHTNEKLFYRKLNNDKKDNAIPNVTELPEINELENYWTGIWETEIQHNDDALWIKQEEDRFKAIDIMRFENITEIDVATVIVRLHNWKSPGIDQIHNFWYKKFTILHKIIAKNLTHIIHGHQNTPRFIAKGITYMLPKGKYSDQPSQYRPITCLPTIYKILTSAITHKILAHIESNNILAEEQKGCRRFHMGCKEQLIIDSLVHRHATTNKRNLHCTYIDYKKAFDSIPHSWLLRILQIYKINPILIEFLKNTMHLWRTKLHLNTITTREIEIRKGIYQGDSLSPLWFCLALNPISHMLRERRAGYRLKHDSTETCISHLIYMDDIKLYAKTEKEMKILIDTTTEFSNDINMQFGLEKCKTIHIVKGKIRPGDYAVGDEQVISAMEPNELYKYLGYHQSQGLDHITIKTSLKQEYNRRVNAICKSQLTSKSLIKAINTYAIPILTYSFGVIKWTKTDINQLEIKTRTILTKHNCLHPKSAIERMTLKRQEGGRGLINIANLWTKQITNLKTFFQQKANNSDIHKAIVWNDLNSTPLNLTDRTELNTDNYSDKTRIEQWKKKVLHGRHPHDLEQSHIDRIASNKWLTLGSLFPETEGFMIAIQDQIINTRNYRKHIIKDPTLTDDRCRKCHSHPENIQHITGACPNLAQTDYTHRHNQIANIIHKKLALKHKLIPDTHTPYYKYTPNPILENTTHKMYYDRAILTDRTIHYNRPDITLQDKINKTTYLIDIAVPNTHNLQKTIAEKIHKYTDLQDEVTRIWKQEKVYIVPIVLSTTGIIPKHLHHSLKLIDLQPNTYMLLQKAAILNTCRTVRKFLQIDEDDNVTDLRT

SEQ ID NO: 21941 - protein, 1282 aa, Apodemia mormo
MESHNKSKRLMPLPGGYRRGTPGAGAGCSSMRSTGGGRISRRSPAGSPEEATSSQVGLSLEAVDQKSSETSPVEDVSRTASAIRPATTKAGKPRVRMKWDSNTNIFIMRTYYKITKLESDLTIYRKLLHQEFSKQYPNTNITEQRLSDQRRVIVRNKLLSDETLSKIKQEVEQELRETRNSDISNNITYLSGRSSSLPATNQATTSQIIIDSEICSEDHRSLSNTTNFQNTPNIHVIPSPQTQTENISYLLENEIETLVESNSTTDTNTYVQELLNKFKTILTQFLGMDPTVRPKLPKLRYQCKLNYLIDIFNKNILNQFLSKETQLIDVHTLVYCTAVTISEELNYKITNSYTRKTEIKEIKPPWQHRLENDIEKLRAECGRLTQYINNNRSRKIIRKVEDIFKKYATHSKHESNNKTPEEFLDTIKQKLALKVHRLKRYKKAQQRKNDNNLFATNEKRFYRNLNKPEIYTSEENSGELPTKEHLELYWSGIWEEQIRHNDKAEWIKEEEMRWNTIKEMEFTEITEVEIQRITARLHNWKSPGVDKIHNFWYKKLTCLHKLLAQNITDIIFGKQTIPEFIATGLTYMLPKGKYSSQPSQYRPITCLPTIYKIITSIISHKINSHIENHNILAEEQKGCRQGHMGCKEQLIIDSTIHKHATSKNRNLHCTYIDYKKAFDSIPHSWLLQVLQIYKINQKLITFLRNIMTHWKTTLLLQNYHNSIRTKEITIKKGIYQGDSMSPLWFCLALNPLSYQLQNTRAGYQFKISNKETVISHLIYMDDIKLYSRTEKQMQNLINTTAKFSKDINMEFGMDKCKTIHILKGKIQPGDYEVDNIGIISALESTDLYKYLGYKQLKGLDHKNIKQTLTSEFKRRFNSLCKTKLSGKNLIKAVNTYAIPVLTYSFGIIKWSKTDIEQVERITRTTLTKHNYLHPKSAVERLSLKRCEGGRGLIDINNLWQKQLYSLASFFHSKAQCSDLHKAVVENDYKFTPLNLKQNILEDPNAHYPHMRKTEQWKSKVLHGRHPHDLEQTHIDIIASNKWLTSGNLFPETEGFMIAIQDQVINTKNYRKFIIKDPTLTNDKCRKCQTHSETIQHITGACTSLTQTDYTHRHNQIANIVHQKLASNFSLIQNINIPYYKYTPQSILENTLYKLYYDRAILTDKTIHYNRPDIVLQDKINKTTYLIDIAVPNTHNLQKTITEKINKYVELKEEVTRIWQQEKVYIVPIVLSTTGVIPNHLHHSLKLLKLSKSLYVTLQKAAILNTCRIVRKFLQIDENEIGH

SEQ ID NO: 21942 - protein, 1179 aa, Curvie emesia
MKWSPEVNEFIMRTYYFITKLETDMTTYRKILHQTFLEHYPGIQVSEQRVSDQRRVIIKNKLLSTETLMKIKDEVKSRLLREENHYSEFHNNVTEINTINDEQRHSQTILTPVTQINAHLQIYSQITSQTPQTQTNVTNTSTQTENNYTLIENEIETLNVISPISENNKIKELSDKLQTALLLYSGTDPTKRPTIPRLKYQIKLEKLIHIFNCHILNQYISNDAKLTDIHTLIYCTAFVITEELGYTIRAYPEQFQKKEKMEPAWKIRLEKDIQKLRADIGKLTQYIFQNNRSRKVVERVTSLFRNLTSHTRHEGHNKRPEEFLDTLKQKLALKSSRLRRYKKAQQRKDDNKIFVNNEKMFYRNLIKPPVHNKSPINIPSKEELETFWTNIWETEIAHNTEAAWIDAETRRWDSIEEMQFEGITADAVKHVTTKLSNWKSPGKDKIHNFWYKKLTVLHKLLADNFTEIILLKQNIPEFITKGLTYMIPKGEFTSQPKQYRPITCLPTIYKILTSLITHNIRTHTERYNILAEEQKGCRRGHMGCKEQLIIDSIIHKTTSTNKRNIHCTYIDYEKAFDSIPHSWLIKVLKIYKINISIIKFLQSIMPMWKTTLHLNSYSNSITTREITIKKGIYQGDSLSPLWFCLAMNPLSHILNNCSAGFPLKYNNTNTIISHLIYMDDIKLYSKTEKEMKKLIEHTTIFSNDINMQFGLNKCRTLHIVKGKVKSGDYTLSESQNQIITALEPNEMYKYLGYHQLKGLDHKTLKDNLIAEYKRRITNICKTRLNSKNLIKAINTYGIPILTYSFGIINWNKTNIHFIERLTRTTLTKHNYHHPKSAIERLVIKRQDGGRGLINIHTLWLKQTQNLHTYFQIKAMTSKIHEAVVNNDYNYTPLNLSTPLRIETANLESTLKESWSAKTLHGRHRHDLEQPHIDSEASNKWLKFGSLFPETEGFIAAIQDQVISTNNYKKHIIKDANITDDKCRKCHLHSETIQHITGACPSLAQTDYTHRHNQIVNIIHKNIATKFKLIQDTHTPYYKYKPSTILESTTHKMYYDRAILTDKTIHCNRPDITLLDKINKVTYLIDIAVPNTHNITKTITEKIQKYTELKDEVLRIWKQTKVFIVPIVLSTIGIIPRHLHQSLKQLDLNQNIYITLQKAAKISDSELDYTHYTGQILVMV

SEQ ID NO: 21943 - protein, 774 aa, Sarota myrtea
MHFEEITEADVKLITSKLQNWKSPGIDKVHNYWYKKLNVLHKLLASNLTEIILQKQNIPDFITKGLTYMLPKGKFTSDPKQYRPITCLPTIYKIMTSIITQKIRTHVECHSIMAEEQKGCRRGHMGCKEQLIIDSIIHKNASSKKRNLHCTFIDYQKAFDSVPHSWLLKVLEIYKINRSITDFLKTIMPLWKTTLHLNGHLTSIKTREISIKKGIYQGDSLSPLWFCLAMNPLSHLINKCLAGYTLKHNDTNTTISHLIYMDDIKLYSKSDKEMKTLLEKTKEFSKDINMHFGLDKCKTLHIIKGKIEPGDYTVDETQNQVIKSMEPNELYKYLGYHQLKGINHKNTKEKLITEYKRRVTIICKSRLTSKNLIKAINSYGIPVLTYSFGIIKWSKTNIHHIERITRRILTKYNYHHPKSAIERLVIKRLDSGRGLINIHDLWRKQIHNLQNFFKTKANTSIIHKAVVSNDNNYTPLNLDKNTSIMHNTRNENTAIELWRKKVLHGRHCNDLDMLHVDKDASNKWLEFGSLFPETEGFMTAIQDQVINTRNYKKYIIKDPNLTDDKCRKCRIHSETIQHITGACPNLSQTDYTYRHNQIVNIIHKNIATKLKLIEETHTPYYKYTPSPVIDTPTHKIYYDRAILTDKTIHFNRPDITLQDKINKITYLIDVAVPNTHNITKTIAEKIQKYTELKEEVLRIWKQTKVLIVPIVLSTTGVIPKHLHQSLKQLELNKNLYITMQKAAILNTCRIVRKFLQTSEDGTSSADITPMIHNL

SEQ ID NO: 21944 - protein, 1057 aa, Apodemia mormo
MSTQTENTYTLIENEIETLNVITSVSEDDKIKDLRDKLQKALLLYSGTDPTKRPTLPRLKYQIKLEKLINIFNNNILNEYLSNEAKLIDIHTLIYCSAIVITQELGYTIREYPEHLRKKNKTVPAWKIRLEKDIQKLRADIGKLTQYIHQNNRSRKVVERVSTLLRNFTSHTRHEGSNKRPEEFLDTLKQKLALKSSRLRRYKKSQQRKEDNNVFLNNEKIFYRNLNKNSGYSEIPESASGGMSLPSKEELENFWTNIWETDITHNTQAVWIEEETRRWSSIGEMEFGGITEEDIQEVTRNLINWKSPGKDKIHNFWYKKLSILHKLLAKNLSEIILLKQNIPEFITKGVTYMVPKGKFTSQPMQYRPITCLPTIYKILTSLITHKIRIHTERYNILAEEQKGCRRGHMGCKEQLIIDSIIHKTASTKRRNIHCTYIDYKKAFDSIPHSWLISVLKIYKINSSIIQFLQNVMPMWKTTLHLHNHSTSITTREITVKKGIYQGDSLSPLWFCLAMNPLSHILNNCSAGYRLKHNNTETTISHLIYMDDIKLYSKTEKEMKKLIQQATMFSNDINMQFGLDKCRTLHIVKGKIKPGDYTINETQNQVITAMEPNEIYKYLGYHQLIGLDHKTIKDNLITEYKRRITSICKTRLNGKNLIKAINSYGIPILTYSFGIINWNKTNIHFIERLTRTTLTKYNYHHPKSAIERLVIKRKDGGRGLINIHTLWLKQIQTLHTFFQCKANISKIHRAVVSNDDNYTPLNLSKPLTTELVTIDSQNTLKESWSAKVLHGRHRHDLEQPHIDSEASNKWLKFGNLFPETEGFITAIQDQVISTSNYKKYIIKDANITDDKCRKCRLHSETIQHITGACPSLSQTDYTHRHNQIVNIIHKSIASKFKLAHDINTPYYKYKPNTILENATHKMYYDRAILTDKTIHCNRPDITLIDKINKITYLIDIAVPNTHNMTKTITEKLHKYTDLKDEVLRIWKQTKVFIVPIVLSTTGVIPRHLLQSLKQLDLNPHIYITLQKAAILNTCRIVRKFLQMSENETCTISHIIQEH

SEQ ID NO: 21945 - protein, 1086 aa, Emesis brimo
MTEEQENLQRPATQIDTYTLISPNIINQTSQSQTHTNIVDMSIQSENTYTLMRNEIEILNVIAPSSEDEKIKELNDKLQLALLLYAEIDPIKRPPLPKLKYQSELEKLINTFNNNILNRYLSENSKLIDIHTLIYCTALVISQELGYTIREHPEYHQKKEKKAPAWQIRLEKDIQTLRVDIGKLTQYIYHNNRSRKVVERVKALFRNLTIHTKHKDNNNRPEEFLDTLKQKLVLKASRLKRYKKTQLRKEDNNIFLNNEKLFYRNLNKNPGYSECSINAPTQEELQNFWTNIWETENTHNTSAAWIENETKRWDSIDEMQFEDITAEDIKNVTIKLLNWKSPGKDKIHNFWYKKLSVFHTLLAKNLTDIILQKQNLPEFMTNGLTYMLPKGKFTSQPMQYRPITCLPTLYKILTSLLTHKIRTHIEHYNIIAEEQKGCRPGHMGCKEQLIIDSVIHKTALTKRRNVHCTYIDYRKAFDSIPHSWLINILKIYKINSSIVEFLQSTMRMWKTTLHLNSPITSITTREINIRKGIYQGDSLSPLWFCLAMNPLSYILNSSLAGYRFKHDNTETAISHLIYMDDIKLYSKTEKEMKKLIEQTTMFSNDINMQFGLDKCRTVHIVKGKIMPGDYVINETQNQIITAMESNEMYKYLGYHQLTGLDHKTLKDNLITEYKRRISNICKTRLNGKNLIKAINSYGIPMLTYSFGIINWNKTNIHSLERLTRTTLTKYNYHHPKSAIERLVIKRQEGGRGLININTLWRKQIQKLHTFFQSKASTSEIHKAVVSNDHNYTPLNLSRPLNTPTVSLESQNALKESWSAKVLHGRHRHDLEQPHIDTEASNKWLKFGSLFPETEGFISAIQDQVINTKNYKKYIIKDTNITDDKCRKCHVHSETIQHITGACPNLSQTDYTHRHNQIVNIIHKNIASKFKLILNNHTPYYKYTPNTILENKTHKMYYDRAILTDKTIHSNRPDITLVDKLNKITYLIDIAIPNTHNITKTITEKIYKYTELKEEVLRIWKQTKVFIVPIVLSTTGVIPRHLHQSLKQLDLNPNIYITLQKAAILNTCRIVRKFLQISENEIPFLHN

SEQ ID NO: 21946 - protein, 1307 aa, Emesis diogenia
METRSMHRKRIGPLPGGKRRGTSGADAGCDSGRTVGGDELNRRALTGSPEYTTAKHLYMYNTPSVSSNQEPFSPSTLSYAPTPSTSAHSIIDEDSFQLNTPTFAVAREASQAFFPASTKAGKPRVRMKWSPEVNEFIMRTYYFITKLETDMTTYRTILHQKFIEHYPGIQVTEQRVSDQKRVIIKNKLLSPETLRKIRDEVKTQLNSEKNPIYESGHDVTELHRFIEQQTKSPPATQKDTPLQISPHIAYQTSHFQTRANVVEISTQTETSYTFIENEIETLNIITPSSEDEKIKELCDKLQTALLLYAGIDPTKRPQLPRLKHQTRLQNLINIFNNSILNQYLSNDAKLTDIHTLIYCTALVISQELGYKIREYPKQLQQKEKAEPAWKIRLEKDIQKLRVDIGKLTQYIHHNNRSRKVMKRVNDLFRNLTSHTIHESSNKKPEEFLDTLKQKLALKSGRLRRYKKTQQRKEDNNIFLNNEKMFYRNLNKQPGDSEIPMNTPTKEELENYWANIWETEVTHNTQAAWLENETRRWESINEMQFEDVTVEDIKHITTKLINWKSPGTDKIHNFWYKKLSTLHNLLAKNLTDIILLKQNIPEFMAKGLTYMLPKGEITSQPMQYRPITCLPTIYKILTSLLTHKIRIHIERYNIIAEEQKGCKRGHMGCKEQLIIDSIIHKTAFTKRRNIHCTYIDYKKAFDSIPHSWLINTLKIYKINSSIIEFLQSVMPMWKTTLHLKSHPTSMTTREITIKKGIYQGDSLSPLWFCLAMNPLSYILNNCSVGYRLKHNNTETTISHLIYMDDIKLYAKTEKEMKKLIEQTTMFSNDINMQFGFDKCRTIHIVKGKVKPGDYIVNETQNRIITAMESNEIYKYLGYHQSKGLDHKTLKDNLITEYKRRITNICKTRLTGKNLIKAINSYGIPILTYSFGVINWNKTNIHFIERLTRTTLTKYNYHHPKSAIERLVIKRQDGGRGLISIYTLWLKQIHKLHTFFQIKSNTSDIHKAVVSNDFNYTPLNLSKPLTTDTVILENQNYLIQSWSGKVLHGRHRHDLEQPHIDTDASNKWLQFSSLFPETEGFITAIQDQVISSKNYKKYIIKDTKVTDDKCRKCHVHAETIQHITGACPSLSQTDYTHRHNQLVNIIHKNIARKFKLTLDIHTPYYKYKPNTILENTTHKMYYDRAILTDKTIHCNRPDITLIDKINKITYLIDIAVPNTHNITKTITEKLHKYTELKEEVLRIWNQAKVFIVPIVISTTGVIPHHLQKSLKQLGLNPNIYITLQKAAILNTCRIVRKFLQISENETPII

SEQ ID NO: 21947 - protein, 1311 aa, Apodemia zela
METRSMYRKRKGPLPGGDRRGTPGADAGCDSRRTVGGDELNRRALTGSPEYATAKHPNMHNTPSVSSSGEPLSPITLSYAPTPSTSIHSLTDEDSFSSANPTFAVAREAPKAFFPASTKAGKPRVRMKWSPELNEFIMRTYYFITKLETDMTTYRTTLHQKFVERYPGIQVTEQRLADQKRVIIKNKLLSDETIRKIKDEIKTRLDSEPIQNIESCHHFTELQEVTQTNNSTATHIDTLIRISPQITNQYSHSQIQTHTNVTDMSTQTENTYTLIENEIETLNVITPFSEDDKIKELGDKLQTALLLYSGTDPTKRPTLPRLKYQIKLEKLINIFNNNILNQYLSNEAKLTDIHTLIYCTALVITQELGYTIREYPEYLQKKKNAEPAWKIRLEKDIQRLRADIGKLTQYIYQNNRSRKVVERVTALFRNFTSHTRHEGSNERPEEFLDTLKQKLALKSSRLRRYKKTQQRKEDNNVFLNNEKIFYRNLNKKSGYSESPIDTPSKEELENFWTNIWETEITHNTQAAWIDEETRRWNSIEEMQFEGVTEEDIKVVTRNLINWKSPGKDKIHNFWYKKLSILHKLLAKNLSDIILLKQNIPEFITKGLTYMLPKGEFTSQPTQYRPITCLPTIYKILTSVITHKIRIHTERHNIIAEEQKGCRRGHMGCKEQLIIDSIIHKTAATKKRNIHCSYIDYKKAFDSIPHSWLISVLKIYKINSSIIEFLQNVMPMWKTTLHLNSHPTPITTREITIKKGIYQGDSLSPLWFCLAMNPLSHILNNCSAGYRLKHNNTETTISHLIYMDDIKLYSKTEKEMKKLIDQTSMFSNDINMQFGLDKCKTLHIVKGKIKPGDYTINDTQNQVITAMEPNEMYKYLGYHQLIGLDHKTLKDNLITEYKKRITSICKTRLNGKNLIKAINSYGIPILTYSFGIINWNKTNIHFIERLTRTTLTKHNYHHPKSAIERLVIKRQDGGRGLINIHTLWLKQIQKLQVFFQCKASTSRIHRAVVSNDNNYTPLNLSKPLPTETISLDSQTALKESWSVKVLHGRHRHDLEQPHIDSEASNKWLKFGSLFPETEGFITAIQDQVISTNNYKKYIIKDANITDDKCRKCHVHSETIQHITGACPSLSQTDYTHRHNQIVNIIHKNIAIKFKLTHDINTPYYKYKPNTILENTTHKMYYDRAILTDKTIHCNRPDITLIDKINKVTYLIDIAVPNTHNITKTITEKLHKYTELKDEVLRIWKQTKVFIVPIVLSTTGVIPRHLHQSLRQLDLNPHIYITLQKAAILNTCRIVRKFLQISENDNLHARLAT

SEQ ID NO: 21948 - protein, 1311 aa, Symmachia rubina
METRSKYLKRIGSLPGGDRRGTPGADAGCFSGRTVSGDELNRRALTGSPKNTTANPHYTHNSPSSTSSREPYSPSTVSYVPTPTPTDEDSNSNLSPTFAVTQEASQTFLPASTKAGKPRVRMKWSREVNEFIMRTYYTITKLETDMTTYRQILHQKFTENYPGIQVTEQRLSDQRRVIIRNKLLNSETLHKLKEEVKLVLDEAQTRSEDTMYEATGFDAIREPHSYELECTNHNITFSTNTLTFSHITQYTSSQINTQPQPLTDINMTNTSSQTETAYAPLMDSLETINASTSSEDQYVTQLNNKLQSILTQYVDSDPTRRPTLPRLKHQYKLQKLTNIFNNILQQYLSDEAKLEDIHTLIYCTAVVITQELGYKIRNSNTNSLQSEHEAKPNWQIRLEKDIKNLRADIGRLTQYTHQNNRSKKIVERVTALFKSTTIHTRHENENKRPEEFLDTLKQKLALKASRLKRYKKSQKRKEDNNLFSRNEKLFYRNLNKNSEDRAKTSTDIPNIEDLEHFWSNIWESEESHNSKAEWIAEEARRWESIEEMQFEEITEEDIKHITSKLHNWKSPGIDKIHNFWYKKLCVFHKSLAKNLTEIILQKQVVPDFVTKGVTYMLPKGKNTSKPEQYRPITCLPTIYKILTATVTNKIRAHAEYHNIIAEEQKGCRRGHRGCKEQLVIDSIIHRNATAKKRNLHCTYIDYKKAFDSIPHSWLIQILKIYKVNSTIINFLINIMPLWKTTLQLNTNSALIQTREISIKKGIYQGDSLSPLWFCLAMNPISHLLNNCKAGYRLKYNNAETVISHLIYMDDVKLYAKTDKEMTLLLDKATTFSNDINMRFGFDKCRAVHIIKGKITSGDYIIDAAQNQLITAMEPNEIYKYLGYQQLKGLDHKNLKQKLMTEYKKRIVNVCKTRLTSKNLVKAVNSYEIPVLTYSFGIIKWTKTNIHSIERATRKIFTKHNYHHPKSALERLILKRQDGGRGLIDISALWQKQICSLRSFFHLKAESSNIHKAIVNNDNDYTPLNLIKPLTHETYDRDLHDHKVKESWKRKVLHGRHPQDLEQPHIDQEGSNKWLKIGNLFPETEGFITAIQDQVINTRNYKKHITKDLSVKDDKCRKCHLHSETIQHITGACPNLSQTDYTHRHNQIVNIIHKIIAIKHKLIPETHTPYYKYKPNKILESKTHKIYYDRAILTDKTIHFNRPDIILQDKINRVTYLIDIAVPNTHNITKTIAEKIQKYTELKEEITRIWKQRRVYIVPIVLSTTGVIPHHLHQSLRQLELNKNLYATLQKAAILNTCRIVRKFLQITEDDI

SEQ ID NO: 21949 - protein, 1316 aa, Emesis diogenia
METRSKFRKRLGPLPGGDRRGTSGADAGRDSGRTVGGRELNRRTLTGSPENTTANQHCTNNSPSSSLSREPYSPSTISYIPSDTPDSPTLSNNESDRIVTPTFAVAQEASQTFLPASTKAGKPRVRMKWSADTNLFIMRTYYYITKLETDMTTYRTLLHQKFIAQYPGVQVSEQRVSDQRRVIIRNKLLSVDTLNKLKEEVKIMLEQEALHYDPRNINIDTTLNETYLNTNTISTQNTHTSLQISPYMTSPRHSPHLNSQSQYSTSISTQTDTNIILIENDIETLDVATTNVDERSIQLNEKFQEILCQYSGLDPTKRPKLPKLRYHVSLQKLVNIFNNKILNQYLSDDLKLIDIHTLIYCTALTITQELNYKTEENSVNPKQKDKTKPAWQIRLERDIQKLRSDIGKLTQYIFNNNRSRKVVERVTTIFRHTTLHTRHENNNRRPEEFLDTLKQKLALKASRLKRYKKSQQRKDDNKQFIKNEKEFYRNLNKKTENAEKLMRSTPSTEDLELFWSNIWEKETTHNLQAEWIVEEEKRWETLEEMEFIEITEEDIKHITSKLQNWKSPGIDRIHNFWYKKLNILHKLLAKNLTEIILQKQIAPDFITKGITYMLPKGEYTSEPKQYRPITCLPTIYKILTSTITHKIRIHTENHNIIAEEQKGCRRGHMGCKEQLIIDSVIHKNASCKKRNLHCTYIDYQKAFDSIPHSWLIKVLNIYKINSSIVKFLETIMPLWKTTLHLNDRPALVTREISIKKGIYQGDSLSPLWFCLAMNPLSRLLNECSAGYRLKQNNSDTVISHLVYMDDIKLYSKNEKEMKKLIEKTTTFSNDINMCFGLEKCKTLHLIKGKIKAGDYILDHNQIISSINPNETYRYLGYHQIKGIDHKNAKEILITEYKRRITNICKTRLTGKNLIKAINSYGIPVLTYSFGVIKWSKTNIYYIERLTRKILTKFNYHHPKAAQERLVIKRQEGGRGLINIHALWLKQINNLRIFFNMKSNSSNIHKAVVENDNFYTPLNLNKSVDTETNVGNENCAIDMWKRKVLHGRHPHDLEQPLIDKEASNKWLKLGSLFPETEGFMLAIQDQVINTRNYKKYIIKDPNITNDKCRKCHAHAETIQHITGACPNLAQTDYTHRHNQIVNIIHKNIATKAKLITETHTPYYKYTPKSILENSTYKIYYDRAILTDKTIHYNRPDIIFLDKINKVTYLIDIAVPNTNNITKTIAEKIHKYTELKEEVLRIWKQNKVFVVPIVLSTTGIIPHQLHHSLKQLDLNPYIYATMQKAAILNTCRIVRKFLQISEDDTPDTTYRTQNTIVN

SEQ ID NO: 21950 - protein, 1385 aa, Sarota myrtea
METRSRTRKRLESLPGGDRRGASGAGAGCFSMRDTGGVALSRRASVTKATTAERRKLNRRANDVEATAETFVRTRTRLLRSKQQVVNETAAGSDSPQNNASEELDRWTYTDTYITTNQDLQQHTQYTSSISSREPYSPSTVSYAPTPTPSDDDTSNSDTPTFAVAREAPEAFLPASTKAGKSRVRMRWSPEVNTFIMRTYYYITKLETDMTIYRTILHQKFKAKYPDVNVTEQRVSDQKRVILRNKLLSDVVLKTIKDEVKLVLDQEESLEIGINQIGNKPYTDTQLHRNCHGLTQGYAQARPSFPTPSHTPTVTQLWEHSQADDYTPITEIFTQANTTYNLTQNQVETLNTGMALENINTDISELNNKLNSTLIQYSDVDPIKRPKLPKLRYSKELQNLVNIFNSHILSRYILDNAKLTDIHTLIYCTAYVITQELGYTIIKDHNQNMTIRKTKPSWQFRLEKDIKELRADIGKLTQYIHFKNRSKKVVDRVTSIFRNITIHTRHEESNKKPEEFLDTLKQKLALKASRLRRYKKALKRKEDNKLFATNQKIFYRNLNNVNTESRQVLQSETPNAAELEEFWSNVWECEVTHNSSAGWLLEEKQRWETIEEMQFEEVTEEEIKHLTAKLHNWKSPGLDRVHNFWYKKLTVLHNALAQNFSQIILSKQDIPDFIVKGITFMLPKGQYTTQPSQYRPITCLPTVYKLLTSVITHKIRIHTENHNILAEEQKGCRRGHMGCKEQLIIDSVIHKNATNKKHNLHCTYIDYQKAFDSIPHSWLINILEIYKINSSIIEFLKNIMPLWRTTLLLNKFPDIVTTREISIKRGIFQGDSLSPLWFCLAMNPLSHFLNTSGVGYRLRHNQTDTRISHLIYMDDIKLYSKTDKEMKELIDRTALFSKDIQMKFGLNKCRSLHIVKGKVQAGDYVVDDNQNQVITAMEPNDVYKYLGYQQFKIGIDQKTVKQSLINEYKRRVANVCKTRLNGKYLIRALNTYAIPILTYSFGIIQWSKADIIRLERSTRKILTKHNHHHPKSAIERLTIKRHEGGRGLINLQVLWRNQIRNLRNFFHLKARSSNFHKTIVDNDTKYTPLNLSQTIPPNIPATENDESLKESWMKKSLHGRHPHDLEQQTIDKEASNKFLKIGSLFPETEGFIIAIQDQIINTRNHRKFIIKDPTLTSDKCRKCNIHSETIQHITGACPNLTQTDYTHRHNQIANIIHKNLAIKYKLIHDTHTPYYKYKPETILENSTHKMYYDRAILTDRTIHYNRPDITLVDKANKTTFLIDIAVPNTHNITKTIAEKVHKYADLKDEILRIWKQEKVYIVPIVLSTTGVIPRHIHNSIKLLNLHQYIYTTLQKAAILNTCRIVRKFLQINEDDLIHNTIQIST

SEQ ID NO: 21951 - protein, 1207 aa, Nymphidium onaeum
MKWSLEVNTFIMRTYYYITKLETDMTTYRYLLHQKFKEKYPDVNVTEQRISDQRRVILRNKLLSEEILSGLKEEVKLILDKEQCTDANIIPSPIAPETCTNTLHNFQSNTSINLQTQACSTVFQTSTQTHLLSHSLYYTQTNNSNEASTQTDTTQILIENEIETLNTVGTHLNVNVPDLDRKLKTVLLEYAGLDPVKRPKLPKLRYSKNLTNLVQIFNTCVLEQYLTDDLKLIDVHTLIYCTAFVISEELGYIIKEDRNNEDHNNLINKNCKPFWQIRLEKDIQKLRSDIGKLTQYIFNNNRSKKVVDRVNSIFKNTSLHTRHENANKKPEEFLDTLKQKLSLKASRLKRYTKALKRKEDNKQFLRNQKLFYRNLNSKTPEPTNGSFSETPSAEELERFWSNIWESDVIHNTTASWISEERIKWEVIEEMPFEGITAEEVKFVTDKLHNWKSPGVDNIHNFWLKKLTILHKTFAKNFNDIILSRQELPDFMAKGITYMIPKEQHASQPSKYRPITCLPTTYKLLTSIITHKIRQHVEQYNIIAEEQKGCRRGHMGCKEQLIIDSVIHRLSSVKKRNLHCTYIDYQKAFDSVPHSWLINILKIYKINNFMIDFLANTMQLWKTTLHLNSYPHFVTTREISIKRGIFQGDSLSPLWFCLAMNPLSHILNNCQAGFSLKHNNIETVVSHLLYMDDIKLYSKTENQMKSLIDKITLFSNDIKMQFGLDKCRTLHVVKGKVKSGNYLVGEDQSQVITAMESSDVYKYLGYKQLKIGINQKIVKESLITEYKRRVNNICKTRLNGKHLIKAINTYAIPILTYSFGIIQWSKANILFLERITRKIFTKHNYHHPKSAIERLSIKRHEGGRGLISVQVLWQQQIKNLKRFFHTKACSSNIHKAIVSNDTNYTPLNLNQTLSTDISSEEYEQIAKETWKKKVLHGRHPHDLEQPLIDKIASNKFLKIGSLFPETEGFILAIQDQVINTRNHRKYIIKDPTLLSDKCRKCHIHSETIQHITGACPNLTQTDYTHRHNQVVNIIHKNLAIKHKLIEDTNTPYYKYKPDTILQNSTHKMYYDRAILTDRTIHYNRPDITLQDKINKITYLIDIAVPNTHNITKTIAEKVHKYTELKEEILSIWKQEKVYIVPIVLSTTGVIPRHIHNSLRLLNLNPYIYSTLQKAAILNTCRIVRKFLQINEDDMQHHVDPYNIPHTTH

SEQ ID NO: 21952 - protein, 1311 aa, Theope publius
METRSKYKRIGPLPGGDRRGTPGAGAGCDSIRTVGGEKLNRRALTGSPENTTAKQHSTQNSPSSATSIEPYSPSTISYAPSCTTTLLGEDSSRSVTPTFAVAQEVSQTFLPASTKAGKPRVRMKWTTDVNIFIMRTYYYITKLETDMTIYRTLLHKKFKEHYPGIQVTEQRLSDQKRVIIRNKLLSVNTLDSLKEEVKLILEEEDRLNKSLEMNALIDPDVININSRNIHTQHIYTTSQTTPLTLTQTPNQVSSQSCTYLNLTNTSTQTDTNYLLIENDIETLNIVTDGDDKITKLNNKLQSVVLQYAGMDPTKRPKLPKLTYQIQLQNLTNIFNNKLLNQYISDDAKLIDIHTLIYCTAFVITQELGYKIRDYTTNSQIKHENKPNWQIRLEKDIAKLRADIGKLTQYISFNNRSRKVVERVTAIFKNVTLHTKHENNNKRPEEFLDTLKQKLALKASRLKRYKKSQQRKEDNKLFARNEKLFYRNLNKQSEDIPKPPTNTPSTEEMEIFWSNIWETDTTHNLEADWLLAEEKRWESLEEMRYEEITEDDIKNITSKLQNWKSPGIDNVHNYWYKKLSVLHKLLAKNLNEIILLKQNIPVFITKGLTYMLSKGGDTSQPKQYRPITCLPTIYKILTSALTHKIRIHTERHKIMAEEQKGCRRGHMGCKEQLIIDSIIHKNASSKKRNLHCTYIDYQKAFDSIPHSWLINVLKIYKINSSIIDFLKIVMPLWKTTLHLNAYPTPIITREICIKKGIYQGDSLSPLWFCLAMNPLSHILNESLAGYRLKCNDKDTTISHLVYMDDIKLYSKTEKEMKSLIEKITMFSNDVNMKFGLDKCRTLHIVKGKIKTGDYTINENQVITAIEPNESYKYLGYHQLKGLDHKNIRDKLIIEYKRRLTNICKTRLTGKNLIKAINTFGIPVLTYSFGIIKWTKTNINFIERLTRKTLTKFNYHHPKAALERLIIKRQEGGRGLINIHSLWLKQINNLRNFFFKKSDTSDIHKTIVNNDSDYTPLNLSKYSITETESIENTNILKESWKKKTMHGRHPHDLELPNIDKEASNKWLKIGSLFPETEGFIIAIQDQVINTRNYRKFIIKDTKLTDDKCRKCRIHSETIQHITGACPNLAQTDYTHRHNQVVNIIHKNIGTKFKLISETHTPYYKYTPVPVIENPTHKMYYDRAILTDKTIHYNRPDITLQDKINKITYLIDIAVPNTHNITKTISEKIQKYTELKDEVMRIWKQKKVLIIPIVLSTTGVIPRQLHQSLKQLGLNPYIYSTLQKAAILNTCRIVRKFLQLSENEQIDPISETQL

SEQ ID NO: 21953 - protein, 1130 aa, Charidia lucaria
MRRSLRLKNKNSAQSMTAAEVLSTITSNPSSPISSTHSIFHSPTSSPNFSKRVSKKSPSPDITTLPVLDVARGANAFLPASTKAGKPRVRMIWNQDVNIFIMRTYYKITKLETDMTTYRKKLHELFSIQYPDIKVSEQRISDQRRMIIKKGYLTTKIVDKIKDEVSSEIQLLNTENCIDIGPSAEETQELQVASQMYNNIIQYDTHSAQVTHTATQIESPSLPEQNNHVIIREDSTFTDATIQKLSEKLQEAVIQHTGMDPAARPHLPKLKYSKSLIHLIYLFNKHILHNFLSESTQLTEIHTLTYCTAFVISKELNYRITVHPERIKARHNTKSSWQIRLEKDIDKLRAHIGQLTQYINHCRSERLVKKVQNIFQNYSRHSKYDKINNKPEEFLDTLKQKLTLKSQRLRRYKKAEKRKKDNIEFTNNEKTFYRNLCYRKTELQLENIQIPTKDQLENYWAGIWENKIQHNSKADWITKEKTRWETIEEMEFQKITEQDILHITSRLHNWKSPGIDKIHNYWYKKLTVLHKTLAKNITEIILGKQNIPHFISTGLTYMLPKSNNFTEPSNYRPITCLPTLYKIVTSAISRQITTHIEHYNILGEEQKGCRRGHMGCKEQLIIDSTIHKHATLKHRNLHCTYIDYKKAFDSIPHSWLIQILQIYKVNAVIIDFLLKIMLHWNTTLLLKLGQQTITTRQLRIEKGIYQGDSLSPLWFCLALNPLSHLINNWHIGYRLNNNAMDTTISHLVYMDDIKLYTKSSADMKILLDTVTEFSSDINMQFGLDKCKTLHIIRGKIQPGNYTINNNEVISAMESTDVYKYLGYNQSKGLQHTNTKETLTIEFKKRLNAICTTQLSGKHLIKAINTYAIPILTYSFGIIKWSKTDIEQLERIIRTTLTKHKYLHPKSAIERTTVKRQDGGRGIINIQNLWIKQVRNLKHFFIEKSKKSNLHKSITNNDHNFTPLNLAQGMNNLEYINLKKQQIEDWKKKTLHGRHPHDLDQPHVDKVASNMWLKIGNLFPETEGFMTAIQDQVINTKNYRKHIIKDPQITNDKCRRCHTQTETIQHITGACVSLTQTDYTHRHNQITNIIHQKLAFKHKLTDKPNTPYYKYIPQTVLENKTHKLYFDRAIL

SEQ ID NO: 21954 - protein, 1250 aa, Paramimus stigma
MRRSLRIKNKYSAQSTTVAEVLSTITSNPSSPISSTHSIFHSPTSSSNFSEKVSNDSSHGSSDICTLPVLDVAQGANAFLPASTKTGKPRVRMTWNQDVNIFIMRTYYKITKLETDMTTYRKKLHELFSIQYPDIKVSEQRISDQRRMIIKKGYLTANILQNIKNEVSSEIESQTTDNCVYINPSAEETQDSQVVSQMYSNITQHDTHSTQVTHITTQTESFPVLEENDIEILCKDSTFTNKILQKLSEKLEESIIQYSGMAPASRPSLPKLKYSKSLMRLTYLFNTHILNKFISEITQLTEIHTLTYCTAFVISTELNYRITVQPEYMKTRHTTKCSWQIRLEKDIEKLRAHIGQLTQYINHCRSDRLVKKVQNIFQNYSRHSTYDKMNNKPEEFLDTLKQKLALKSQRLRRYKKAERRKKDNIEFTNREKTFYRNLCYPKTELQLEETQIPTKDQLESYWAGIWENKTKHNIKADWITREKSRWETIEEMEFQEITEQDILHITSRLHNWKSPGIDKVHNYWYKKLTVLHKILAKNITDIILGKQNIPEFISKGLTYMLPKSSNFTEPSNYRPITCLPTLYKIVTSTISRQITAHIEHYNILAEEQKGCRRGHMGCKEQLIIDSTIHKHAASKHRNLHCTYIDYKKAFDSIPHSWLIQILQIYKVNTVLIDFLLKIMSHWSTTLLLKLGQQTVTTRQLKIEKGIYQGDSLSPLWFCLALNPLSHLINNWHIGYRLNNNAMDTTISHLVYMDDIKLYTKSSTDMKTLLDTVIEFSSDINMQFGLEKCKTLHIIRGKIQPGDYIINNNDIISAMEPTDMYKYLGYNQSKGLQHTNIKQTLITEFKKRLNSLCTTQLSGKHLIKAINTYAIPILTYSFGIIKWSKTDIEQLERTIRTTLTKHKYLHPKSAVERTTVKRQDGGRGIINIQHLWIKQVRSLQNFFVEKSKKSNLHKSITNNDQNFTPLNLAQCVNSLEYINEKEQIEDWKKKTLHGRHPHDLDQPHIDKVASNMWLKIGNLFPETEGFMIAIQDQVINTKNYRKHIIKDPQITSDKCRRCHTQIETIQHITGACVNLTQTDYTHRHNQITNIIHQKLALKHRLTDKSSTPYYKYIPQTVLENKTHKLYFDRAILTDKTVHYNRPDITLQDKLSKTTYLIDIAVPNTHNIQKTITEKICKYAELKEEITRIWQQEKVYVVPIVLSTTGVIPKHIHHSLKLLSLPQSTYIKLQKAAVLNTCRIVRKFLQIDENEM

SEQ ID NO: 21955 - protein, 1329 aa, Paramimus stigma
MAHILPTQAKVEQHTLRDAWLRGSLIVSMRTLGTGGHPVLLTLVAVPRGSAAIDVIFSLATRGNIMRRSTRIKNKNSAQYAAAAENIKTVITSCLSSSSPLSESNHSQQHRSSPQCSEDLSNQCSSTVSSEPISTAQIQSTLLVMDVARGANAFLPASTKAGKPRVRMSWNPDVNIFIMRTYYSITKLETDMTTYRKKLHELFTQRYPDVNVTEQRVSDQRRMIIKKGYLSAEILDKIKSEVRKQLIEQNSTEDTQNYTQISRNENRTQHIQEINHSEYANWSQNEIESFTQITTQITENDIPASGEYIKFTDEKVGEMHDKLQAAIATFSEMVPTARPKLPKLTYTKSLNYLVYIFNNNILHQFISEDTQLIDIHTLTYCTAFVISEELNNKIIHNSKNVKPKHNNIPPWQIRLERDIKNLRAHIGRLTQYINNCRSYKLVKKVQKIFHIYFKHTTHENNNKKPEEFLDTLKQKLALKSHRLKRYKKSEQRKKDNIGFAINEKSFYRNLFKSNILDVNLEKSNASIPKKEEFEDYWAGIWEEKVEHNNTADWIKKEEIRWETLEEMEFHEVLEDEIATITNRLHNWKSPGPDKIQNYWYKKLTVLHKSLAKNITEIIKGKQNIPFFMSSGITYMLPKTTNATGPSHYRPITCLPTLYKIITSVITRKITVHIENNNILSDAQKGCRRGHMGCKEQLIIDSTIHKHAASKNRNLHCTFIDYKKAFDSIPHSWLIKVLQIYKINTSIINFLMKVMRQWQTTIQINQYQRQFITREINIQKGIFQGDSLSPLWFCLAVNPLSHLLYNRHTGYKLNYNDNSKSINVTHLVYIDDIKLYSNSNNGMEKLIKTVTEFSKDINMQFGIDKCKTLHIIKGKIQPGDYIINNIDTISAMEPTEVYKYLGYNQSKGLNHTTIKQTLKTEFTKRLNALCKTQLSGKNLTKSINTYAIPILIYSFGIIKWYKTDIETLQRTIRTTLTKHNYLHPKSAIERFTIKRKDGGRGIINIQHLWEKQIRNIKTFFYAKSTTSKLHLAIIHNDKNFTPLNLVEKINSQNLGNTSSLEQNIEDWKKKVLHGRHPNDLEQDHIDKEASNTWLKVGQLFPETEGFIIAIQDQVINTRNYQKHIIKDTKITNDKCRRCNIQSETIQHITGACTSLTQTDYTHRHNQIVNIIHQKLALKHKLTPNTNTPYYKYKPHTVLENTTHKLYYDRAILTDRTIHYNRPDIILQNKLDKITYLIDIAVPNTHNLQKTIVEKISKYTELKDEVTRLWRQEKVYIVPIVLSTTGIIPYHLHKSLKLIDLPPSTYITIQKAAILNTCRTVRKFMQIEPNT

SEQ ID NO: 21956 - protein, 1253 aa, Charidia lucaria
MRRSTRIKNKNSVQYVAAAENIKTVITSCSSSPLSESNYSQSLSSSPLCSEDLSNQCSSPVSLEPISTAQAETNTLLVMDVARGANAFLPASTKAGKPRVRMSWNPDVNIFIMRTYYSITKLETDMTTYRKKLHELFIQRYPDVNVTEQRVSDQRRMIIKKSYLSSEILDKIKSEVRKQLHEHNTTEQTHNFTLISRNENRTQHIQEIQSQNEIESVTQTIENDIEVSAEYVPFKDEKVREMHDKLQSAIIKFSKMAPTARPKLPKLTYTKSLNYLVYLFNNNILHQFISEDTQLIDIHTLTYCTALVISEELNNKIIHKSENIKSKHNNKPPWQIRLEKDIEKLRAHIGRLTQYINNVRSYKLVKKVQKIFQIYFKHTMHENNNKKPEEFLDTLKQKLALKSHRLKRYKKSERRKKDNARFAYNEKMFYRNLFKSNILDVNSKNINASIPKKEEFEEYWAGIWEEKVEHNNTADWIKKEKLRWETLEEMEFHEVSEEEIANITTGLHNWKSPGTDKIHNYWYKKLTTLHKSLARNITEIIKGKQNIPFFMSSGVTYMLPKTKNTTEPSHYRPITCLPTLYKIVTSAITRKITAHIENHNILADAQKGCRRGHMGCKEQLIIDSTIHKHAASKNRNLHCTFIDYKKAFDSIPHSWLIQVLQIYKINTNIINFLRKVMTQWQTTIQINQYHQQITTREINIQKGIFQGDSLSPLWFCLALNPLSHLLYNCHTGYKLNYIDNSESININHLVYMDDIKLYSNSNNGMEKLINTVTIFSKDINMQFGIDKCKTLHIIKGKIQPGDYIINDIDTISAMEPEEVYKYLGYNQSKGLNHTTIKNTLKTEFTKRLNALCKTQLSGKNLTKSINTYAIPILIYSFGIIKWYKTDIEALQRSTRTTLTKHNYLHPKSALERITIKRKDGGRGIINIQQLWKKQIRNLKTYFYAKSTTSKLHLAIIHNDKNFTPLNLVEKIDSQNQGNISSLDQNIEDWKTKVLHGRHPNDLEQEHIDKEASNSWLKVGQLFPETEGFIIAIQDQVINTRNYQKHIIKDTKITNDKCRRCNTQSETIQHITGACTSLTQTDYTHRHNQIVNIIHQKLAHKHKLTPNTNTPYYKYKPHTVLETTTHKLYYDRAVLTDRTIHYNRPDIILQNKLDKITYLIDIAVPNTHNIQKTIVEKISKYTELKDEVTRLWRQEKVYVVPIVLSTTGIIPYHLHKSLKLIGLAPFTYITLQKAAILNTCRTVRKFMQIDEHHT

SEQ ID NO: 21957 - protein, 1256 aa, Atarnes sallei
MRRSLRIKNKNSAQSTTASEVISTIATNPSSPISSIHSIFQSPMSSPPSERASDDTPSLDTTTLPVLDVARGANAFLPASTKAGKPRVRMTWNQDVNIFIMRTYYNITKLETDMTTYRKKLHDLFSIQYPDIKVSEQRISDQRRMIIKKGYLTTKILEKIKNEVASEIQQQNCIHVGPDAVETEESQVVSEMYNNITQYDTHSTLVTHTPTQTESLPLSEETHLEVTCEDTTFRDAIIQNLIEKLREAIVQYSGIAPASRPHLPKLTYSTSLIRLIHLFNTHILSIFLSEKTQLTEIHTLTYCTAFVISNELSYRITAHPKVLKTRHNIKSSWQIRLEKDIDKLRAHIGQLTQYINNRRSDRLVKKVHNIFQHYLRHSTYEKNNTKPEEFLDTLKQKLALKSQRLRRYKKAEKRKKDNIEFTNNEKTFYRKLCCPKTEPQLENTQIPTKDQLESYWAGIWENKVQHNSKADWITREKMKWETIKEMEFQEITEQDILHITSRLHNWKSPGIDKVHNYWYKKLTVLHKTLAKNITEIILGKQNIPTFISTGITYMLPKSNNFTEPSNYRPITCLPTLYKIVTSAISRQITTHIENHNIMAEEQKGCRRGHMGCKEQLIIDSTIHKHATTKHRNLHCTYIDYKKAFDSIPHSWLIQILQIYKVNTVITEFLLKIMSHWNTTLLLKLGQQTVTTRQLKIEKGIYQGDSLSPLWFCLALNPLSHLINNWQIGYRLNNNTMDTTISHLVYMDDIKLYTKSSTDMKTLLDTVTEFSNDINMQFGLDKCRTLHIIRGKIQPGNYTINNNEVISAMEPTDVYKYLGYNQSKGLQHTNIKQTLIIEFKKRLNAICTTQLSGKYLIKAINTYAVPILTYSFGVIKWSKTDIEQLGRTIRTTLTKHKYLHPKSALERTTVKRQDGGRGIINIQHLWIKQVRNLKNFFIEKSKKSNLHKSITYNDQNFTPLNLAQSIHTCNSLEYVNSKEQQIEDWKNKTLHGRHPNDLDQQHIDKVASNMWLKAGNLFPETEGFMIAIQDQVINTKNYRKHIIKDPQITNDKCRRCHNQTETIQHITGACVNLTQTDYTHRHNQITNIIHQKLAFKHKLIHKPNTPYYKYIPHTVLENKTHKLYFDRAILTDKTIHYNRPDITLQDKLSKTTYLIDIAVPNTHNIQKTIAEKISKYAELKEEITRIWHQEKVYVVPIVLSTTGVIPKHIHHSLKLIGLPRSTYVKLQKAAILNTCRIVRKFMQLEENETLVPRTINN

SEQ ID NO: 21958 - protein, 1257 aa, Eburuncus unifasciata
MRRSLRIKNKNFVQSTTAAEVISTIASNSSSPISSTHSIFQSPMSSPLSERISNDTPPLRITTLPVSDVARGANALLPASTKAGKPRVRMTWNQDVNIFIMRTYYNITKLETDMTTYRKKLHDLFSIKYPDIKVSEQRISDQRRMIIKKGYLTTKMLEKIKNEVASEIQQQNTANCTHIGPGTTETLESQFLSQMYNNITQYNTRSTLVTHTPTESFPLLEEDDPEVICEDATFTDATIQNLAEKLREAVTQYSEIAPASRPLLPKLKYSTSLTHLIYLFNTHILNRFISEETQLTEIHTLTYCTAFVISKELNYTITAHPKATNTQHNTKPSWQIRLEKDIDKLRAHIGQLTQYINKCRSERLVKKVYNIFQNYLRHSTYDTINNKPEEFLDTLKQKLALKSQRLRRYKKAEKRKKDNIEFTNNEKTFYRKLCCPKTEQQLENTQIPTKDQLENYWAGIWENKVQHNSKADWITREKTKWETIEEMQFQDITEQDILHITSTLHNWKSPGIDKVHNYWYKKLTVLHKTLAKNITEIILGKQIIPTFISTGLTYMLPKSNNFAEPSNYRPITCLPTLYKIVTSAISRQITTHIENHNIMAEEQKGCRRGHMGCKEQLIIDSTIHKHATSKHRNLHCTYIDYKKAFDSIPHSWLIQILQIYKVNTVITEFLLKIMSHWNTTLLLKRGEQTVTTRQIKIEKGIYQGDSLSPLWFCLALNPLSSLINDWQIGYRLINNTVHTTISHLVYMDDVKLYTKSSTDMKILLDTVTEFSSDINMHFGLDKCKTLHIIRGKIQPGNYTINNNEVISAMEPTDVYKYLGYNQSKGLQHTNIKQTLTTEFKRRLSAICTTQLSGKHLIKAINTYAIPILTYSFGIIKWSKTDIEQLERTVRTTLTKHKYLHPKSALERTTVKRQDGGRGIINIQHLWIKQVRNLKNFFIEKSKKSNLHKSITNNDQNFTPLNLAQSIHKCNSLEYIHLKEQQIEDWKKKTLHGRHPHDLDQQHVDKVASNMWLKVGNLFPETEGFMMAIQDQVINTKNYRKHIIKDPQITNDKCRRCHNQTETIQHITGACVNLTQTDYTHRHNQISNIIHQKLAFKHKLIHKPNTPYYKYIPQTVLESKTHKLYFDRAILTDKTIHYNRPDITLQDKLNKTTFLIDIAVPNTHNIQKTIAEKISKYTELKEEITRIWHQEKVYVVPIVLSTTGVIPKHIHHSLKLIGLPRSTYIKLQKAAVLNTCRIVRKFMQIEENETLAPRTTNN

SEQ ID NO: 21959 - protein, 1297 aa, Laothoe populi
METRSKKKLRGPLPGGDRRGTPGADAGCFSIRSVSGEELNRRAPTGLPEDITANTQFRQTDSRTQSPTSSIVHRPYSPSTESYAPSTTDEDSRDFTPPIPTLDVTREVNTFLPASTKAGKTRVRMKWTAEVNMFIMRTYYRITKLETDMTTYRQTLHELFSRQYPEVNVSQQRISDQRRVIIKNKLLSETVLNSIKDEVQAELSEQRNHENHSPDTIPYTPNIHTNTPPLIRTTQSQMPLYSSANTYQTQNYNFSHISTQTETVNTFIESDIVVLNLNTIPSTMTQQVLSEKLQTAIVKFSGMDPTARPNLPKLKYSPYLSNLLDLFNNTILRQFISEDSLITDIHTLTYCTAFVISEELGYNIENNSYNTKRKNFNKPPWQIRLEKDIEQLRIDIGRLTQYIHNNRSTKVVKRVMEIFRKATIHSKYENNNKKPEEYLDTLKQKLKLKAGRLARYKKALQRKNDNKLFVSKEKMFYKNLYNANKEVSTHNDNEGPTSVDVETYWSNIWEHSTVHDNEAKWINEEEENCQLIEEMQFNEITKEDINIVTNKTHNWKSPGLDKIHNFWYKKLSILHKPIAKNFTHIILGKQPLPEFIAKGITYLQPKNQQSHLPSQYRPITCLPTLYKLLTSAISLKIIKHVENNNILAEEQKGCRRGHMGCKEQLIIDSTIHKHAATQKRNLHCTYIDYQKAFDSIPHSWLIKTLQIYKINPKIVNFFENLMPHWTTMLRLNINNRQITTRQIEIKKGIYQGDSLSPLWFCLALNPLSRLLRDCRAGYRLKHTNTESIISHLIYMDDIKLYASTKKQMKQLIDITSEFSRNINMKFGLDKCKTLHIIKGRIQPGDVEINETETITAMEPNELYKYLGYNELKGIDHNMTKLKLLGEYNRRTTALCKTQLTSKNLIKAINTFAIPILTYSFGIIKWTKTDISNIQRKTRTILTKHNYLHPKSAIERLSIKRQRGGRGLINIQELWQKQIHTLKSFFYTKSNTSDIHKAIIHNDTHCTPLNLSAQTTSTQSNDIDYERDKLAEWKAKVLHGRHPHDLEQSHIDADASNKWLQVGTLFPETEGFIIAIQDQVINTKNYRKHIIKDRNITDDKCRKCRSCPENIQHITGACPNLAQTDYTHRHNQIVSIIHQKLAIKYKLIQDNKIPYYKYTPQHILENNTHKLYYDRTILSDKTIHYNRPDITLVDKIKKTTYIIDIAIPNTHNILKTIAEKIHKYTDLKEEIGRIWKQDKVYIVPVVLSTTGIIPKHLHHSLKLLDLNPKIFIQLQKAAILNTCRIVRKFMQTEETTHI

SEQ ID NO: 21960 - protein, 1297 aa, Hemaris fuciformis
METRSKKKLKGPLPGGDRRGTPGADAGCHSMQTVSGEELTRRAPTGLPENTTANAHYRQTDYRLESPTSSIYEPYSPSTRSYIPSTTDDDSRNIPSPNPAFDVTREVNSFLPASTKAGKARVRMKWTQDINTFIMRTYYQITKLETDMTAYRQTLHELFLKQYPGINVTQQRISDQRRVIIRNKLLPESTLNRIKDEVRIELGKSDHSEMYSISVIPELPDQLTQVAQLDLVHLDRSPEKNTLENTDVHHISTQTESVFTLIESDIEILKTPISDVITQKLCDKLQTAIVKYSGMDPTVRPKLPNLRYSKQLTHLIKLFNNDILTQFISDDSLLSDIHIITYCSAFVISEELGYTCSNKTHPVRSKNFMKPPWQIRLETDIARLRADIGRLTQFINNNRSKKLVQKVEKILKNTKVHSSHEENNRRPEEFLDTLKQKLAIKSGRLARYNKSLKRKNDNKLFINREKIFYRNLNAKNGDKETSTPPHVESIESFWSNIWENEINYNQEADWITQEEERWQKIEQMEFEEITQEDIKIVTSRLHNWKSPGLDKIHNFWFKKLNILHRPIAKNITNLILGQNNIPDFISKGVTYLLPKSKQTDSPSQYRPITCLPTLYKILTSVITLKINAHAEHNNIIGEEQKGCRRFHMGCKEQLVIDSTIHKHATSNKRNLHCTYIDYQKAFDSIPHSWLLKILEIYKIHPKIVTFLKNIMSNWKTVLHINSSTGPIISRQLSIKKGIYQGDSLSPLWFCLALNPLTHLLRDCQTGYHLKHNNRDTIISHLLYMDDIKLYANTDKQMQKLVDITAKFSKDLNMKFGLEKCKTLHIVKGKIQPGDYIVNEKEVISAIEPNDLYKYLGYHESKGIDHTKTKLKLISEYTRRTNALCKTQLTSKSLFKALNTFAIPILTYSFGIIKWSKTDINCIERKTRTILTKHNHLHPKSAVERLSINRSKGGRGLINIHSLWQNQIQKLKKFFLDKAESSDLHEAVKCNDKNYTPLNLSQEVTSTIHINKDDFERDKIANWKSKVLHGRHPNDLEQTHIDAEASNKWLKVGTLFPETEGFIIAIQDQVINTRNYRKHIIKDPTVTDDRCRKCRIHSENIQHIIGGCPNLAQTDYTHRHNQIVNVIHKKLAIKHQLIQDNKVPYYKYTPQAILENNKHKLYYDRTILTDRTVHYNRPDITLIDKMTKTTYLIDVAVPNTHNILKTIAEKVHKYSDLKDEIIRVWKQNKVYIVPIVISNTGIIPKHLHHSIKLIDLNPNTYIQLQKAAILNTCRIVRKFMQIDESTPYVDTTIVTLPD

SEQ ID NO: 21961 - protein, 1297 aa, Hemaris fuciformis
METRSKKKLKGPLPGGDRRGTPGADAGCHSMQTVSGEELIRRAPTGLPENTTANAHYRQTDYRLESPTSSIYEPYSPSTRSYIPSTTDDDSRNIPSPNPAFDVTREVNSFLPASTKAGKARVRMKWTQDINTFIMRTYYQITKLETDMTAYRQTLHELFLKQYPGINVTQQRISDQRRVIIRNKLLPESTLNRIKDEVRIELGKSDHSEMYSISVIPELPDQLTQVAQLDLVHLDRSPEKNTLENTDVHHISTQTESVFTLIESDIEILKTPISDVITQKLCDKLQTAIVKYSGMDPTVRPKLPNLRYSKQLTHLIKLFNNDILTQFISDDSLLSDIHTITYCSAFVISEELGYTCSNKTHPVRSKNFMKPPWQIRLETDIARLRADIGRLTQFINNNRSKKLVQKVEKILKNTKVHSSHEENNRRPEEFLDTLKQKLAIKSGRLARYNKSLKRKNDNKLFINREKIFYRNLNAKNGDKETSTPPHVESIESFWSNIWENEINYNQEADWITQEEERWQKIEQMEFEEITQEDIKIVTSRLHNWKSPGLDKIHNFWFKKLNILHRPIAKNITNLILGQNNIPDFISKGVTYLLPKSKQTDSPSQYRPITCLPTLYKILTSVITLKINAHAEHNNIIGEEQKGCRRFHMGCKEQLVIDSTIHKHATSNKRNLHCTYIDYQKAFDSIPHSWLLKILEIYKIHPKIVTFLKNIMSNWKTVLHINSSTGPIISRQLSIKKGIYQGDSLSPLWFCLALNPLTHLLRDCQTGYHLKHNNRDTIISHLLYMDDIKLYANTDKQMQKLVDITAKFCKDLNMKFGLEKCKTLHIVKGKIQPGDYIVNEKEVISAIEPNDLYKYLGYHESKGIDHTKTKLKLISEYTRRTNALCKTQLTSKSLFKALNIFAIPILTYSFGIIKWSKTDINCIERKTRTILTKHNHLHPKSAVERLSINRSKGGRGLINIHSLWQNQIQKLKKFFLDKAESSDLHEAVKCNDKNYTPLNLSQEVTSTIHINKDDFERDKIANWKSKVLHGRHPNDLEQTHIDAEASNKWLKVGTLFPETEGFIIAIQDQVINTRNYRKHIIKDPTVTDDRCRKCRIHSENIQHIIGGCPNLAQTDYTHRHNQIVNVIHKKLAIKHQLIQDNKVPYYKYTPQAILENNKHKLYYDRTILTDRTVHYNRPDITLIDKMTKTTYLIDVAVPNTHNILKTIAEKVHKYSDLKDEIIRVWKQNKVYIVPIVISNTGIIPKHLHHSIKLIDLNPNTYIQIQKAAILNTCRIVRKFMQIDESTPYVDTTIVTLPD

SEQ ID NO: 21962 - protein, 1347 aa, Hemaris fuciformis
MPCIKIYNNNNNKPPKNQPHVLIDHLITWGAETRFDNYWRGQRGSGNPFNMETRSKKKLKGPLPGGDRRGTPGADAGCHSMQTVSGEELTRRAPTGLPENTTANAHYRQTDYRLESPTSSIYEPYSPSTRSYIPSTTDDDSRNIPSPNPAFDVTREVNSFLPASTKAGKARVRMKWTQDINTFIMRTYYQITKLETDMTAYRQTLHELFLKQYPGINVTQQRISDQRRVIIRNKLLPESTLNRIKDEVRIELGKSDHSEMYSISVIPELPDQLTQVAQLDLVHLDRSPEKNTLENTDMHHISTQTESVFTLIESDIEILKTPISDVITQKLCDKLQTAIVKYSGMDPTVRPKLPNLRYSKQLTHLIKLFNNDILTQFISDDSLLSDIHTITYCSAFVISEELGYTCSNKTHPVSSKNFMKPPWQIRLETDIARLRADIGRLTQFINNNRSKKLVQKVEKILKNTKVHSSHEENNRRPEEFLDTLKQKLAIKSGRLARYNKSLKRKNDNKLFINREKIFYRNLNAKNGDKETSTPPHVESIESFWSNIWENEINYNQEADWITQEEERWQKIEQMEFEEITQEDIKIVTSRLHNWKSPGLDKIHNFWFKKLNILHRPIAKNITNLILGQNNIPDFISKGVTYLLPKSKQTDSPSQYRPITCLPTLYKILTSVITLKINAHAEHNNIIGEEQKGCRRFHMGCKEQLVIDSTIHKHATSNKRNLHCTYIDYQKAFDSIPHSWLLKILEIYKIHPKIVTFLKNIMSNWKTVLHINSSTGPIISRQLSIKKGIYQGDSLSPLWFCLALNPLTHLLRDCQTGYHLKHNNRDTIISHLLYMDDIKLYANTDKQMQKLVDITAKFSKDLNMKFGLEKCKTLHIVKGKIQPGDYIVNEKEVISAIEPNDLYKYLGYHESKGIDHTKTKLKLISEYTRRTNALCKTQLTSKSLFKALNTFAIPILTYSFGIIKWSKTDINCIERKTRTILTKHNHLHPKSAVERLSINRSKGGRGLINIHSLWQNQIQKLKKFFLDKAESSDLHEAVKCNDKNYTPLNLSQEVTSTIHINKDDFERDKIANWKSKVLHGRHPNDLEQTHIDAEASNKWLKVGTLFPETEGFIIAIQDQVINTRNYRKHIIKDPTVTDDRCRKCRIHSENIQHIIGGCPNLAQTDYTHRHNQIVNVIHKKLAIKHQLIQDNKVPYYKYTPQAILENNKHKLYYDRTILTDRTVHYNRPDITLIDKMTKTTYLIDVAVPNTHNILKTIAEKVHKYSDLKDEIIRVWKQNKVYIVPIVISNTGIIPKHLHHSIKLIDLNPNTYIQLQKAAILNTCRIVRKFMQIDESTPYVDTTIVTLPD

SEQ ID NO: 21963 - protein, 1306 aa, Hemaris fuciformis
METRSMSKRIGPLPGGDRRGTPGADAGCDSGRTVSGAELNRRAPTGSPEDTTANVQYRQTDDRFNSPISSSYEPYSPSTASYAPSSIDDESRDTPTPNPVFDVAQEANAFLPASTKAGKVRVRMKWTKDINIFIMRTYYLVTKLETNMTAYRTLLHEHFLKQYPSINVTQQRISDQRRVIIRNKLLPEETLNRIKEEVRTQLSISENTEFANVSNTPHAIQTSQPYLTSLYIPSETDSPLSHNVLHTSTQTENISTLIENDIEVLNTMPIPDVTAQSMCDKLRTAIVKYSGMDPIVRPKLPKLKYSKRLNHLLNLFNKVVLNQFISDDSILTDIHTITYCAALVVSEELGYNFEHHHNNNLCHANPKKYTKPPWKIRLETDISRLRADIGRLTQYINNNRSRKLVKEVTKILAKTIVHSKHEKNNTRLEEFLDTLKQKLAIKAARLSRYNKSLKRRQDNNLFANKEKIFYRNLNNTNNNNSTDTSNQPNVQAIESFWSDIWETEIHHNTEAQWISKEMDRWEAIEEMKFEEITEEDIKIVTSRLHNWKSPGLDKIHNFWFKKLHILHRSIAKNLTNLILGNQNIPDFIAKGITYLLPKNKETQLPSHYRPITCLPTLYKILTSTITLKINKHIESNNIISEEQKGCRRGHMGCKEQLIIDSTIHKHATSNKRNLHCTYIDYQKAFDSIPHSWLIKILEIYKISPTIVTFLKNIMPRWKTVLSVNSSNGLTSRQLSIKKGIYQGDSLSPLWFCLALNPLSNLLRECRAGYHLKQDNKNTIISHLLYMDDIKLYANTEKQLKKLVDTTAEFSKDLNMKFGLDKCKTLHIVKGKVQPGDYQINETEIISAMEPNDLYKYLGYYECKGIDHTATKHKLLNEYSRRTNSICKTQLTSRNLIKAINTFAIPILTYSFGIIKWSKTDITNIERKTRTILTKNKHLHPKSAIERLSINRTKGGRGLINIQALWQKQIDKLRLFFLSKADISDIHAAVKQNDKNYTPLNLSQQIITTNNSNTAININSDHHEADKIANWKAKVLHGRHPNDLEQSHIDTDASNKWLKVGALYPETEGFIIAIQDQVINTKNYRKYIIKDQTVTDDRCRKCRLHPENIQHITGGCPNLAQTDYTHRHNQIVNIIHKMLALKYHLIQDNKVPYYQYKPLPILENTNYRIYYDRTILTDKTVHYNRPDITLTDKITKTTYLIDIAVPNTHNILKTIAEKIHKYTDLKDEITRTWKQNKVYIVPVVLSTTGIIPKHLHHSLKLLDLSPNVYIQLQKAAILNTCRIVRKFMQIDEITLPYVDPTLVITSE

SEQ ID NO: 21964 - protein, 1294 aa, Hemaris fuciformis
METRSKSKRIGPLPGGDRRGTPGADAGCDSGRTVSGVELNRRAPTGLPEDTTAKSQYRPTDNRPASPASSITEPYSPSTISYAPSATDEESRQSISPPIPALSVTREVNTFLPASTKAGKTRVRMKWTSEVNTFIMRTYYRITKLETDMTTYRQTLHELFLMQYPEINVSQQRISDQRRVIVRNKLLPDITLNKIKEEVQAELAQEHNTVNNPSPTSTPTEATQLELLPPPEIIITSIDNNDLRHISTQTETTSTFIENDIEILNHPLDLDAIEKQLNDKLQSAILKFSGMDPLVRPNLPRLKYSKYLIYLVNIFNRTLLNQFISDESSITDIHTLTYCTAFVISEELGHNIKTNSQYTPRKNTLKPPWQIRLEKDINRLRVDIGRLTQYINNNRSKKVVKTVSEIFSKLSIHTKHDRINKKPEEYLDTLKQKLSLKAGRLARYKKSLKRTYDNKLFANNEKSFYRNLNTKIDTDSNNKTNTPTVETMETFWADLWETEVNYNSEAEWITEEIQRWQSIPEMEFDEFTEKEIKMVTSRLHNWKSPGPDKVHNFWYKKLETLHRPLAKNITKLILGNQNIPDFIANGITYLLPKSKDAHLPSQYRPITCLPTLYKILTSALSLRIGNHIESNNILSEEQKGCRRGYMGCKEQLVIDSTIHKHAINHKRNLHCTYIDYQKAFDSIPHSWLIKILEIYKINPNIINFLRKIMPNWKTTLQFNNNNKKTASRKINIKKGIYQGDSLSPMWFCLALNPLSNLLRGSRAGYHLKHNNKETIISHLIYMDDIKLFANTDKQMKKLIDTTVAFSNDINMKFGLDKCKTVHIIKGKIQPGDYVINQTETITAMETNDLYKYLGYQELKGIDHAKIKQNLLSEYTRRTISLCKTQLTSKNLFKAINTFAVPILTYSFGVIKWSKTDIGNIERKTRTTLTKHNNLHPKSAIERLSLNRTKGGRGLINIYALWQKQIYTLKSFFIEKSKISDIHAAINFHDKNYTPLNLSDQSILTVQLNDEYERKKISEWKAKVLHGRHPHDLEQTHVDTEASNKWLQIGSLFPETEGFAIAIQDQVINTKNYRKHIIKDGTVTDDRCRKCRSHPENIQHITGGCPNLAQSDYTYRHNQIVNIIHQKLALKYKLIENTQTPYYKYSPHPTLENTTHKLYYDRSILTDKTIHYNRPDITLTDKITKTTYIIDVAVPNTHNLLKSIAEKIHKYTDLKDEIARVWKQNKVYIVPVVLSVTGVIPRHLHHSLKLIDLKPNTYILLQKAAILNTCRIVRRFLQIDENTIHPDPIITLSAD

SEQ ID NO: 21965 - protein, 1297 aa, Hemaris fuciformis
METRSKSKRIGPLPGGDRRGTLGADAGCDSGRTVSGAELNRRAPTGLPEDTTANPQNRPTDNRSTSPISSITEPYSPSTISYAPSATDEESRHSNSPPIPALSVAQEVNTFLPASTKAGKTRVRMKWTSDVNTFIMRTYYRITKLETDMTTYRQTLHELFLKQYPGINVSQQRVSDQRRVIIRNKLLPEITLNKIKDEVQDELSREDNNETYNFPSTVNTQTNFTQRVSPNISPEITLDAYENYNLHHISTQTETTQTLIENEVEILNLPPKTDITIEQKTEKLKSALIKYSGMDPLVRPKLPKLKYSKNLTYLVNLFNNTVLNQFVSEDSLITDIHTLIYCTAFVISEELGYNIENRPQHAPRKNISKPSWQIRLETDINRLRADIGRLTQYIRNNRSKKVVKRVTEIFAKTSIHSKHEQNNKNPEEYLDTLKQKLSLKAGRLARYNKSLKRKNDNKLFTNNEKIFYRKLNTNIDTTVNNKTDDTPNAEAIETFWTNVWETDINHNNEAGWISEEKLRWQSIEEMDFEKITEDEIKIVTSKLHNWKSPGLDKVHNFWFKKLDSLHKSLAKNMTKLILGKQNIPDFIAKGITYLLPKNKQPQSPSQYRPITCLPTIYKILTSTISHRINSHVESNNILAEEQKGCRRGNMGCKEQLIIDSTIHKHAMSQKRNLHCTFIDYQKAFDSIPHSWLLKILEIYKINPQVLNFLKNIMPHWKTRLHITDNNNQFTTRQITIKKGIYQGDSLSPLWFCLALNPLSYLLRENRVGYHLKHTNTDTIVSHLVYMDDIKLYANTDKSMKKLIDTTVGFSRDINMQFGIDKCKTLHIIKGKIQPGDYVISQTETIAAMESNEFYKYLGYQELKGIDHTTIKQNLITEYSRRTTAICKTQLSSKNLFKAINTFAIPILTYSFGIIKWSKTNIMNIERKTRTLLTKHNYLHPKSAIERLSLQRTKGGRGLINITALWQKQIHTLKTFFLDKSNTSEIHKAIKFNDNNYTPLNLSDNIILTTQLNNEHERNKMLEWKAKVLHGRHPHDLEQIHIDTEASNKWLQIGSLFPETEGFTIAIQDQVINTKNYRKYIIKDGTITDDRCRKCRSHPENIQHITGGCPNLAQTDYTHRHNQIVNILHQKLAFKHKLIENTQTPYYKYSPKSILENNTHKLYYDRTILTDKTIHFNRPDITLTDKTTKTTYLIDVAVPNTHNILKTIAEKIHKYTDLKDEITRVWKQNKVYIVPVVLSTTGIIPRHLHHSIKLINLKPNTYILLQKAAILNTCRIVRRFLQIDENSTHQDPTTLFSD

SEQ ID NO: 21966 - protein, 1297 aa, Hemaris fuciformis
METRSKSKRIGPLPGGDRRGTLRADAGCDSGRTVSGAELNRRAPTGLPEDTTANPQNRPTDNRSTSPISSITEPYSPSTISYAPSATDEESRHSNSPPIPALSVAQEVNTFLPASTKAGKTRVRMKWTSDVNTFIMRTYYRITKLETDMTTYRQTLHELFLKQYPGINVSQQRVSDQRRVIIRNKLLPEITLNKIKDEVQDELSREDNNEIYNFPSTVNTQTNFTQRVSPNISPEITLDAYENYNLHHISTQTETIQTLIENEVEILNLPPKTDITIEQKTEKLKSALIKYSGMDPLVRPKLPKLKYSKNLTYLVNLFNNTVLNQFVSEDSLITDIHTLIYCTAFVISEELGYNIENRPQHAPRKNISKPSWQIRLETDINRLRADIGILTQYIRNNRSKKVVKRVTEIFAKTSIHSKHEQNNKNPEEYLDTLKQKLSLKAGRLARYNKSLKRKNDNKLFTNNEKIFYRKLNTNIDTTVNNKTDDTPNAEAIETFWTNVWETDINHNNEAGWISEEKLRWQSIEEMDFEEITEDEIKIVTSKLHNWKSPGLDKVHNFWFKKLDSLHKSLAKNMTKLILGKQNIPDFIAKGITYLLPKNKQPQSPSQYRPITCLPTIYKILTSTISHRINSHVESNNILAEEQKGCRRGNMGCKEQLIIDSTIHKHAMSQKRNLHCTFIDYQKTFDSIPHSWLLKILEIYKINPQVLNFLKNIMPHWKTRLHITDNNNQFTTRQITIKKGIYQGDSLSPLWFCLALNPLSYLLRENRVGYHLKHTNTDTIVSHLVYMDDIKLYANTDKSMKKLIDTTVGFSRDINMQFGIDKCKTLHIIKGKIQPGDYVISQTETIAAMESNEFYKYLGYQELKGIDHTTIKQNLITEYSRRTTAICKTQLSSKNLFKAINTFAIPILTYSFGVIKWSKTNIMNIERKTRTLLTKHNYLHPKSAIERLSLQRTKGGRGLINITALWQKQIHTLKTFFLDKSNTSEIHKAIKFNDNNYTPLNLSDNIILTTQLNNEHERNKMLEWKAKVLHGRHPHDLEQIHIDTEASNKWLQIGSLFPETEGFTIAIQDQVINTKNYRKYIIKDGTITDDRCRKCRSHPENIQHITGGCPNLAQTDYTHRHNQIVNILHQKLAFKHKLIENTQTPYYKYSPKSILENNSHKLYYDRTILTDKTIHFNRPDITLTDKTTKTTYLIDVAVPNTHNILKTIAEKIHKYTDLKDEITRVWKQNKVYIVPVVLSTTGIIPRHLHHSIKLINLKPNTYILLQKAAILNTCRIVRRFLQIDENSTHQDPTTLFSD

SEQ ID NO: 21967 - protein, 1297 aa, Hemaris fuciformis
METRSKSKRIGPLPGGDRRGTLGADAGCDSGRTVSGAELNRRAPTGLPEDTTANPQNKPTDNRSTSPISSITEPYSPSTISYAPSATDEESRHSNSPPIPALSVAQEVNTFLPASTKAGKTRVRMKWTSDVNTFIMRTYYRITKLETDMTTYRQTLHELFLKQYPGINVSQQRVSDQRRVIIRNKLLPEITLNKIKDEVQDELSREDNNETYNFPSTVNTQTNFTQRVSPNISPEITLDAYENYNLHHISTQTETIQTLIENEVEILNLPPKTDITIEQKTEKLKSALIKYSGMDPLVRPKLPKLKYSKNLTYLVNLFNNTVLNQFVSEDSLITDIHTLIYCTAFVISEELGYNIENRPQHTPRKNISKPSWQIRLETDINRLRADIGRLTQYIRNNRSKKVVKRVTEIFAKTSIHSKHEQNNKNPEEYLDTLKQKLSLKAGRLARYNKSLKRKNDNKLFTNNEKIFYRKLNTNIDTTVNNKTDDTPNAEAIETYWTNVWETDINHNNEAGWISEEKLRWQSIEEMDFEEITEDEIKIVTSKLHNWKSPGLDKVHNFWFKKLDSLHKSLAKNMTKLILGKQNIPDFIAKGITYLLPKNKQPQSPSQYRPITCLPTIYKILTSTISHRINSHVESNNILAEEQKGCRRGNMGCKEQLIIDSTIHKHAMSQKRNLHCTFIDYQKAFDSIPHSWLLKILEIYKINPQVLNFLKNIMPHWKTRLHITDNNNQFTTREITIKKGIYQGDSLSPLWFCLALNPLSYLLRENRVGYHLKHTNTDTIVSHLVYMDDIKLYANTDKSMKKLIDTTVGFSRDINMQFGIDKCKTLHIIKGKIQPGDYVISQTETIAAMESNEFYKYLGYQELKGIDHTTIKQNLITEYSRRTTAICKTQLSSKNLFKAINTFAIPILTYSFGIIKWSKTNIMNIERKTRTLLTKHNYLHPKSAIERLSLQRTKGGRGLINITALWQKQIHTLKTFFLDKSNTSEIHKAIKFNDNNYTPLNLSDNIILTTQLNNEHERNKMLEWKAKVLHGRHPHDLEQIHIDTEASNKWLQIGSLFPETEGFTIAIQDQVINTKNYRKYIIKDGTITDDRCRKCRSHPENIQHITGGCPNLAQTDYTHRHNQIVNILHQKLAFKHKLIENTQTPYYKYSPKSILENNTHKLYYDRTILTDKTIHFNRPDITLTDKTTKTTYLIDVAVPNTHNILKTIAEKIHKYTDLKDEITRVWKQNKVYIVPVVLSTTGIIPRHLHHSIKLINLKPNTYILLQKAAILNTCRIVRRFLQIDENSTHQDPTTLFSD

SEQ ID NO: 21968 - protein, 1297 aa, Hemaris fuciformis
METRSKSKRIGPLPGGDRRGTLGADAGCDSGRTVSGAELNRRAPTGLPEDTTANPQNRPTDNRSTSPISSITEPYSPSTISYAPSATDEESRHSNSPPIPALSVAQEVNTFLPASTKAGKTRVRMKWTSDVNTFIMRTYYRITKLETDMTTYRQTLHELFLKQYPGINVSQQRVSDQRRVIIRNKLLPEITLNKIKDEVQDELSREDNNETYNFPSTVNTQTNFTQRVSPNISPEITLDAYENYNLHHISTQTETTQTLIENEVEILNLPPKTDITIEQKTEKLKSALIKYSGMDPLVRPKLPKLKYSKNLTYLVNLFNNTVLNQFVSEDSLITDIHTLIYCTAFVISEELGYNIENRPQHAPRKNISKPSWQIRLETDINRLRADIGRLTQYIRNNRSKKVVKRVTEIFAKTSIHSKHEQNNKNPEEYLDTLKQKLSLKAGRLARYNKSLKRKNDNKLFTNNEKIFYRKLNTNIDTTVNNKTDDTPNAEAIETFWTNVWETDINHNNEAGWISEEKLRWQSIEEMDFEEITEDEIKIVTSKLHNWKSPGLDKVHNFWFKKLDSLHKSLAKNMTKLILGKQNIPDFIAKGITYLLPKNKQPQSPSQYRPITCLPTIYKILTSTISHRINSHVESNNILAEEQKGCRRGNMGCKEQLIIDSTIHKHAMSQKRNLHCTFIDYQKAFDSIPHSWLLKILEIYKINPQVLNFLKNIMPHWKTRLHITDNNNQFTTRQITIKKGIYQGDSLSPLWFCLALNPLSYLLRENRVGYHLKHTNTDTIVSHLVYMDDIKLYANTDKSMKKLIDTTVGFSRDINMQFGIDKCKTLHIIKGKIQPGDYVISQTETIAAMESNEFYKYLGYQELKGIDHTTIKQNLITEYSRRTTAICKTQLSSKNLFKAINTFAIPILTYSFGIIKWSKTNIMNIERKTRTLLTKHNYLHPKSAIERLSLQRTKGGRGLINITALWQKQIHTLKTFFLDKSNTSEIHKAIKFNDNNYTPLNLSDNIILTTQLNNEHERNKMLEWKAKVLHGRHPHDLEQIHIDTEASNKWLQIGSLFPETEGFTIAIQDQVINTKNYRKYIIKDGTITDDRCRKCRSHPENIQHITGGWPNLAQTDYTHRHNQIVNILHQKLAFKHKLIENTQTPYYKYSPKSILENNTHKLYYDRTILTDKTIHFNRPDITLTDKTTKTTYLIDVAVPNTHNILKTIAEKIHKYTDLKDEITRVWKQNKVYIVPVVLSTTGIIPRHLHHSIKLINLKPNTYILLQKAAILNTCRIVRRFLQIDENSTHQDPTTLFSD

SEQ ID NO: 21969 - protein, 765 aa, Mimas tiliae
MRFEEITEEDITIVTKKLHNWKSPGADKIHNFWYKKLTTLHKSLAKNLTKIVLGEQHIPEFLARGITYLLPKNHQLLQLPSQYRPITCLPTLYKILTSTISFKINNHVENNNILAEEQKGCRRGHMGCKEQLVIDSTIHKHATSHKRNLHCTYIDYQKAFDSIPHSWLIRILQIYRIHPQIIKFLENLMPHWKTTVWLNNNNAPITTRQIAIKKGIYQGDSLSPLWFCLALNPLSNLLKGCRAGYHLKHNTTETIVSHLIYMDDIKLYANTDKKMKKLINTTAEFSKDINMKFGLDKCKTLHIIKGKIQPGDYEINDTETITAMEPNDLYKYLGYHELKGIHHTSTKHKLLNEYNRRVIAICKTHLTSKNLIKAINTYAIPILTYSFGIIKWSKTDIINVERKTRTMLTRHNHLHPKSAIQRLTIKRQNGGRGLTNLQALWQKQIHTLKSFFHSKSNISDIHTAIIHNDQNYTPLNLSDQTTSINFNNNDYERDAIDDWKAKVLHGRHPHDLEQAHIDTDASNKWLQVGTLFPETEGFIMAIQDQVINTRNYRKHIIKDITITDDKCRKCRLHPENIQHITGACPNLAQTDYTHRHNQIVNIIHKKLALKHRLIPENRILENSTHKLYYDRTILSDKTIHYNRPDITLVDKMKKTTYIIDVAIPNTHNILKTIAEKINKYTDLREEIGRIWKQDKVYIIPMILSTTGVIPKHLHQSLKLIDLKPTTFIQLQKAAILNTCRIVRKFMQADETTPYVDPTPPIHTNI

SEQ ID NO: 21970 - protein, 1312 aa, Mimas tiliae
METRYKKKLRGPLPGGDRWGTPGADAGCFSIRSVSGEELSRRTPTGSPEIATADNDRLDRLTDSRTNSPIEPYSPITVSYAPSTNSSSSIPSSPPTNNLRDPPTPALDVAREVNAFLPASTKAGKARVRMKWTTEVNMFIMRTYYRITKLETDMTTYRQTLHELFSKQYPEVNVTQQRISDQRRVIVKNKLLSEVTLNKIKERVRSELSQEVNHDSYSKDTRSNIPIIPSPQQSLPQITQSQTILHLSSDTHSTENCSQSHMSTQTETTTTFIENDIETLNTTPFSNTLVQQMRDKLQAAIIKYSGMDPIVRPSLPKLKYSKYLSQLIDLFNEAILHQYISEDSMMTDIHTLTYCTAFVISENLGHNIENKPQNSRRRNNSKPSWQIRLERDIQQLRVNIGRLTQYINNNRSRKILKTVDEIFTKTTVHSKYEENNKKPEEFLDTLKQKLKLKASRLARYKKSLQRKIDNNLFTNKEKVFYRNLNINNNINNQNNTVIPKVEDIENYWSNIWETDTLHNNEAKWIAEEEERWQSIEEMRFEEITEEDITIVTKKLHNWKSPGADKIHNFWYKKLTTLHKSLAKNLTKIVLGEQHIPEFLARGITYLLPKNHQLLQLPSQYRPITCLPTLYKILTSTISFKINNHVENNNILAEEQKGCRRGHMGCKEQLVIDSTIHKHATSHKRNLHCTYIDYQKAFDSIPHSWLIRILQIYRIHPQIIKFLENLMPHWKTTVWLNNNNAPITTRQIAIKKGIYQGDSLSPLWFCLALNPLSNLLKGCRAGYHLKHNTTETIISHLIYMDDIKLYANTDKKMKKLINTTAEFSKDINMKFGLDKCKTLHIIKGKIQPGDYEINDTETITAMEPNDLYKYLGYHELKGIHHTSTKHKLLNEYNRRVIAICKTHLTSKNLIKAINTYAIPILTYSFGIIKWSKTDIINVERKTRTMLTRHNHLHPKSAIQRLTIKRQNGGRGLINLQALWQKQIHTLKSFFHSKSNRSDIHTAIIHNDQNYTPLNLSDQTTSINFNNNDYERDAIDDWKAKVLHGRHPHDLEQAHIDTDASNKWLQIGTLFPETEGFIMAIQDQVINTRNYRKHIIKDITITDDKCRKCRLHPENIQHITGACPNLAQTDYTHRHNQIVNIIHKKLALKHRLIPENRIPYYKYSPQPILENSTHKLYYDRTILSDKTIHYNRPDITLVDKMKKTTYIIDVAIPNTHNILKTIAEKINKYTDLREEIGRIWKQDKVYIIPMILSTTGVIPKHLHQSLKLIDLKPTTFIQLQKAAILNTCRIVRKFMQADETTPYVDPTPPIHTNI

SEQ ID NO: 21971 - protein, 1306 aa, Laothoe populi
METRSKKKLRGPLPGGDRRGTPGADAGCFSIRSVSGEELNRRAPTGLPEDITANTQFRQTDSRTQSPTSSIVHRPYSPSTESYAPSTTDEDSRDFTPPIPTLDVTREVNTFLPASTKAGKTRLRMKWTAEVNMFIMRTYYRITKLETDMTTYRQTLHELFSNQYPEINVTQQRISDQRRVIVKNKLLSEAVLNRIKEEVQTELSQAVTHDMSINTRQNTLVRPTPAQSLIQITPPSTALHLSSDTHLIDNNNISHISTQTESIRTFIENDIEILNITPVSNTLTDKLSDKLQTTLVKYSGMDPIARPNLPKLKYSKHLNNLLYLFNNTILHQFFSEDSMMNDIQTLIYCTALVISEELGYKVENSPQNLYVRNVCKPPWQIRLEKDIEQLRINIGRLTQYINKNRSKKVVKTVNEIFAKTNVHSKYDKENKSPDEFLDTLKQKLKLKASRLARYKKAFQRKKDNQLFANKEKIFYRNLNSNKSINTQCNIEVPKAEDIETYWANIWETNLSHNDEAKWIVAEEEKWQSIEEMKFEDITIEDVSTVTNKLHNWKSPGADKIHNFWYKKLLILHNIIAKNFTKIILGKQQIPEFIAKGITYLLPKNHQTQLPSQYRPITCLPTLYKILTSTITFKINKHVENNNILAEEQKGCRRGHMGCKEQLVIDSTVHKHATSHKRNLHCTYIDYQKAFDSIPHSWLLRILQIYKINPQIVTFLKNIMSHWKTMIRLNNNGTLITTRLIAIKKGIYQGDSLSPLWFCLALNPLSRLLRGCQAGYHLKYTNTETIISHLIYMDDLKLYANTDKQMKKLINTAAEFSKDINMKFGLDKCKTLHIVKGKIQPGDYEINETETISAMEPNDLYKYLGYNELKGIHHTATKQILLREYNRRIIAICKTQLTSKHLIKAINTFAIPFLTYSFGIIKWSKTDIINIERKTRTTLTRHNYLHPKSAIERLSIKRLKGGRGLINLQALWQKQIHKLKSFFHNKANTSDIHKAITHNDLNYTPLNLSDLINTIAHLNNNDYERDRILVWKAKVLHGRHPHDLEQTHIDLEASNKWLQIGTLFPETEGFIMAIQDQVINTRNYRKHIIKDRTLTDDKCRKCRSHPENIQHITGACPNLAQTDYTHRHNQIVSIIHQKLALNHKLIQDSKIPYYKYTPQPILENSTHKLYYDRTILSDKTIHYNRPDITLIDKLKKTTYIIDIAIPNTHNILKTIAEKIHKYTDLKEEIGRIWKQDKVYIVPVVLSTTGIIPKHLHHSLKLIDLNPKLYVQLQKAAILNTCRIVRKFMQIDETTPHPDSTPLTLAST

SEQ ID NO: 21972 - protein, 952 aa, Celastrina argiolus
MSAAASTSCSSNFIQCQFCNRSFKGARGLNIHLGKTHNHNSTVIQQHPTHPINTSTTSPLPTIPFWQKICNYKSSVPILKRIPKGARIQVAKNLSSLIRQVISNPDCCQNWENLLTFPFHILHAAQDRQKSLTSTIKHNCTHAINPSPTNVFNGNRTPQSLRKTHNIKHKIESKVSDGDLKGAANLLFSTDTIAEYSPHTLEALHEKHPSLPPPSIPPSFSPAVQSVEACVKDIKTAIMSFRNGSAGGHDGLSPQHLKDLIGVSGDSGGALLVDLTALINLMLSGKVPKEITGIIYGANLCALKKKDGGIRPIAVGCTYRRIASKICCTRISRKLADTFQPVQLGSKGGCEAAVHALRTYLKTKSGQVVLKVDVKNAFNSVSRSALLKEVQNHVPEIYDYILQCYGADSTLIYQNDRLFSSTGCQQGDPLGPALFSLAIHPIITSLTSEFNVWYLDDGTIGGETASVLQDLQVITEKFKSIDLDLNFSKCELFINDSLDIWHEVTPKFNNLAPNIKILSKESLRLLGAPILSEGYNSFISEQNHKFSESSGKLTTINSHMAYQIIRFCLFVPKLMYVLRCCPLWSFPNFLSQLDLTLKNTLVNVLNCNISDTSWIQAVLPIRFGGLGIRKVSSVSLPASLSSAHSIHKLFTKIISNSLGCVGIDSLPEAIITWRGLCSDEIPVQPHIQKNWDEPLLNLAHSDLLNCCTPADRARLLASAEPESGYWLQALPSSNIGTLLDNHTFSLSVSLRLGTAINEPHLCHCGATVDRQGHHGLSCRRSAGRQSRHASINDIIRRALATVNVPATLEPNGIVRDDGRRPDGMSLVPWSHGKPLVWDATCVDTLAASHVTATAKTAGAAAAHAETHKRRKYESIGDGYIFLPFGVETLGPWGPSAKRLLKDLSKRLTEKTNDPRAGAYLGQRISLAIQRGNTASLLGTLPAAADLDIVFYI

SEQ ID NO: 21973 - protein, 989 aa, Peribatodes rhomboidaria
MFLLLVFLISVSCIVLLSALYKNQFMSQSAGPSAQPDFLQCSQCSQPRFFKGTKGLNIHIGKSHKNHHISNASSQASPLLAHSHIFNQPSSSSIPFWETLSNLKSSLPVVKRIPKGARITVAQNLSAKIKKVLADPISTQPWEVLLTFPFQILHVENNKNHSLTSLIKNNCNHSNTTSNGLQPNQQCSPPHFHKSHNLLNKIESKLSDGDLKGAAKLLFSNDTIAPDTPETFSALQDKHPPSQSPVVQLPLSPSVQPIVATDKDIYTAVMSFRSGSASGHDGLSPQHLKDLLTISGDVGKALLVDLTALTNLMIAGKVHDDITHLLYGANLCALKKKDGGIRPIAIGCTYRRIASKICCKYILPKLTEQFQPTQLGFGSKGGCEAAVHALRTYLHKDSGQVVMKVDVKNAFNSLSRSALLDEIFNNTPQIYNYLFQCYGFDSTLLYKSQCILSATGCQQGDPLGPAIFSLAIHPIISSLSSKLNMWYLDDGTLGGDSETVLADLKILTEKFDSIGLELNFSKCELFISDTVPSPARNEIIEKFNVVAPNIKILDKHSLRLLGAPIFTDSFPSFISEQKTKFEESFDRLSIIHSHMAFFIIRYCLFVPKLTYVLRCSPLWTFSDLLSTLDNSLKNILIKILNCPMSESSWTQASLPIRFGGLGIRKISSVSLPAFLSSVYSTRKLLTKILVKSLGHSDTNLMTEATNAWTTACPGESLPEKPHLQRLWDEPLNKKIQNDLISLTISPFDRARLLASAKRESGFWLQTLPSRNIGTLLDNSTFALSVSLRIGANTNEPHHCHCGASVDRQGHHGLSCRQSAGRQSRHASLNDVIRRALTTVNVPAILEPNGIARDDGKRPDGMTLIPWSHGRPLVWDATCVDTLAASHVSSTSRTAGAAATSAETLKRRKYESLGDGYIFLPFGVETLGPWGPSAWLLFNELSKRLIERTNDQRAGAYLGQRISIAIQRGNVASLLGTLPADTDLSSVYYL

SEQ ID NO: 21974 - protein, 989 aa, Peribatodes rhomboidaria
MFLLLVFLISVSCIVLLSALFKNQFMSQSAGPSAQPDFLQCSQCSQPRFFKGTKGLNIHIGKSHKNHHISNASSQASPLLAHSHIFNQPSSSSIPFWETLSNLKSSLPVVKRIPKGARITVAQNLSAKIKKVLADPISTQPWEVLLTFPFQILHVENNKNHSLTSLIKNNCNHSNTTSNGLQPNQQCSPPLFHKSHNLLNKIESKVSDGDLKGAAKLLFSNDTIAPDTPETFSALQDKHPPSQSPVVQLPLSSSVQPIVATDKDIYTAVMSFRSGSASGHDGLSPQHLKDLLTISGDVGRALLVDLTALTNLMIAGKVHDDITHLLYGANLCALKKKDGGIRPIAIGCTYRRIASKICCKYILPKLTEQFQPTQLGFGSKGGCEAAVHALRTYLHKDSGQVVMKVDVKNAFNSLSRSALLDEIFNNTPQIYNYLFQCYGFDSTLLYKSQRILSATGCQQGDPLGPAIFSLAIHPIISSLSSKLNMWYLDDGTLGGDSETVLADLKILTEKFDSIGLELNFSKCELFISDTVPSPTRNEIIEKFNAVAPNIKILDKHSLRLLGAPIFTDSFPSFISEQKTKFEESFDRLSIIHSHMAFFIIRYCLFVPKLTYVLRCSPLWTFSDLLSTLDNSLKNILIKILNCPMSESSWTQASLPIRFGGLGIRKISSVSLPAFLSSVYSTRKLLTKILVKSLGHSDTNLMTEATNAWTTACPGESLPEKPHLQRLWDEPLNKKIQNDLISLTTSPFDRARLLASAKRESGFWLQTLPSRNIGTLLDNSTFALSVSLRIGANTNEPHHCHCGASVDRQGHHGLSCRQSAGRQSRHASLNDVIRRALTTVNVPAILEPNGIARDDGKRPDGMTLIPWSHGRPLVWDATCVDTLAASHVSSTSRTAGAAATSAETLKRRKYESLGDGYIFLPFGVETLGPWGPSAWLLFNELSKRLIERTNDQRAGAYLGQRISIAIQRGNVASLLGTLPADTDLSSVYYL

SEQ ID NO: 21975 - protein, 989 aa, Peribatodes rhomboidaria
MFLLLVFLISVSCIVLLSALYKNQFMSQSAGPSAQPDFIQCSQCSQPRFFKGIKGLNIHIGKSHKNHHISNASSQASPLLAHSRIFNQPSSSSIPFWETLSNLKSSLPVVKRIPKGARITVAQNLSAKIKKVLADPISTQPWEALLTFPFQILHVENNKNHSLTSLIKNNCNHSNTTSNGLQPNQQCSPPHFHKSHNLLNKIESKVSDGDLKGAAKLLFSNDTIAPDTPETFSALQDKHPPSQSPVVQLPLSPSVQPIVATDKDIYTAVMSFRSGSASGHDGLSPQHLKDLLTISGDVGRALLVDLTALTNLMIAGKVHDDITHLQYGANLCALKKKDGGIRPIAIGCTYRRIASKICCKYILPKLTDQFQPTQLGFGSKGGCEAAVHALRTYLHKDSGQVVMKVDVKNAFNSLSRSALLDEIFNNTPEIYNYLFQCYGFDSTLLYKSQRILSATGCQQGDPLGPAIFSLAIHPIISSLSSKLNMWYLDDGTLGGDSETVLADLKILTEKFDSIGLELNFSKCELFISDTVPSPARNEIIEKFNVVAPNIKILDKHSLRLLGAPIFTDLFPSFISEQKTKFEKSFDRLSIIHSHMAFFIIRYCLFVPKLTYVLRCSPLWTFSDLLSTLDNSLKNILIKILNCPMTESSWTQASLPIRFGGLGIRKISSVSLPAFLSSVYSTRKLLTKILVKSLGHSDTNLMTEATNAWTTACPGESLPEKPHLQKLWDEPLNKKIQNDLISLTTSPFDRARLLASAKRESGFWLQTLPSRNIGTLLDNSTFALSVSLRIGANTNEPHHCHCGASVDRQGYHGLSCRQSAGRQSRHASLNDVIRRALTTVNVPAILEPNGIARDDGKRPDGMTLIPWSHGRPLVWDATCVDTLAASHVSSTSRTAGAAATSAETHKRRKYESLGDGYIFLPFGVETLGPWGPSAWLLFNELSKRLIERTNDQRAGAYLGQRISIAIQRGNVASLLGTLPADTDLSSVYYL

SEQ ID NO: 21976 - protein, 989 aa, Peribatodes rhomboidaria
MFLLLVFLISVSCIVLLSALYKNQFMSQSAGPSAQPDFLQCSQCSQPRFFKGTKGLNIHIGKSHKNHHISNASSQASPLLAHSHIFNQPSSSSIPFWETLSNLKSSLPVVKRIPKGARITVAQNLSAKIKKVLADPISTQPWEVLLTFPFQILHVENNKNHSLTSLIKNNCNHSNTTSNGLQPNQQCSPPHFHKSHKLLNKIESKVSDGDLKGAAKLLFSNDTIAPDTPETFSALQDKHPPSQSPVVQLPLSPSVQPIVATDKDIYTAVMSFRSGSASGHDGLSPQHLKDLLTISGDVGRALLVDLTALTNLMIAGKVHDDITHLLYGANLCALKKKDGGIRPIAIGCTYRRIASKICCKYILPKLTEQFQPTQLGFGSKGGCEAAVHALRTYLHKDSGQVVMKVDVKNAFNSLSRSALLDEIFNNTPQIYNYLFQCYGFDSTLLYKSQRILSATGCQQGDPLGPAIFSLAIHPIISSLSSKLNMWYLDDGTLGGDSETVLADLKILTEKFDSIGLELNFSKCELFISDTVPSPARNEIIEKFNVVAPNIKILDKHSLRLLGAPIFTDSFPSFISEQKTKFEESFDRLSIIHSHMAFFIIRYCLFVPKLTYVLRCSPLWTFSDLLSTLDNSLKNILIKILNCPMSESSWTQASLPIRFGGLGIRKISSVSLPAFLSSVYSTRKLLTKILVKSLGHSDTNLMTEATNAWTTACPGESLPEKPHLQRLWDEPLNKKIQSDLISLTTSPFDRARLLASAKRESGFWLQTLPSRNIGTLLDNSTFALSVSLRIGANTNEPHHCHCGASVDRQGHHGLSCRQSAGRQSRHASLNDVIRRALTTVNVPAILEPNGIARDDGKRPDGMTLIPWSHGRPLVWDATCVDTLAASHVSSTSRTAGAAATSAETLKRRKYESLGDGYIFLPFGVETLGPWGPSAWLLFNELSKRLIERTNDQRAGAYLGQRISIAIQRGNVASLLGTLPADTDLSSVYYL

SEQ ID NO: 21977 - protein, 973 aa, Peribatodes rhomboidaria
MFIYRYILYRLWIIHFVYYIYFLQCSQCSQPRFFKGTKGLNIHIGKSHKNHHISNASSQASPLLAHSHIFNQPSSSSIPFWETLSNLKSSLPVVKRIPKGARITVAQNLSAKIKKVLADPISTQPWEVLLTFPFQILHVENNKNHSLTSLIKNNCNHSNTTSNGLQPNQQCSPPHFHKSHNLLNKIESKVSDGDLKGAAKLLFSNDTIAPDTPETFSALQDKHPPSQSPVVQLPLSPSVQPIVATDKDIYTAVMSFRSGSASGHDGLSPQHLKDLLTISGDVGRALLVDLTALTNLMIAGKVHDDITHLLYGANLCALKKKDGGIRPIAIGCTYRRIASKICCKYILPKLTEQFQPTQLGFGSKGGCEAAVHALRTYLHKDSGQVVMKVDVKNAFNSLSRSALLDEIFNNTPQIYNYLFQCYGFDSTLLYKSQRILSATGCQQGDPLGPAIFSLAIHPIISSLSSKLNMWYLDDGTLGGDSETVLADLKILTEKFDSIGLELNFSKCELFISDTVPSPARNEIIEKFNVVAPNIKILDKHSLRLLGAPIFTDSFPSFISEQKTKFEESFDRLSIIHSHMAFFIIRYCLFVPKLTYVLRCSPLWTFSDLLSTLDNSLKNILIKILNCPMSESSWTQASLPIRFGGLGIRKISSVSLPAFLSSVYSTRKLLTKILVKSLGHSDTNLMTEATNAWTTACPGESLPEKPHLQRLWDEPLNKKIQNDLISLTTSPFDRARLLASAKRESGFWLQTLPSRNIGTLLDNSTFALSVSLRIGANTNEPHHCHCGASVDRQGHHGLSCRQSAGRQSRHASLNDVIRRALTTVNVPAILEPNGIARDDGKRPDGMTLIPWSHGRPLVWDATCVDTLAASHVSSTSRTAGAAATSAETLKRRKYESLGDGYIFLPFGVETLGPWGPSAWLLFNELSKRLLERTNDQRAGAYLGQRISIAIQRGNVASLLGTLPADTDLSSVYYL

SEQ ID NO: 21978 - protein, 978 aa, Peribatodes rhomboidaria
MFLLLVFLISVSCIVLLSALYKNQFMSQSAGPSAQPDFLQCSQCSQPRFFKGTKGLNIHIGKSHKNHHISNASSQASPLLAHSHIFNQPSSSSIPFWETLSNLKSSLPVVKRIPKGARITVAQNLSAKIKKVLADPISTQPWEVLLTFPFQILHVENNKNHSLTSLIKNNCNTTSNGLQPNQQCSPPHFHKSHNLLNKIESKVSDGDLKGAAKLLFSNDTIAPDTPETFSALQDKHPPSQSPVVQLPVSPSVQPIVATDKDIYTAVMSFRSGSASGHDGLSPQHLKDLLTISGDVGRALLVDLTALTNLIISGKVHDDITHLLYGAKLCALKKKDGGIRPIAIGCTYRRIASKICCKYILPKLTEQFQPTQLGFGSKGGCEAAVHALRTYLHKDSGQVVKKVDVKNAFNSLSRSALLDEIFNNTPQIYNYLFQCYGFDSTLLYKSQRILSATGCQQGDPLGPAILSLAIHPIISSLSSKLNMWYLDDGTLGGDSETVLADLKILTEKFDSIGLELNFSKCELFISDTVPSPARNEIIEKFNVVAPNIKILDKHSLRLLGAPIFTDSFPSFISEQKTKFEESFDRLSIIHSHMAFFIIRYCLFVPKLTYVLRCSPLWTFSDLLSTLDNSLKNILIKILNCPMSESSWTQASLPIRFGGLGIRKISSVSLPAFLSSVYSTRKLLTKILVKSLGHSDTNLMTEATNAWTTACPGESLPEKPHLQRLWDEPLNKKIQNDLISLTTSPFDRARLLASAKRESGFWLQTLPSRNIGTLLDNSTFALSVSLRIGANTNEPHHCHCGASVDRQGHHGLSCRQSAGRQSRHASLNYVIRRALTTVNVPAILEPNGIARDDGKRPDGMTLIPWSHGRPLVWDATCVDTLAASHVSSTSRTAGAAATSAETLKRRKYESLGDGYIFLPFGVETLGPWGPSAWLLFNELSKRLIEQTTKGLVLTSVSELALLFSEVTLPAFWVLYPRILT

SEQ ID NO: 21979 - protein, 989 aa, Peribatodes rhomboidaria
MFLLLVFLISVSCIVLLSALYKNQFMSQSAGPSAQPDFLQCSQCSQPRFFKGTKGLNIHIGKSHKNHHISNASSQASPLLAHSHIFNQPSSSSIPFWETLSNLKSSLPVVKRIPKGARITVAQNLSAKIKKVLADPISTQPWEVLLTFPFQILHVENNKNHSLTSLIKNNCNHSNTTSNGLQPNQQCSPPHFHKSHNLLNKIESKVSDGDLKGAAKLLFSNDTIAPDTPETFSALQDKHPPSQSPVVQLPLSPSVQPIVATDKDIYTAVMSFRSGSASGHDGLSPQHLKDLLTISGDVGRALLVDLTALTNLMIAGKVHDDITHLLYGANLCALKKKDGGIRPIAIGCTYRRIASKICCKYILPKLTEQFQPTQLGFGSKGGCEAAVHALRTYLHKDSGQVVMKVDVKNAFNSLSRSALLDEIFNNTPQIYNYLFQCYGFDSTLLYKSQRILSATGCQQGDPLGPAIFSLAIHPIISSLSSKLNMWYLDDGTLGGDSETVLADLKILTEKFDSIGLELNFSKCELFISDTVPSPARNEIIEKFNVVAPNIKILDKHSLRLLGAPIFTDSFPSFISEQKTKFEESFDRLSIIHSHMAFFIIRYCLFVPKLTYVLRCSPLWTFSDLLSTLDNSLKNILIKILNCPMSESSWTQASLPIRFGGLGIRKISSVSLPAFLSSVYSTRKLLTKILVKSLGHSDTNLMTEATNAWTTACPGESLPEKPHLQRLWDEPINKKIQNDLISLTTSPFDRARLLASAKRESGFWLQTLPSRNIGTLLDNSTFALSVSLRIGANTNEPHHCHCGASVDRQGHHGLSCRQSAGRQSRHASLNDVIRRALTTVNVPAILEPNGIARDDGKRPDGMTLIPWSHGRPLVWDATCVDTLAASHVSSTSRTAGAAATSAETLKRRKYESLGDGYIFLPFGVETLGPWGPSAWLLFNELSKRLIERTNDQRAGAYLGQRISIAIQRGNVASLLGTLPADTDLSSVYYL

SEQ ID NO: 21980 - protein, 925 aa, Peribatodes rhomboidaria
MFLLLVFLISVSCIVLLSALYKNQFMSQSAGPSAQPDFLQCSQCSQPRFFKGTKGLNIHIGKSHKNHHISNASSQASPLLAHSHIFNQPSSSSIPFWETLSNLKSSLPVVKRIPKGARITVAQNLSAKIKKVLADPISTQPWEVLLTFPFQILHVENNKNHSLTSLIKNNCNHSNTTSNGLQPNQQCSPPHFHKSHNLLNKIESKVSDGDLKGAAKLLFSNDTIAPDTPETFSALQDKHPPSQSPVVQLPVSPSVQPIVATDKDIYTAVMSFRSGSASGHDGLSPQHLKDLLTISGDVGRALLVDLTALTNLMIAGKVHDDITHLLYGANLCALKKKDGGIRPIAIGCTYRRIASKICCKYILPKLTEQFQPTQLGFGSKGGCEAAVHALRTYLHKDSGQVVMKVDVKNAFNSLSRSALLDEIFNNTPQIYNYLFQCYGFDSTLLYKSQRILSATGCQQGDPLGPAIFSLAIHPIISSLSSKLNMWYLDDGTLGGDSETVLADLKILTEKFDSIGLELNFSKCELFISDTVPSPARNEIIEKFNVVAPNIKILDKHSLRLLGAPIFTDSFPSFISEQKTKFEESFDRLSIIHSHMAFFIIRYCLFVPKLTYVLRCSPLWTFSDLLSTLDNSLKNILIKILNCPMSESSWTQASLPIRFGGLGIRKISSVSLPAFLSSVYSTRKLLTKILVKSLGHSDTNLMTEATNAWTTACPGESLPEKPHLQRLWDEPLNKKIQNDLISLTTSPFDRARLLASAKRESGFWLQTLPSRNIGTLLDNSTFALSVSLRIGANTNEPHHCHCGASVDRQGHHGLSCRQSAGRQSRHASLNDVIRRALTTVNVPAILEPNGIARDDGKRPDGMTLIPWSHGRPLVWDATCVDTLAASHVSSTSRTAGAAAGVRVESQSKQHYVTLLRNYFVTIVEKS

SEQ ID NO: 21981 - protein, 720 aa, Peribatodes rhomboidaria
MSFRSGSASGHDGLSPQHLKDLLTISGDVGRALLVDLTALTNLMIAGKVHDDITHLLYGANLCALKKKDGGIRPIAIGCTYRRIASKICCKYILPKLTEQFQPTQLGFGSKGGCEAAVHALRTYLHKDSGQVVMKVDVKNAFNSLSRSALLDEIFNNTPQIYNYLFQCYGFDSTLLYKSQRILSATGCQQGDPLGPAIFSLAIHPIISSLSSKLNMWYLDDGTLGGDSETVLADLKILTEKFDSIGLELNFSKCELFISDTVPSPARNEIIEKFNVVAPNIKILDKHSLRLLGAPIFTDSFPSFISEQKTKFEESFDRLSIIHSHMAFFIIRYCLFVPKLTYVLRCSPLWTFSDLLSTLDNSLKNILIKILNCPMSESSWTQASLPIRFGGLGIRKISSVSLPAFLSSVYSTRKLLTKILVKSLGHSDTNLMTEATNAWTTACPGESLPEKPHLQRLWDEPLNKKIQNDLISLTTSPFDRARLLASAKRESGFWLQTLPSRNIGTLLDNSTFALSVSLRIGANTNEPHHCHCGASVDRQGHHGLSCRQSAGRQSRHASLNDVIRRALTTVNVPAILEPNGIARDDGKRPDGMTLIPWSHGRPLVWDATCVDTLAASHVSSTSRTAGAAATSAETLKRRKYESLGDGYIFLPFGVETLGPWGPSAWLLFNELSKRLIERTNDQRAGAYLGQRISIAIQRGNVASLLGTLPADTDLSSVYYL

SEQ ID NO: 21982 - protein, 989 aa, Peribatodes rhomboidaria
MFLLLVFLISVSCIVLLSALYKNQFMSQSAGPSAQPDFLQCSQCSQPRFFKGTNGLNIHIGKSHKNHHISNASSQASPLLAHSHIFNQPSSSSIPFWETLSNLKSSLPVVKRIPKGARITVAQNLSAKIKKVLADPISTLPWEVLLTFPFQILHVENNKNHSLTSLIKNNCNHSNTTSNGLQPNQQCSPPHFHKSHNLLNKIESKVSDGDLKGAAKLLFSNDTIAPDTPETFSALQDKHPPSQSPVVQLPLSPSVQPIVATDKDIYTAVMSFRSGSASGHDGLSPQHLKDLLTISGDVGRALLVDLTALTNLMIAGKVHDDITHLLYGANLCALKKKDGGIRPIAIGCTYRRIASKICCKYILPKLTEQFQPTQLGFGSKGGCEAAVHALRTYLHKDSGQVVMKVDVKNAFNSLSRSALLDEIFNNTPQIYNYLFQCYGFDSTLLYKSQRILSATGCQQGDPLGPAIFSLAIHPIISSLSSKLNMWYLDDGTLGGDSETVLADLKILTEKFDSIGLELNFSKCELFISDTVPSPARNEIIEKFNVVAPNIKILDKHSLRLLGAPIFTDSFPSFISEQKTKFEESFDRLSIIHSHMAFFIIRYCLFVPKLTYVLRCSPLWTFSDLLSTLDNSLKNILIKILNCPMSESSWTQASLPIRFGGLGIRKISSVSLPAFLSSVYSTRKLLTKILVKSLGHSDTNLMTEATNAWTTACPGESLPEKPHLQRLWDEPLNKKIQNDLISLTTSPFDRARLLASAKRESGFWLQTLPSRNIGTLLDNSTFALSVSLRIGANTNEPHHCHCGASVDRQGHHGLSCRQSAGRQSRHASLNDVIRRALTTVNVPAILEPNGIARDDGKRPDGMTLIPWSHGRPLVWDATCVDTLAASHVSSTSRTAGAAATSAETLKRRKYESLGDGYIFLPFGVETLGPWGPSAWLLFNELSKRLIERTNDQRAGAYLGQRISIAIQRGNVASLLGTLPADTDLSSVYYL

SEQ ID NO: 21983 - protein, 720 aa, Peribatodes rhomboidaria
MSFRSGSASGHDGLSPQHLKDLLTISGDVGRALLMDLTALTNLMIAGKVHDDITHLLYGANLCALKKKDGGIRPIAIGCTYRRIASKICCKYILPKLTDQFQPTQLGFGSKGGCEAAVHALRTYLHKDSGQVVMKVDVKNAFNSLSRSALLHEIFNNTPQIYNYLFQCYGFDSTLLYKSQRILSATGCQQGDPLGPAIFSLAIHPIISSLSSKLNMWYLDDGTLGGDSETVLADLKILTEKFDSIGLELNFSKCELFISDTVPSPARNEIIEKFNVVAPNIKILDKHSLRLLGAPIFTDSFPSFISEQKTKFEESFDRLSIIHSHMAFFIIRYCLFVPKLTYVLRCSPLWTFSDLLSTLDNSLKNILIKILNCPMSGSSWTQASLPIRFGGLGIRKISSVSLPAFLSSVYSTRKLLTKILVKSLGHSDTNLMTEATNAWTTACPGESLPEKPHLQKLWDEPLNKKIQNDLISLSTSPFDRARLLASAKRESGFWLQTLPSRNIGTLLDNSTFALSVSLRIGANTNEPHHCHCGASVDRQGHHGLSCRQSAGRQSRHASLNDVIRRALTTVNVPAILEPNGIARDDGKRPDGMTLIPWSHGKPLVWDATCVDTLAASHVSSTSRTAGAAATSAETHKRRKYESLGDGYIFLPFGVETLGPWGPSAWLLFNELSKRLIERTNDQRAGAYLGQRISIAIQRGNVASLLGTLPADTDLSSVYYL

SEQ ID NO: 21984 - protein, 988 aa, Peribatodes rhomboidaria
MFLLLVFLISVSCIVLLSALYKNQFMSQSAGPSAQPDFIQCSQCSQPRFFKGIKGLNIHIGKSHKNHPSNASSQASPLLAHSHIFNQPSSSSIPFWETLSNLKSSLPVVKRIPKGARITVAQNLSAKIKKVLADPISTQPWEVLLTFPFQILHVENNKNHSLTSLIKNNCNHSNTTSNGLQPNQQCSPPHFHKSHNLLNKIESKVSDGDLKGAAKLLFSNDTIAPDTPETFSALQDKHPPSQSPVVQLPLSPSVQPIVATDKDIYTAVMSFRSGSASGHDGLSPQHLKDLLTISGDVGRALLVDLTALTNLMIAGKVHDDITHLLYGANLCALKKKDGGIRPIAIGCTYRRIASKICCKYILPKLTEQFQPTQLGFGSKGGCEAAVHALRTYLHKDSGQVVMKVDVKNAFNSLSRSALLDEIFNNTPQIYNYLCQCYGFDSTLLYKSQRILSATGCQQGDPLGPAIFSLAIHPIISSLSSKLNMWYLDDGTLGGDSETVLADLKILTEKFDSIGLELNFSKCELFISDTVPSPARNEIIEKFNVVAPNIKILDKHSLRLLGAPIFTDSFPSFISEQKTKFEESFDRLSIIHSHMAFFIIRYCLFVPKLTYVLRCSPLWTFSDLLSTLDNSLKNILIKILNCPMSESSWTQASLPIRFGGLGIRKISSVSLPAFLSSVYSTRKLLTKILVKSLGHSDTNLMTEATNAWTTACPGESLPEKPHLQRLWDEPLNKKIQSDLISLTTSPFDRARLLASAKRESGFWLQTLPSRNIGTLLDNSTFALSVSLRIGANTNEPHHCHCGASVDRQGHHGLSCRQSAGRQSRHASLNDVIRRALTTVNVPAILEPNGIARDDGKRPDGMTLIPWSHGKPLVWDATCVDTLAASHVSSTSRTAGAAATSAETLKRRKYESLGDGYIFLPFGVETLGPWGPSAWLLFNELSKRLIERTNDQRAGAYLGQRISIAIQRGNVASLLGTLPADTDLSSVYYL

SEQ ID NO: 21985 - protein, 956 aa, Celastrina argiolus
MSAAASTSCSSIFIQCQFCNRSFKGARGLNIHLGKTHNHNSTVIQQHPIHPINTSTTSHPLPTIPFWQKICNYKSSIPILKRIPKGARIQVAKNLSSLIRQVISNPDCCQNWENLLTFPFHILHAAQDRQKSLTSTIKHNCTHAINPSPTNVFNGNRTPQPLRKTHNIKHKIESKVSDGDLKGAANLLFSTDTIAEYSPHTLEALHEKHPSLPPPSIPPSFSPAVQSVEACVKDIKTAIMSFRNGSAGGHDGLSPQHLKDLIGVSGDSGGALLADLTALINLMLSGKVPKEITGIIYGANLCALKKKDGGIRPIAVGCTYRRIASKICCTRISRKLADTFQPVQLGFGSKGGCEAAVHALRTYLKTKSGQVVLKVDVKNAFNSVSRSALLKEVQNHVPEIYDYILQCYGADSTLIYQNDRLFSSTGCQQGDPLGPALFSLAIHPIITSLTSEFNVWYLDDGTIGGETASVLQDLQVITEKFKSIDLDLNFSKCELFINDSLDIWHEVTPKFNNLAPNIKILSKESLRLLGAPILSEGYNSFISEQNHKFSESSGKLTTINSHMAYQIIRFCLFVPKLMYVLRCCPLWSFPNFLSQLDLTLKNTLVNVLNCNISDTSWIQAVLPIRFGGLGIRKVSSVSLPAFLSSAHSIHKLFTKIISNSLGCVGIDSLPEAIITWRGLCSDEIPVQPHIQKNWDEPLLNLAHSDLLNCCTPADRARLLASAEPESGYWLQALPSSNIGTLLDNHTFSLSVSLRLGTAINEPHLCHWHHATVDRQGHHGLSCRRSAGRQSRHASINDIIRRALATVNVPATLEPNGIVRDDGRRPDGMSLVPWSHGKPLVWDATCVDTLAASHVTATAKTAGAAAAHAETHKRRKYESIGDGYIFLPFGVETLGPWGPSAKRLLKDLSKRLTEKTNDPRAGAYLGQRISLAIQRGNTASLLGTLPAAADLDIVFYI

SEQ ID NO: 21986 - protein, 954 aa, Celastrina argiolus
MSAAASTSCSSNFKQCQFCNRSFKGARGLNIHLGKTHNHNSTVIQQHPTHPINTSTTSPLPTIPFWQKICNYKSSIPILKRIPKGARIQVAKNLSSLIRQVISNPDCCQNFENLLTFPFHILHAAQDRQKSLTSTIKHNCTHAINPSPTNVFNGNRTPQPVRKTNNIKHKIESKVSDGDLKGAANLLFSTDTIAEYSPHTLEALHEKHPSLPPPSIPPSFSPAVQSVEACVKDIKTAIMYFRNGSAGGHDGLSPQHLKDLIGVSGDSGGALLVDLTALINLMLSGKVPKEITGIIYGANLCALKKKDGGISPIAVGCTYRRIASKICCTRISRKLADTFQPVQLGFGSKGGCEAAVHALRTYLKTKSGQVVLKVDVKNAFNSVSRSALLKEVQNHVPEIYDYILQCYGADSTLIYQNDRLFSSTGCQQGDPLGPALFSLAIHPIITSLTSEFNVWYLDDGTIGGETASVLQDLQVITEKFKSIDLDLNFSKCELFINDSLDIWHEVTPKFNNLAPNIKILSKESLRLLGAPILSEGYNSFISEQNHKFSESSGKLTTINSHMAYQIIRFCLFVPKLMYVLRCCPLWSFPNFLSQLDLTLKNTLVNVLNCNISDTSWIQAVLPIRFGGLGIRKVSSVSLPAFLSSAHSIHKLFTKIISNSLGCVGIDSLPEAIITWRGLCSDEIPVQPHIQKNWDEPLLNLAHSDLLNCCTPADRARLLASAEPESGYWLQALPSSNIGTLLDNHTFSLSVSLRLGTAINEPHLCHCGAKVDRQGHHGLSCRRSAGRQSRHASINDIIRRALATVNVPATLEPNGIVRDDGRRPDGMSLVPWSHGKPLVWDATCVDTLAASHVTATAKTAGAAAAHAETHKRRKYESIGDGYIFLPFGVETLGPWGPSAKRLLKDLSKRLTEKTNDPRAGAYLGQRISLAIQRGNTVSLLGTLPAAADLDIVFYI

SEQ ID NO: 21987 - protein, 956 aa, Celastrina argiolus
MSAAASTSCSSNFIQCQFCNRSFKGARGLNIHLGKTHNHNSTVIQQHPTHPINTSTTSHPLPTIPFWQKISNYKSSIPILKRIPKGARIQVAKNLSSLIRQVISNPDCCQHWENLLTFPFHILHAAQDRQKSLTSTIKHNCTHAINPSPTNVFNGNRTPQPLRKTHNIIKHKIESKVSDGDLKGAANLLFSTDTIAEYSPHTLEALHEKHPSLPPPSIPPSSSPAVQSVEACVKDIKTAIMSFRNGSAGGHDGLSPQHLKDLIGVSGDSGGALLVDLTALINLMLSGKVPKEITGIIYGANLCALKKKDGGIRPIAVGCTYRRIASKICCTRISRKLADTFQPVQLGFGSKGGCEAAVHALRTYLKAKSGQVVLKVDVKNAFNSVSRSALLKEVQNHVPEMYDYILQCYGADSTLLYQNDRLFSSTGCQQGDPLGPALFSLAIHPIITSLTSEFNVWYLDDGTIGGETASVLQDLQVIIEKFKSIDLDLNFSKCELFINDSLDIWHEVTPKFNNLAPNIKILSKESLRLLGAPILSEGYNSFISEQNHKFSESSGKLTTINSHMAYQIIRFCLFVPKLMYVLRCCPLWSFPNFLSQLDLTLKNTLVNVLNCNISDTSWIQAVLPIRFGGLGIRKVSSVSLPAFLSSAHSIHKLFTKIISNSLGCVGIDSLPEAIITWRGLCSDEIPVQPHIQKNWDEPLLNLAHSELLNCCTAADRARLLASAEPESGYWLQALPSSNIGTLLDNHTFSLSVSLRLGTAINEPHLCHCGATVDRQGHHGLSCRRSAGRQSRHASINDIIRRALATVNVPATLEPNGIVRDDGRRPDGMSLVPWSHGKPLVWDATCVDTLAASHVTATAKTAGAAAAHAETHKRRKYESIGDGYIFLPFGVETLGPWGPSAKRLLKDLSKRLTEKTNDPRAGAYLGQRISLAIQRGNTASLLGTLPAAADLDIVFYI

SEQ ID NO: 21988 - protein, 955 aa, Celastrina argiolus
MSAAASTSCSSIFIQCQFCNRSFKGARGLNIHLGKTHNHNSTVIQQHPTHPINTSTTSHPLPTIPFWQKICNYKSSIPILKRIPKGARIQVAKNLSSLIRQVISNPDCCQNWENLLTFPFHILHAAQDRQKSLTSTIKHNCTHAINPSPTNVFNGNRTPQPLRKTHNIKHKIESKVSDGDLKGAANLLFSTDTIAEYSPQTLEALHEKHPSLPPPSIPPSFSPAVQSVEACVKDIKTAIMSFRNGSAGGHDGLSPQHLKDLIGVSGDSGGALLVDLTALINLMLSGKVPKEITGIIYGANLCALKKKDGGIRPIAVGCTYRRIASKICCTRISRKLADTFQPVQLGFGSKGGCEAAVHALRTYLKTKSGQVVLKVDVKNAFNSVSRSALLKEVQNHVPEIYDYILQCYGADSTLIYQNDRLFSSTGCQQGDPLGPALFSLAIHPIITSLTSEFNVWYLDDGTIGGETASVLQDLQVITEKFKSIDLDLNFSKCELFINDSLDIWHEVTPKFNNLAPNIKILSKESLRLLGAPILSEGYNSFISEQNHKFSESSGKLTTINSHMAYQIIRFCLFVPKLMYVLRCCPLWSFPNFLSQLDLTLKNTLVNVLNCNISDTSWIQAVLPIRFGGLGIRKVSSVSLPAFLSSAHSIHKLFTKIISNSLGCVGIDSLPEAIITWRGLCSDEIPVQPHIQKNWDEPLLNLAYSDLLNCCTPADRARLLASAEPESGYWLQALPSSNIGTLLDNHTFSLSVSLRLGTAINEPHLCHCGATVDRQGHHGLSCRRSAGRQSRHASINDIIRRALATVNVPATLEPNGIVRDDGRRPDGMSLVPWSHGKPLVWDATCVDTLAASHVTATAKTAGAAAAHAETHKRRKYESIGDGYIFLPFGVETLGPWGPSAKRLLKDLSKRLTEKTNDPRAGAYLGQRISLAIQRGNTASLLGTLPAAADLDIVFYI

SEQ ID NO: 21989 - protein, 955 aa, Celastrina argiolus
MSAAASTSCSSNFIQCQFCNRSFKGARGLNIHLGKTHNHNSTVIQQHPTHPINTSTTSHPLPTIPFWQKISNYKSSIPILKRIPKGARIQVAKNLSSLIRQVISNPDCCQHWENLLTFPFHILHAAQDRQKSLTSTIKHNCTHAINPSPTNVFNGNRTPQPLRKTHNIKHKIESKVSDGDLKGAANLLFSTDTIAEYSPHTLEALHEKHPSLPPPSIPPSSSPAVQSVEACVKDIKTAIMSFRNGSAGGHDGLSPQHLKDLIGVSGDSGGALLVDLTALINLMLSGKVPKEITGIIYGANLCALKKKDGGIRPIAVGCTYRRIASKICCTRISRKLADTFQPVQLGFGSKGGCEAAVHALRTYLKAKSGQVVLKVDVKNAFNSVSRSALLKEVQNHAPEMYDYILQCYGADSTLLYQNDRLFSSTGCQQGDPLGPALFSLAIHPIITSLTSEFNVWYLDDGTIGGETASVLQDLQVIIEKFKSIDLDLNFSKCELFINDSLDIWHEVTPKFNNLAPNIKILSKESLRLLGAPILSEGYNSFISEQNHKFSESSGKLTTINSHMAYQIIRFCLFVPKLMYVLRCCPLWSFPNFLSQLDLTLKNTLVNVLNCNISDTSWIQAVLPIRFGGLGIRKVSSVSLPAFLSSAHSIHKLFTKIISNSLGCVGIDSLPEAIITWRGLCSDEIPVQPHIQKNWDEPLLNLAHSELLNCCTAADRARLLASAEPESGYWLQALPSSNIGTLLDNHTFSLSVSLRLGTAINEPHLCHCGATVDRQGHHGLSCRRSAGRQSRHASINDIIRRALATVNVPATLEPNGIVRDDGRRPDGMSLVPWSHGKPLVWDATCVDTLAASHVTATAKTAGAAAAHAETHKRRKYESIGDGYIFLPFGVETLGPWGPSAKRLLKDLSKRLTEKTNDPRAGAYLGQRISLAIQRGNTASLLGTLPAAADLDIVFYI

SEQ ID NO: 21990 - protein, 955 aa, Celastrina argiolus
MSAAASTSCSSNFIQCQFCNRSFKGARGLNIHLGKTHNHNSTVIQQHPTHPINTSTTSHPLPTIPFWQKISNYKSSIPILKRIPKGARIQVAKNLSSLIRQVISNPDCCQHWENLLTFPFHILHAAQDRQKSLTSTIKHNCTHAINPSPTNVFNGNRTPQPLRKTHNIKHKIESKVSDGDLKGAANLLFSTDTIAEYSPHTLEALHEKHPSLPPPSIPPSSSPAVQSVEACVKDIKTAIMSFRNGSAGGHDGLSPQHLKDLIGVSGDSGGALLVDLTALINLMLSGKVPKEITGIIYGANLCALKKKDGGIRPIAVGCTYRRIASKICCTRISRKLADTFQPVQLGFGSKGGCEAAVHALRTYLKAKSGQVVLKVDVKNAFNSVSRSALLKEVQNHVPEMYDYILQCYGADSTLLYQNDRLFSSTGCQQGDPLGPALFSLAIHPIITSLTSEFNVWYLDDGTIGGETASVLQDLQVIIEKFKSIDLDLNFSKCELFINDSLDIWHEVTPKFNNLAPNIKILSKESLRLLGAPILSEGYNSFISEQNHKFSESSGKLTTINSHMAYQIIRFCLFVPKLMYVLRCCPLWSFPNFLSQLDLTLKNTLVNVLNCNISDTSWIQAVLPIRFGGLGIRKVSSVSLPAFLSSAHSIHKLFTKIISNSLGCVGIDSLPEAIITWRGLCSDEIPVQPHIQKNWDEPLLNLAHSELLNCCTAADRARLLASAEPESGYWLQALPSSNIGTLLDNHTFSLSVSLRLGTAINEPHLCHCGATVDRQGHHGLSCRRSAGRQSRHASINDIIRRALATVNVPATLEPNGIVRDDGRRPDGMSLVPWSHGMPLVWDATCVDTLAASHVTATAKTAGAAAAHAETHKRRKYESIGDGYIFLPFGVETLGPWGPSAKRLLKDLSKRLTEKTNDPRAGAYLGQRISLAIQRGNSASLLGTLPAAADLDIVFYI

SEQ ID NO: 21991 - protein, 955 aa, Celastrina argiolus
MSAAASTSCSSNFIQCQFCNRSFKGARGLNIHLGKTHNHNSTVIQQHPTHPINTSTTSHPLPTIPFWQKISNYKSSIPILKRIPKGARIQVAKNLSSLIRQVISNPDCCQHWENLLTFPFHILHAAQDRQKSLTSTIKHNCTHAINPSPTNVFNGNRTPQPLRKTHNIKHKIESKVSDGDLKGAANLLFSTDTIAEYSPHTLEALHEKHPSLPPPSIPPSSSPAVQSVEACAKDIKTAIMSFRNGSAGGHDGLSPQHLKDLIGVSGDSGGALLVDLTALINLMLSGKVPKEITGIIYGANLCALKKKDGGIRPIAVGCTYRRIASKICCTRISRKLADTFQPVQLGFGSKGGCEAAVHALRTYLKAKSGQVVLKVDVKNAFNSVSRSALLKEVQNHVPEMYDYILQCYGADSTLLYQNDRLFSSTGCQQGDPLGPALFSLAIHPIITSLTSEFNVWYLDDGTIGGETASVLQDLQVIIEKFKSIDLDLNFSKCELFINDSLDIWHEVTPKFNNLAPNIKILSKESLRLLGAPILSEGYNSFISEQNHKFSESSGKLTTINSHMAYQIIRFCLFVPKLMYVLRCCPLWSFPNFLSQLDLTLKNTLVNVLNCNISDTSWIQAVLPIRFGGLGIRKVSSVSLPAFLSSAHSIHKLFTKIISNSLGCVGIDSLPEAIITWRGLCSDEIPVQPHIQKNWDEPLLNLAHSELLNCCTAADRARLLASAEPESGYWLQALPSSNIGTLLDNHTFSLSVSLRLGTAINEPHLCHCGATVDRQGHHGLSCRRSAGRQSRHASINDIIRRALATVNVPATLEPNGIVRDDGRRPDGMSLVPWSHGKPLVWDATCVDTLAASHVTATAKTAGAAAAHAETHKRRKYESIGDGYIFLPFGVETLGPWGPSAKRLLKDLSKRLTEKTNDPRAGAYLGQRISLAIQRGNTASLLGTLPAAADLDIVFYI

SEQ ID NO: 21992 - protein, 931 aa, Celastrina argiolus
MSAAASTSCSSNFIQCQFCNRSFKGARGLNIHLGKTHNHNSTVIQQHPTHPINTSTTSHPLPTIPFWQKISNYKSSIPILKRISKGARIQVAKNLSSLIRQVISNPDFCQHWENLLTFPFHILHAAQDRQKSLTSTIKHNYTHAINPSPTNVFNGNRTPQPLRKTHNIKHKIESKVSDGDRSGKHPSLPPPSIPPSSSPAVQSVEACVKDIKTAIMSFRNGSAGGHDGLSPQHLKDLIGVSGDSSGALLVDLTALINLMLSGKVPKEITGIIYGANLCALKKKDGGIRPIAVGCTYRRIASKICCTRISRKLADTFQPVQLGFGSKGGCEAAVHALRTYLKAKSGQVVLKVDVKNAFNSVSRSALLKEVQNHVPEMYDYILQCYGADSTLLYQKDRLFSSTGCQQGYPLGPALFSLAIQPIITSLTSEFNVWYLDDGTIGGETASVLQDLQVIIEKFKSIDLDLNFSKCELFINDSLDIWHEVTPKFNNLAPNIKILSKESLRLLGAPILSEGYNSFISEQNHKFSESSGKLTTINSHMAYQIIRFCLFVPKLMYVLRCCPLWSFPNFLSQLDLTLKNTLVNVLNCNISDTSWIQAVLPIRFGGLGIRKVSSVSLPAFLSSAHSIHKLFTKIISNSLGCVGIDSLPEAIITWRGLCSDEIPVQPHIQKNWDEPLLNLAHSELLNCCTAADRARLLASAEPESGYWLKALPSSNIGTLLDNHTFSLSVSLRLGTAINEPHLRHCGATVDRQGHHGLSCRRSAGRQSRHASINDIIRRALATVNVPATLEPNGIVRDDGRRPDGMSLVPWSHGKPLVWDATCVDTLAASHVTATAKTAGAAAAHAETHKRRKYESIGDGYIFLPFGVETLGPWGPSAKRRLKDLSKRLTEKTNDPRAGAYLGQRISLAIQRGNTASLLGTLPAAADLDIVFYM

SEQ ID NO: 21993 - protein, 955 aa, Celastrina argiolus
MSAAASTSCSSNFIQCQFCNRSFKGARGLNIHLGKTHNHNSTVIQQHPTHPINTSTTSHPLQTIPFWQKICNYKSSIPILKRIPKGARIQVAKNLSSLIRQVISNPDCCQNWENLLTFPFHILHAAQDRQKSLTSTIKHNCTHAINPSPTNVFNGNRTPQPLRKTHNIKHKIESKVSDGDLKGAANLLFSTDTIAEYSPHTLEALHEKHPSLPPPSIPPSFSPAVQSVEACVKDIKTAIMSFRNGSAGGHDGLSPQHLKDLIGVSGDSGGALLVDLTALINLMLSGKVPKEITGIIYGANLCALKKKDGGIRPIAVGCTYRRIASKICCTRISRKLADTFQPVQLGFGSKGGCEAAVHALRTYLKTKSGQVVLKVDVKNAFNSVSRSALLKEVQNHVPEIYDYILQCYGADSTLIYQNDRLFSSTGCQQGDPLGPALFSLAIHPIITSLTSEFNVWYLDDGTIGGETASVLQDLQVITEKFKSIDLDLNFSKCELFINDSLDIWHEVTPKFNNLAPNIKILSKESLRLLGAPILSEGYNSFISEQNHKFSESSGKLTTINSHMAYQIIRFCLFVPKLMYVLRCCPLWSFPNFLSQLDLTLKNTLINVLNCNISDTSWIQAVLPIRFGGLGIRKVSSVSLPAFLSSAHSIHKLFTKIISNSLGCVGIDSLPEAIITWRGLCSDEIPVQPHIQKNWDEPLLNLAHSDLLNCCTPADRARLLASAEPESGYWLQALPSSNIGTLLDNHTFSLSVSLRLGTAINEPHLCHCGAKVDRQGHHGLSCRRSAGRQSRHASINDIIRRALATVNVPATLEPNGIVRDDGRRPDGVSLVPWSHGKPLVWDATCVDTLAASHVTATAKTAGAAAAHAETHKRRKYESIGDGYIFLPFGVETLGPWGPSAKRLLKDLSKRLTEKTNDPRAGAYLGQRISLAIQRGNTASLLGTLPAAADLDIVFYI

SEQ ID NO: 21994 - protein, 955 aa, Celastrina argiolus
MSAAASTSCSSIFIQCQFCNRSFKGARGLNIHLGKTHNHNSTVIQQHPTHPINTSTTSHPLPTIPFWQKICNYKSSIPILKRIPKGARIQVAKNLSSLIRQVISNPDCCQNWENLLTFPFHILHAAQDRQKSLTSTIKHNCTHAINPSPTNVFNGNRTPQPLRKTHNIKHKIESKVSDGDLKGAANLLFSTDTIAEYSPHTLEALHEKHPSLPPPSIPPSFSPAVQSVEACVKDIKTAIMSFRNGSAGGHDGLSPQHLKDLIGVSGDSGGALLVDLTALINLMLSGKVPKEITGIIYGANLCALKKKDGGIRPIAVGCTYRRIASKICCTRISRKLADTFQPVQLGFGSKGGCEAAVHALRTYLKTKSGQVVLKVDVKNAFNSVSRSALLKEVQNHVPEIYDYILQCYGADSTLIYQNDRLFSSTGCQQGDPLGPALFSLAIHPIITSLTSEFNVWYLDDGTIGGETASVLQDLQVITEKFKSIDLDLNFSKCELFINDSLDIWHEVTPKFNNLAPNIKILSKESLRLLGAPILSEGYNSFISEQNHKFSESSGKLTTINSHMAYQIIRFCLFVPKLMYVLRCCPLWSFPNFLSQLDLTLKNTLVNVLNCNISDTSWIQAVLPIRFGGLGIRKVSSVSLPAFLSSAHSIHKLFTKIISNSLGCVGIDSLPEAIITWRGLCSDEIPVQPHIQKNWDEPLLNLAHSDLLNCCTPADRARLLASAEPESGYWLQALPSSNIGTLLDNHTFSLSVSLRLGTAINEPHLCHCGATVDRQGHHGLSCRRSAGRQSRHASINDIIRRALATVNVPATLEPNGIVRDDGRRPDGMSLVPWSHGKPLVWDATCVDTLAASHVTATAKTAGAAAAHAETHKGRKYESIGDGYIFLPFGVETLGPWGPSAKRLLKDLSKRLTEKTNDPRAGAYLGQRISLAIQRGNTASLLGTLPAAADLDIVFYI

SEQ ID NO: 21995 - protein, 955 aa, Celastrina argiolus
MSAAASTSCSSNFIQCQFCNRSFKGARGLNIHLGKTHNHNSTVIQQHPTHPINTSTTSHPLPTIPFWQKISNYKSSIPILKRIPKGARIQVAKNLSSLIRQVISNPDCCQHWENLLTFPFHILHAAQDRQKSLTSTIKHNCTHAINPSPTNVFNGNRTPQPLRKTHNIKHKIESKVSDGDLKGAANLLFSTDTIAEYSPHTLEALHEKHPSLPPPSIPPSSSPAVQSVEACVKDIKTAIMSFRNGSAGGHDGLSPQLLKDLIGVSGDSGGALLVDLTALINLMLSGKVPKEITGIIYGANLCALKKKDGGIRPIAVGCTYRRIASKICCTRISRKLADTFQPVQLGFGSKGGCEAAVHALRTYLKAKSGQVVLKVDVKNAFNSVSRSALLKEVQNHVPEMYDYILQCYGADSTLLYQNDRLFSSTGCQQGDPLGPALFSLAIHPIITSLTSEFNVWYLDDGTIGGETASVLQDLQVIIEKFKSIDLDLNFSKCELFINDSLDIWHEVTPKFNNLAPNIKILSKESLRLLGAPILSEGYNSFISEQNHKFSESSGKLTTINSHMAYQIIRFCLFVPKLMYVLRCCPLWSFPNFLSQLDLTLKNTLVNVLNCNISDTSWIQAVLPIRFGGLGIRKVSSVSLPAFLSSAHSIHKLFTKIISNSLGCVGIDSLPEAIITWRGLCSDEIPVQPHIQKNWDEPLLNLAHSELLNCCTAADRARLLASAEPESGYWLQALPSSNIGTLLDNHTFSLSVSLRLGTAINEPHLCHCGATVDRQGHHGLSCRRSAGRQSRHASINDIIRRALATVNVPATLEPNGIVRDDGRRPDGMSLVPWSHGKPLVWDATCVDTLAASHVTATAKTAGAAAAHAETHKRRKYESIGDGYIFLPFGVETLGPWGPSAKRLLKDLSKRLTEKTNDPRAGAYLGQRISLAIQRGNTASLLGTLPAAADLDIVFYI

SEQ ID NO: 21996 - protein, 955 aa, Celastrina argiolus
MSAAASTSCSSIFIQCQFCNRPFKGARGLNIHLGKTHNHNSTVIQQHPTHPINTSTTSHPLPTIPFWQKICNYKSSIPILKRIPKGARIQVAKNLSSLIRQVISNPDCCQNWENLLTFPFHILHAAQDRQKSLTSTIKHNCTHAINPSPTNVFNGNRTPQPLRKTHNIKHKIESKVSDGDLKGAANLLFSTDTIAEYSPHTLEALHEKHPSLPPPSIPPSISPAVQSVEACVKDIKTAIMSFRNGSAGGHDGLSPQHLKDLIGVSGDSGGALLVDLTALINLMLSGKVPKEITGIIYGANLCALKKKDGGIRPIAVGCTYRRIASKICCTRISRKLADTFQPVQLGFGSKGGCEAAVHALRTYLKTKSGQVVLKVDVKNAFNSVSRSALLKEVQNHVPEIYDYILQCYGADSTLIYQNDRLFSSTGCQQGDPLGPALFSLAIHPIITSLTSEFNVWYLDYGTIGGETASVLQDLQVITEKFKSIDLDLNFSKSELFINDSLDIWHEVTPKFNNLAPNIKILSKESLRLLGAPILSEGHNSFISEQNHKFSESSGKLTTINSHMAYQIIRFCLFVPKLMYVLRCCPLWSFPNFLSQLDLTLKNTLVNVLNCNISDTSWIQAVLPIRFGGLGIRKVSSVSLPAFLSSAHSIHKLFTKIISNSLGCVGIDSLPEAIITWRGLCSDEIPVQPHIQKNWDEPLLNLAHSDLLNCCTPADRARLLASAEPESGYWLQALPSSNIGTLLDNHTFSLSVSLRLGTAINEPHLCHCGATVDRQGHHGLSCRRSAGRQSRHASINDIIRRALATVNIPATLEPNGIVRDDGRRPDGMSLVPWSHGKPLVWDATCVDTLAASHVTATAKTAGAAAAHAETHKRRKYESIGDGYIFLPFGVETLGPWGPSAKRLLKDLSKRLTEKTNDPRAGAYLGQRISLAIQRGNTASLLGTLPAAADLDIAFYI

SEQ ID NO: 21997 - protein, 950 aa, Aricia agestis
MSETAGAPVNFIRCPTCDRSFKGVKGLNIHLGKTHNHNANLSSTSSIPPSSTEIPFWQTISNYKSSIPILKRIPKGARIQVAKHLSSVIRDVISNPGCCKQWENLLCFSYNILHAIQDKKRSLTSIIKNNCSTINNHTVNHSLSINPHDNPRPHLTISHSSTHKIESKISDGDLKGAANLLFSNDSIAPYDEHTLEALRHKHPSLPPPTKPLPSSTAVEPVQASVKDIKHAIMSFRTGSASGYDGLSPQHLKDLICTPGDSARALLADLTDLINLMLSGKVPHNVTNILYGANLCALKKKDGSIRPIAVGCTYRRIASKICCKYISRKLTDTFQPVQLGFGSKGGCEAAVHALRTYIKAKTGQVVLKVDVKNAFNSISRSALLREVQKHVPEIQEYILQCYGSDSSLIYRSDLLLSSTGCQQGDPLGPAIFSLTIHSIITSLSSEFNIWYLDDGTLGGDAATVLLDLQSLIEKFQSIDLELNFSKCELFINNDNPVVQSPDTISKFNNLSPNIKILSKESLRLLGAPIFSDGFNTYISEQNNKFSQSSGKLMTIKSHMAYQIIRFCLFVPKLTYALRCCPLWEYSDSLSQLDQTLRNTLVNILNCRISDTSWVQATLPIRFGGLGIRTVASVSLSAFLSSAHSINSLFKKIVTNSLGSVGIDSLTEAIKTWRETCTAEIPVNTSIQKNWDEPLLNLAKLNLLNCSSAADRARLLASAEPESGYWLLAIPSSNIGTLLDNHTFNVSVGLRIGAEITEAHRWHCGTTVDRQGRHGLSCRRSAGRQARHASINDVIRRALATVNVPATLEPNGIARDDGKRPDGMTLIPWSRGRPLVWDATCVDTLAASHVTATSREAGAAAANAETNKRRKYECLGQDFIFLPFGVETLGPWGPSAKVLFKDLSQRLVDKSNDPRAGAYLGQRISLAIQRGNAASVIGTLPAASDLDLIFYL

SEQ ID NO: 21998 - protein, 956 aa, Lysandra bellargus
MSETASEPINFIRCQFCNRSFKGVKGLNIHIGKTHSHSSNISSTPTTTPSPSCNIPFWQKISNYKLTLPILKRIPKGARVQVAKQLSSVIREVISHPDSCQRWESLLTFPFHVLHAIQDKKNHSLLSLKTTAPTLTTSPSTSLHLHSHDNSPPHLHRKQHNSIHKIESKISDGDLKGAANMLFSSDSIAQYNAHTLEALRDKHPSLPPPNIPPSSSPSVQPVEASIKDVKNAIMSFRTGSASGYDGLSPQHLKDLISASEDSSRALLEDLTTLITLMLSGKVHHDFTFILYGANLCALKKKDGGIRPIAVGCTSRRIASKICCKHITNKLRDVFQPVQLGFGSKGGCEAAVHALRTYIKSKTGQVIVKVDVKNAFNSVSRSALLKEVHNHIPEIYEYILQSYGANSTLLYNRDCLLSSTGCQQGDPLGPAIFSLAIHSTITSLQSEFNVWYLDDGTLGGDPATVLHDLQVLIEKFKAIDLDLNFSKCELFLNSPITQPHDAIISEFNNLAPSIKILSKESLRLLGAPILNDGFEPYVSEQKQKFVESSGKLVAIKSHMAYQIIRFCLFVPQFTYVLRCCPLWECPNLLSHLDSILKDTVINIFNCQISDTSWAQATLPIRFGGLGLRSVSSVSLPAFLSSAHSIHPLFIKIITNSFGNIGIQSLAEAINAWKRVCPSDVPANPNIQKNWDEPLINLAQTDILNSSSTTDRARLLASAEPESGYWLQANPSSNTGTLLDNHTFNLSLSLRLGANISEPHRCHCGAAVDRQGHHGLSCRRSAGRQSRHASLNDVIRRALVSVNVPATLESNGIARDDGKRPDGMTLVPWSRGRPLVWDATCVDTLAASHVTATTREAGAAAAQAETNKRRKYEALGSDYFFVPFGVETLGPWGPGAKLLFKELSQRLVEKTNDPRAGAYLGQRISLAIQRGNAASLLGTLPTASDLDLYFSNIFYRNY

SEQ ID NO: 21999 - protein, 951 aa, Lysandra coridon
MSETASERINFIRCQFCNRSFKGVKGLNIHIGKTHSHSSNISSTPTTTPSPSCNIPFWQKISNYKLSLPILKRIPKGARVQVAKQLSSVIREVISHPHSCQRWESLLTFPFHVLHAIQDKKKSLTSIIKNNCSNFNNLTINASLHLHSHDNSPPHLLRKQHNSIHKIESKISDGDLKGAANMLFSSDSIAQYNAHTLEALRDKHPTLPPPNIPPSSSPSVQPVEASIKDVKNAIMSFRTGSASGYDGLSPQHLKDLISASEDSSRALLEDLTTLINLMLSGKVHHDFTNILYGANLCALKKKDGGIRPIAVGCTYRRIASKICCKHITNKLRDVFQPVQLGFGSKGGCEAAVHALRTYIKSKTGQVIVKVDVKNAFNSVSRSALLKEVHNHIPEIYEYILQSYGANSTLLYNRDCLLSSTGCQQGDPLGPAIFSLAIHSTITSLQSEFNVWYLDDGTLGGDPATVLHDLQVLIEKFKAIDLDLNFSKCELFLNSPITQPHDVIISEFNNLAPSIKILSKESLRLLGAPILNDGFEPYVSEQKQKFVESSGKLVAIKSHMAYQIIRFCLFVPQFTYVLRCCPLWECPNLLSHLDSILKDTVINIFNCQISDTSWAQATLPIRFGGLGLRSVSSVSLPAFLSSAHSIHPLFIKIITNSFGNIGIQSLAEAINAWKRVCPSDVPANPNIQKNWDEPLINLALTDILNSSSTTDRARLLASAEPESGYWLQANPSSNTGTLLDNHTFNLSLSLRLGANISEPHRCHCGAAVDRQGHHGLSCRRSAGRQSRHASLNDVIRRALVSVNVPATLEPNGTARDDGKRPDGMTLVPWSRGRPLVWDATCVDTLAASHVTATTREAGAAAAQAETNKRRKYEALGSDYFFVPFGVETLGPWGPGAKLLFKELSQRLVEKTNDPRAGAYLGQRISLAIQRGNAASLLGTLPAASDLDLVFFI

SEQ ID NO: 22000 - protein, 951 aa, Aricia agestis
MSETASEPINFIRCQFCNRSFKGVRGLNIHIGKTHSHSPNVSNAPTTPPSPSCDIPFWQIISNYKWSLPILKRIPKGARIQVAKQLSSIIREVISHPDSCQRWESLLTFPFLVLHAVQDKKKTLTSIIKNNCSNFNNHTINASLPIHSHDNPPPHLLRKQHNSIQKIESKISDGDLKGAANMLFSSDSIAQYNTHTLEALRDKHPTLPPPNIPPSSSPSVQPVEASIKDVKNAIMSFRTGSASGYDGLSPQHLKDLISASEDSSRALLEDLTALINLMLSGKVHHDFTSILYGANLCALKKKDGGIRPIAVGCTYRRIASKICCKHITKKLRDTFQPVQLGFGSKGGCEAAVHALRTYIKSKTGQVIVKVDVKNAFNSVSRTALLKEVHNHIPEIYEYSLQSYGANSTLLYNSDCLLSSTGCQHGDPLGPTIFSLAIHSTITSLQSEFNVWYLDDGTLGGDPATVLHDLQLLIEKFKSIDLDLNFSKCELFLNSPIAQPHDVIMSEFNNLAPSIKILSKESLRLLGAPIFNDGFEPYVSEQKQKFEESSGKLVAIKSHMAYQIIRFCLFVPQFTYVLRCCPLWEYPNLLSHLDTILKDTVMNIFNCQISDTSWAQATLPIRFGGLGLRSVSSVSLPAFLSSAHSIHPLFIQIITNSFGNIGIVSLTEAINAWKRVCPSDVPVNPNIQKNWDEPLIKLAQSEILSSSSTTDRARLLASAEPESGYWLQAYPSSNTGTLLDNHTFNLSLSLRLGANISEPHRCHCGAAVDRQGHHGLSCRRSAGRQSRHASLNDVIRRALASVNVPATLEPNGIARDDGKRPDGMTLVPWSRGRPLVWDATCVDTLAASHVTVTTRKAGAAAAQAETNKRRKYEALGNDYFFVPFGVETLGPWGPGAKQMFRELSQRLVEKTNDPRAGAYLGQRISLAIQRGNAASLLGTLPAASDLDLVFYL

SEQ ID NO: 22001 - protein, 951 aa, Lysandra bellargus
MSETASEPINFIRCQFCNRSFKGVKGLNIHIGKTHSHSSNISSTPTTTPSPSCNIPFWQKISNYKLSLPILKRIPKGARVQVAKQLSSVIREVISHPDSCQRWESLLTFPFHVLHAIQDKKKSLTSIIKNNCSNFNNLTINASLHLHSHDNSPPHLHRKQHNSIHKIESKISDGDLKGAANMLFSSDSIAQYNAHTLEALRDKHPSLPPPNIPPSSSPSVQPVEASIKDVKNAIMSFRTGSASGYDGLSPQHLKDLISASEDSSRALLEDLTTLINLMLSGKVHHDFTFILYGANLCALKKKDGGIRPIAVGCTYRRIASKICCKHITNKLRDVFQPVQLGFGSKGGCEAAVHALRTYIKSKTGQVIVKVDVKNAFNSVSRSALLKEVHNHIPEIYEYILQSYGANSTLLYNRDCLLSSTGCQQGDPLGPAIFSLAIHSTITSLQSEFNVWYLDDGTLGGDPATVLHDLQVLIEKFKAIDLDLNFSKCELFLNSPITQPHDVIISEFNNLAPSIKILSKESLRLLGAPILNDGFEPYVSEQKQKFVESSGKLVAIKSHMAYQIIRFCLFVPQFTYVLRCCPLWECPNLLSHLDSILKDTVINIFNCQISDTSWAQATLPIRFGGLGLRSVSSVSLPAFLSSAHSIHPLFIKNITNSFGNIGIQSLAEAINAWKRVCPSDVPANPNIQKNWDEPLINLAQTDILNSSSTTDRARLLASAEPESGYWLQANPSSNTGTLLDNHTFNLSLSLRLGANISEPHRCHCGAAVDRQGHHGLSCRRSAGRQSRHASLNDVIRRALVSVNVPATLEPNGIARDDGKRPDGMTLVPWSRGRPLVWDATCVDTLAASHVTATTREAGAAAAQAETNKRRKYEALGSDYFFVPFGVETLGPWGPGAKLLFKELSQRLVEKTNDPRAGAYLGQRISLAIQRGNAASLLGTLPAASDLDLVFYI

SEQ ID NO: 22002 - protein, 951 aa, Lysandra bellargus
MSETASEPINFIRCQFCNRSFKGVKGLNIHIGKTHSHSSNISSTPTTTPSPSCNIPFWQKISNYKLSLPILKRIPKGARVQVAKQLSSVIREVISHPDSCQRWESLLTFPFHVLHAIQDKKKSLTSIIKNNCSNFNNLTINASLHLHSHDNSPPHLHRKQHNSIHKIESKISDGDLKGAANMLFSSDSIAQYNAHTLEALRDKHPSLPPPNIPPSSSPSVQPVEASIKDVKNAIMSFRTGSASGYDGLSPQHLKDLISASEDSSRALLEDLTTLINLMLSGKVHHDFTFILYGANLCALKKKDGGIRPIAVGCTYRRIASKICCKHITNKLRDVFQPVQLGFGSKGGCEAAVHALRTYIKSKTGQVIVKVDVKNAFNSVSRSALLKEVHNHIPEIYEYILQSYGANSTLLYNRDCLLSSTGCQQGDPLGPAIFSLAIHSTITSLQSEFNVWYLDDGTLGGDPATVLHDLQVLIEKFKAIDLDLNFSKCELFLNSPITQPHDVIISEFNNLAPNIKILSKESLRLLGAPILNDGFEPYVSEQKQKFVESSGKLVAIKSHMAYQIIRFCLFVPQFTYVLRCCPLWECPNLLSHLDSILKDTVINIFNCQISDTSWAQATLPIRFGGLGLRSVSSVSLPAFLSSAHSIHPLFIKIITNSFGNIGIQSLAEAINAWKRVCPSDVPANPNIQKNWDEPLINLAQTDILNSSSTTDRARLLASAEPESGYWLQANPSSNTGTLLDNHTFNLSLSLRLGANISEPHRCHCGAAVDRQGHHGLSCRRSAGRQSRHASLNDVIRRALVSVNVPATLEPNGIARDDGKRPDGMTLVPWSRGRPLVWDATCVDTLAASHVTATTREAGAAAAQAETNKRRKYEALGSDYFFVPFGVETLGPWGPGAKLLFKELSQRLVEETNDPRAGAYLGQRISLAIQRGNAASLLGTLPAASDLDLVFYI

SEQ ID NO: 22003 - protein, 951 aa, Lysandra bellargus
MSETASEPINFIRCQFCNRSFKGVKGLNIHIGKTHSHSSNISSTPTTTPSPSCNIPFWQKISNYKLSLPILKRIPKGARVQVAKQLSSVIREVISHPDSCQRWESLLTFPFHVLHAIQDKKKSLTSIIKNNCSNFNNLTINASLHLHSHDNSPPHLHRKQHNSIHKIESKISDGDLKGAANMLFSSDSIAQYNAHTLEALRDKHPSLPPPNIPPSSSPSVQPVEASIKDVKNAIMSFRTGSASGYDGLSPQHLKDLISASEDSSRALLEDLTTLINLMLSGKVHHDFTFILYGANLCALKKKDGGIRPIAVGCTYRRIASKICCKHITNKLRDVFQPVQLGFGSKGGCEAAVHALRTYIKSKTGQVIVKVDVKNAFNSVSRSALLKEVHNHIPEIYEYILQSYGANSTLLYNRDCLLSSTGCQQGDPLGPAIFSLAIHSTITSLQSEFNVWYLDDGTLGGDPATVLHDLQVLIEKFKAIDLDLNFSKCELFLNSPITQPHDVIISEFNNLAPSIKILSKESLRLLGAPILNDGFEPYVSEQKQKFVESSGKLVAIKSHMAYQIIRFCLFVPQFTYVLRCCPLWECPNLLSHLDFILKDTVINIFNCQISDTSWAQATLPIRFGGLGLRSVSSVSLPAFLSSAHSIHPLFIKIITNSFGNIGIQSLAEAINAWKRVCPSDVPANPNIQKNWDEPLINLAQTDILNSSSTTDRARLLASAEPESGYWLQANPSSNTGTLLDNHTFNLSLSLRLGANISEPHRCHCGAAVDRQGHHGLSCRRSAGRQSRHASLNDVIRRALVSVNVPATLEPNGIARDDGKRPDGMTLVPWSRGRPLVWDATCVDTLAASHVTATTREAGAAAAQAETNKRRKYESLGSDYFFVPFGVETLGPWGPGAKLLFKELSQRLVEKTNDPRAGAYLGQRISLAIQRGNAASLLGTLPAASDLDLVFYI

SEQ ID NO: 22004 - protein, 951 aa, Lysandra bellargus
MSETASEPINFIRCQFCNRSFKGVKGLNIHIGKTHSHSSNISSTPTTTPSPSCNIPFWQKISNYKLSLPILKRIPKGARVQVAKQLSSVIREVISHPDSCQRWESLLTFPFHVLHAIQDKKKSLTSIIKNNCSNFNNLTINASLHLHSHDNSPPHLHRKQHNSIHKIESKISDGDLKGAANMLFSSDSIAQYNAHTLEALRDKHPSLPPPNIPPSSSPSVQPVEASIKDVKNAIMSFRTGSASGYDGLSPQHLKDLISASEDSSRALLEDLTTLINLMLSGKVHHDFTFILYGANLCALKKKDGGIRPIAVGCTYRRIASKICCKHITNKLRDVFQPVQLGFGSKGGCEAAVHALRTYIKSKTGQVIVKVDVKNAFNSVSRSALLKEVHNHIPEIYEYILQSYGANSTLLYNRDCLLSSTGCQQGDPLGPAIFSLAIHSTITSLQSEFNVWYLDDGTLGGDPATVLHDLQVLIEKFKAIDLDLNFSKCELFLNSPITQPHDVIISEFNNLAPSIKILSKESLRLLGAPILNDGFEPYVSEQKQKFVESSGKLVAIKSHMAYQIIRFCLFVPQFTYVLRCCPLWECPNLLSHLDSILKDTVINIFNCQISDTSWAQATLPIRFGGLGLRSVSSVSLPAFLSSAHSIHPLFIKIITNSFGNIGIQSLAEAINAWKRVCPSDVPANPNIQKNWDEHLINLAQTDILNSSSTTDRARLLASAEPESGYWLQANPSSNTGTLLDNHTFNLSLSLRLGANISEPHRCHCGAAVDRQGHHGLSCRRSAGRQSRHASLNDVIRRALVSVNVPATLEPNGIARDDGKRPDGMTLVPWSRGRPLVWDATCVDTLAASHVTATTREAGAAAAQAETNKRRKYEALGSDYFFVPFGVETLGPWGPGAKLLFKELSQRLVEKTNDPRAGAYLGQRISLAIQRGNAASLLGTLPAASDLDLVFYI

SEQ ID NO: 22005 - protein, 951 aa, Lysandra bellargus
MSETASEPINFIRCQFCNRSFKGVKGLNIHIGKTHSHSSNISSTPTTTPSPSCNIPFWQKISNYKLSLPILKRIPKGARVQVAKQLSSVIREVISHPDSCQRWESLLTFPFHVLHAIQDKKKSLTSIIKNNCSNFNNLTINASLHLHSHDNSPPHLHRKQHNSIHKIESKISDGDLKGAANMLFSSDSIAQYNAHTLEALRDKHPSLPPPNIPPSSSPSVQPVEASIKDVKNAIMSFRTGSASGYDGLSPQHLKDLISASEDSSRALLEDLTTLINLMLSGKVHHDFTFILYGANLCALKKKDGGIRPIAVGCTYRRIASKICCKHITNKLRDVFQPVQLGFGSKGGCEAAVHALRTYIKSKTGQVIVKVDVKNAFNSVSRSALLKEVHNHIPEIYEYILQSYGANSTLLYNRDCLLSSTGCQQGDPLGPAIFSLAIHSTITPLQSEFNVWYLDDGTLGGDPATVLHDLQVLIEKFKAIDLDLNFSKCELFLNSPITQPHDVIISEFNNLAPSIKILSKESLRLLGAPILNDGFEPYVSEQKQKFVESSGKLVAIKSHMAYQIIRFCLFVPQFTYVLRCCPLWECPNLLSHLDSILKDTVINIFNCQISDTSWAQATLPIRFGGLGLRSVSSVSLPAFLSSAHSIHPLFIKIITNSFGNIGIQSLAEAINAWKRVCPSDVPANPNIQKNWDEPLINLAQTDILNSSSTTDRARLLASAEPESGYWLQANPSSNTGTLLDNHTFNLSLSLRLGANISEPHRCHCGAAVDRQGHHGLSCRRSAGRQSRHASLNDVIRRALVSVNVPATLEPNGIARDDGKRPDGMTLVPWSRGRPLVWDATCVDTLAASHVTATTREAGAAAAQAETNKRRKYEALGSDYFFVPFGVETLGPWGPGAKLLFKELSQRLVEKTNDPRAGAYLGQRISLAIQRGNAASLLGTLPAASDLDLVFYI

SEQ ID NO: 22006 - protein, 951 aa, Lysandra bellargus
MSETASEPINFIRCQFCNRSFKGVKGLNIHIGKTHSHSSNISSTPTTTPSPSCNIPFWQKISNYKLSLPILKRIPKGARVQVAKQLSSVIREVISHPDSCQRWESLLTFPFHVLHAIQDKKKSLTSIIKNNCSNFNNLTINASLHLHSHDNSPPHLHRKQHNSIHKIESKISDGDLKGAANMLFSSDSIAQYNAHTLEALRDKHPSLPPPNIPPSSSPSVQPVEASIKDVKNAIMSFRTGSASGYDGLSPQHLKDLISASEDSSRALLEDLTTLINLMLSGKVHHDFTFILYGANLCALKKKDGGIRPIAVGCTYRRIASKICCKHITNKLRDVFQPVQLGFGSKGGCEAAVHALRTYIKSKTGQVIVKVDVKNAFNSVSRSALLKEVHNHIPEIYEYILQSYGANSTLLYNRDCLLSSTGCQQGDPLGPAIFSLAIHSTITSLQSEFNVWYLDDGTLGGVPATVLHDLQVLIEKFKAIDLDLNFSKCELFLNSPITQPHDVIISEFNNLAPSIKILSKESLRLLGAPILNDGFEPYVSEQKQKFVESSGKLVAIKSHMAYQIIRFCLFVPQFTYVLRCCPLWECPNLLSHLDSILKDTVINIFNCQISDTSWAQATLPIRFGGLGLRSVSSVSLPAFLSSAHSIHPLFIKIITNSFGNIGIQSLAEAINAWKRVCPSDVPANPNIQKNWDEPLINLAQTDILNSSSTTDRARLLASAEPESGYWLQANPSSNTGTLLDNHTFNLSLSLRLGANISEPHRCHCGAAVDRQGHHGLSCRRSAGRQSRHASLNDVIRRALVSVNVPATLEPNGIARDDGKRPDGMTLVPWSRGRPLVWDATCVDTLAASHVTATTREAGAAAAQAETNKRRKYEALGSDYFFVPFGVETLGPWGPGAKLLFKELSQRLVEKTNDPRAGAYLGQRISLAIQRGNAASLLGTLPAASDLDLVFYI

SEQ ID NO: 22007 - protein, 951 aa, Lysandra bellargus
MSETASEPINFIRCQFCNRSFKGVKGLNIHIGKTHSHSSNISSTPTTTPSPSCNIPFWQKISNYKLSLPILKRIPKGARVQVAKQLSSVIREVISHPDSCQRWESLLTFPFHVLHAIQDKKKSLTSIIKNNCSNFNNLTINASLHLHSHDNSPPHLHRKQHNSIHKIESKISDGDLKGAANMLFSSDSIAQYNAHTLEALRDKHPSLPPPNIPPSSSPSVQPVEASIKDVKNAIMSFRTGSASGYDGLSPQHLKDLISASEDSSRALLEDLTTLINLMLSGKVHHDFTFILYGANLCALKKKDGGIRPIAVGCTYRRIASKICCKHITNKLRDVFQPVQLGFGSKGGCEAAVHALRTYIKSKTGQMIVKVDVKNAFNSVSRSALLKEVHNHIPEIYEYILQSYGANSTLLYNRDCLLSSTGCQQGDPLGPAIFSLAIHSTITSLQSEFNVWYLDDGTLGGDPATVLHDLQVLIEKFKAIDLDLNFSKCELFLNSPITQPHDVIISEFNNLAPSIKILSKESLRLLGAPILNDGFEPYVSEQKQKFVESSGKLVAIKSHMAYQIIRFCLFVPQFTYVLRCCPLWECPNLLSHLDSILKDTVINIFNCQISDTSWAQATLPIRFGGLGLRSVSSVSLPAFLSSAHSIHPLFIKIITNSFGNIGIQSLAEAINAWKRVCPSDVPANPNIQKNWDEPLINLTQTDILNSSSTTDRARLLASAEPESGYWLQANPSSNTGTLLDNHTFNLSLSLRLGANISEPHRCHCGAAVDRQGHHGLSCRRSAGRQSRHASLNDVIHRALVSVNVPATLEPNGIARDDGKRPDGMTLVPWSRGRPLVWDATCVDTLAASHVTATTREAGAAAAQAETNKRRKYEALGSDYFFVPFGVETLGPWGPGAKLLFKELSQRLVEKTNDPRAGAYLGQRISLAIQRGNAASLLGTLPAASDLDLVFYI

SEQ ID NO: 22008 - protein, 951 aa, Lysandra bellargus
MSETASEPINFIRCQFCNRSFKGVKGLNIHIGKTHSHSSNISSTPTTTPSPSCNIPFWQKISNYKLTLPILKRIPKGARVQVAKQLSSVIREVISHPDSCQRWESLLTFPFHVLHAIQDKKKSLTSIIKNNCSNFNNLTINASLHLHSHDNSPPHLHRKQHNSIHKIESKISDGDLKGAANMLFSSDSIAQYNAHTLEALRDKHPSLPPPNIPPSSSPSVQPVEASIKDVKNAIMSFRTGSASGYDGLSPQHLKDLISASEDSSRALLEDLTTLINLMLSGKVHHDFTFILYGANLCALKKKDGGIRPIAVGCTYRRIASKICCKHITNKLRDVFQPVQLGFRSKGVCEAAVHALRTYIKSKTGQVIVKVDVKNAFNSVSRSALLKEVHNHIPEIYEYILQSYGANSTLLYNRDCLLSSTGCQQGDPLGPAIFSLAIHSTITSLQSEFNVWYLDDGTLGGDPATVLHDLQVLIEKFKAIDLDLNFSKCELFLNSPITQPHDAIISEFNNLAPSIKILSKESLRFLGAPILNDGFEPYVSEQKQKFVESSGKLVAIKSHMAYQIIRFCLFVPQFTYVLRCCPLWECPNLLSHLDSILKDTLINIFNCQISDTSWAQATLPIRFGGLGLRSVSSVSLPAFLSSAHSIHPLFIKIITNSFGNIGIQSLAEAINAWKRVCPSDVPANPNIQKNWDEPLINLAQTDILNSSSTTDRARLLASAEPESGYWLQANPSSNTGTLLDNHTFNLSLSLRLGANISEPHRCHCGAAVDRQGHHGLSCRRSAGRQSRHASLNDVIRRALVSVNVPATLEPNGIARDDGKRPDGMTLVPWSRGRPLVWDATCVDTLAASHVTATTREAGAAAAQAETNKRRKYEALGSDYFFVPFGVETLGPWGPGAKLLFKELSQRLVEKTNDPRAGAYLGQRISLAIQRGNAASLLGTLPTASDLDLVFYI

SEQ ID NO: 22009 - protein, 951 aa, Lysandra bellargus
MSETASEPINFIRCQFCNRSFKGVKGLNIHIGKTHNHSSNISSTPTTTPSPSCNIPFWQKISNYKLSLPILKRIPKGARVQVAKQLSSVIREVISHPDSCQRWESLLTFPFHVLHAIQDKKKSLTSIIKNNCSNFNNLTINASLHLHSHDNSPPHLHRKQHNSIHKIESKISDGDLKGAANMLFSSDSIAQYNAHTLEALRDKHPSLPPPNIPPSSSPSVQPVEASIKDVKNAIMSFRTGSASGYDGLSPQHLKDLISASEDSSRALLEDLTTLINLMLSGKVHHDFTFILYGANLCALKKKDGGIRPIAVGCTYRRIASKICCKHITNKLRDVFQPVQLGFGSKGGCEAAVHALRTYIKSKTGQVIVKVDVKNAFNSVSRSALLKEVHNHIPEIYEYILQSYGANSTLLYNRDCLLSSTGCQQGDPLGPAIFSLAIHSTITSLQSEFNVWYLDDGTLGGDPATVLHDLQVLIEKFKAIDLDLNFSKCELFLNSPITQPHDVIISEFNNLAPSIKILSKESLRLLGAPILNDGFEPYVSEQKQKFVESSGKLVAIKSHMAYQIIRFCLFVPQFTYVLRCCPLWECPNLLSHLDSILKDTVINIFNCQISDTSWAQATLPIRFGGLGLRSVSSVSLPAFLSSAHSIHPLFIKIITNSFGNIGIQSLAEAINAWKRVCPSDVPANPNIQKNWDEPLINLAQTDILNSSSTTDRARLLASAEPESGYWLQANPSSNTGTLLDNHTFNLSLSLRLGANISEPHRCHCGAAVDRQGHHGLSCRRSAGRQSRHASLNDVIRRALVSVNVPATLEPNGIAHDDGKRPDGMTLVPWSRGRPLVWDATCVDTLAASHVTATTREAGAAAAQAETNKRRKYEALGSDYFFVPFGVETLGPWGPGAKLLFKELSQRLVEKTNDPRAGAYLGQRISLAIQRGNAASLLGTLPAASDLDLVFYI

SEQ ID NO: 22010 - protein, 951 aa, Lysandra bellargus
MSETASEPINFIRCQFCNRSFKGVKGLNIHIGKTHSHSSNISSTPTTTPSPSCNIPFWQKISNYKLTLPILKRIPKGARVQVAKQLSSVIRDVISHPDSCQRWESLLTFPFHVLHAIQDKKKSLTSIIKNNCSKFNNLTINASLHLHSHDNSPPHLHRKQHNSIHKIESKISDGDLKGAANMLFSSDSIAQYNAHTLEALRDKHPSLPPPNIPPSSSPSVQPVEASIKDVKNAIMSFRTGSASGYDGLSPQHLKDLISASEDSSRALLEDLTTLINLMLSGKVHHDFTFILYGANLCALKKKDGGIRPIAVGCTYRRIASKICCKHITNKLRDVFQPVQLGFGSKGGCEAAVHALRTYIKSKTGQVIVKVDVKNAFNSVSRSALLKEVHNHIPEIYEYILQSYGANSTLLYNRDCLLSSTGCQQGDPLGPAIFSLAIHSTITSLQSEFNVWYLDDGTLGGDPATVLHDLQVLIEKFKAIDLDLNFSKCELFLNSPITQPHDAIISEFNNLAPSIKILSKESLRLLGAPILNDGFEPYVSEQKQKFVESSGKLVAIKSHMAYQIIRFCLFVPQFTYVLRCCPLWECPNLLSHLDSILKDTVINIFNCQISDTSWAQATLPIRFGGLGLRSVSSVSLPAFLSSAHSIHPLFIKIITNSFGNIGIQSLAEAINAWKRVCPSDVPANPNIQKNWDEPLINLAQTDILNSSSTTDRARLLASAEPESGYWLQANPSSNTGTLLDNHTFNLSLSLRLGANISEPHRCHCGAAVDRQGHHGLSCRRSAGRQSRHASLNDVIRRALVSVNVPATLEPNGIARDDGKRPDGMTLVPWSRGRPLVWDATCVDTLAASHVTATTREAGAAAAQAETNKRRKYEALGSDYFFVPFGVETLGPWGPGAKLLFKELSQRLVEKTNDPRAGAYLGQRISLAIQRGNAASLLGTLPTASDLDLVFYI

SEQ ID NO: 22011 - protein, 951 aa, Lysandra bellargus
MSETASEPINFIRCQFCNRSFKGVKGLNIHIGKTHSHSSNISSTPTTTPSPSCNIPFWQKISNYKLSLPILKRIPKGARVQVAKQLSSVIREVISHPDSCQRWESLLTFPFHVLHAIQDKKKSLTSIIKNNCSNFNNLTINASLHLHSHDNSPPHLHRKQHNSIHKIESKISDGDLKGAANMFFSSDSIAQYNAHTLEALRDKHPSLPPPNIPPSSSPSVQPVEASIKDVKNAIMSFRTGSASGYDGLSPQHLKDLISASEDSSRALLEDLTTLINLMLSGKVHHDFTFILYGANLCALKKKDGGIRPIAVGCTYRRIASKICCKHITNKLRDVFQPVQLGFGSKGGCEAAVHALRTYIKSKTGQVIVKVDVKNAFNSVSRSALLKEVHNHIPEIYEYILQSYGANSTLLYNRDCLLSSTGCQQGDPLGPAIFSLAIHSTITSLQSEFNVWYLDDGTLGGDPATVLHDLQVLIEKFKAIDLDLNFSKCELFLNSPITQPHDVIISEFNNLAPSIKILSKESLRLLGAPILNDGFEPYVSEQKQKFVESSGKLVAIKSHMAYQIIRFCLFVPQFTYVLRCCPLWECPNLLSHLDSILKDTVINIFNCQISDTSWAQATLPIRFGGLGLRSVSSVSLPAFLSSAHSIHPLFIKITTNSFGNIGIQSLAEAINAWKRVCPSDVPANPNIQKNWDEPLINLAQTDILNSSSTTDRARLLASAEPESGYWLQANPSSNTGTLLDNHTFNLSLSLRLGANISEPHRCHCGAAVDRQGHHGLSCRRSAGRQSRHASLNDVIRRALVSVNVPATLEPNGIARDDGKRPDGMTLVPWSRGRPLVWDATCVDTLAASHVTATTREAGAAAAQAETNKRRKYEALGSDYFFVPFGVETLGPWGPGAKLLFKELSQRLVEKTNDPRAGAYLGQRISLAIQRGNAASLLGTLPAASDLDLVFYI

SEQ ID NO: 22012 - protein, 951 aa, Lysandra bellargus
MSETASEPINFIRCQFCNRSFKGVKGLNIHIGKTHSHSSNISSTPTTTPSPSCNIPFWQKISNYKLSLPILKRIPKGARVQVAKQLSSVIREVISHPDSCQRWESLLTFPFHVLHAIQDKKKSLTSIIKNNCSNFNNLTINASLHLHSHDNSPPHLHRKQHNSIHKIESKISDGDLKGAANMLFSSDSIAQYNAHTLEALRDKHPSLPPPNIPPSSSPSVQPVEASIKDVKNAIMSFRTGSASGYDGLSPQHLKDLISASEDSSRALLEDLTTLINLMLSGKVHHDFTFILYGANLCALKKKDGGIRPIAVGCTYRRIASKICCKHITNKLRDVFQPVQLGFGSKGGCEAAVHALRTYIKSKTGQVIVKVDVKNAFNSVSRSALLKEVHNHIPEIYEYILQSYGANSTLLYNRDCLLSSTGCQQGDPLGPAIFSLAIHSTITSLQSEFNVWYLDDGTLGGDPATVLHDLQVLIEKFKAIDLDLNFSKCELFLNSPITQPHDVIISEFNNLAPSIKILSKESLRLLGAPILNDGFEPYVSEQKQKFVESSGKLVAIKSHMAYQIIRFCLFVPQFTYVLRCCPLWECPNLLSHLDSILKDTVINIFNCQISDTSWAQATLPIRFGGLGLRSVSSVSLPAFLSSAHSIHPLFIKIITNSFGNIGIQSLAEAINAWKRVCPSDVPANPNIQKNWDEPLINLAQTDILNSSSTTDRARLLASAEPESGYWLQANPSSNTGTLLDNHTFNLSLSLRLGANISEPHRCHCGAAVDRQGHHGLSCRRSAGRQSRHASLNDVIRRALVSVNVPATLEPNGIARDDGKRPDGMTLVPWSRGRPLVWDATCVDTLAASHVTATTREAGAAAAQAETNKRRKYEALGSDYFFVPFGVETLGPWGPGAKLLFKELSQRLVEKTNDPRAGAYLGQRISLAIQRGNAASLLGTLPAASDLDLVFYI

SEQ ID NO: 22013 - protein, 953 aa, Lysandra coridon
MSETASEPINFIRCQFCNRSFKGVKGLNIHIGKTHSHSSNISSTPTTTPSPSASCNIPFWQKISNYKLSLPILKRIPKGARVQVAKQLSSVIREVISHPDSCQRWESLLTFPFHVLHAIQDKKKSLTSIIKNNCSNFNNLTINASLHLHSHDNSPPHLLRKQHNSIHKIESKISDGDLKGAANMLFSSDSIAQYNAHTLEALRDKHPTLPPPNIPPSSSPSVQPVEASIKDVKNAIMSFRTGSASGYDGLSPQHLKDLISASEDSSRALLEDLTTLINLMLSGKVHHDFTNILYGANLCALKKKDGGIRPIAVGCTYRRIASKICCKHITNKLRDVFQPVQLGFGSKGGCEAAVHALRTYIKSKTGQVIVKVDVKNAFNSVSRSALLKEVHNHIPEIYEYILQSYGANSTLLYNRDCLLSSTGCQQGDPLGPAIFSLAIHSTITSLQSEFNVWYLDDGTLGGDPATVLHDLQVLIEKFKAIDLDLNFSKCELFLNSPITQPHDVIISEFNNLAPSIKILSNESLRLLGAPILNDGFEPYVSEQKQKFVESSGKLVAIKSHMAYQIIRFCLFVPQFTYVLRCCPLWECPNLLSHLDSILKDTVINIFNCQISDTSWAQATLPIRFGGLGLRSVSSVSLPAFLSSAHSIHPLFIKIITNSFGNIGIQSLAEAINAWKRVCPSDVPANPNIQKNWDEPLINLAQTDILNSSSTTDCARLLASAEPESGYWLQANPSSNTGTLLDNHTFNLSLSLRLGANISEPHRCHCGAAVDRQGHHGLSCRRSAGRQSRHASLNDVIRRALVSVNVPATLEPNGIARDDGKRPDGMTLVPWSRGRPLVWDATCVDTLAASHVAATTREAGAAAAQAETNKRRKYEALGSDYFFVPFGVETLGPWGPGAKLLFKELSQRLVEKTNDPRAGAYLGQRISLAIQRGNAASLLGTLPAASDLDLVFYI

SEQ ID NO: 22014 - protein, 770 aa, Lysandra bellargus
MLFSSDSIAQYNAHTLEALRDKHPSLPPPNIPPSSSPSVQPVEASIKDVKNAIMSFRTGSASGYDGLSPQHLKDLISASEDSSRALLEGLTTLINLMLSGKVHHDFTFILYGANLCALKKKDGGIRPIAVGCTYRRIASKICCKHITNKLRDVFQPVQLGFGSKGGCEAAVHALRTYIKSKTGQVIVKVDVKNAFNSVSRSALLKEVHNHIPEIYEYILQSYGANSTLLYNRDCLLSSTGCQQGDPLGPAIFSLAIHSTITSLQSEFNVWYLDDGTLGGDPATVLHDLQVLIEKFKAIDLDLNFSKCELFLNSPITQPHDAIISEFNNLAPSIKILSKESLRLLGAPILNDGFEPYVSEQKQKFVESSGKLVAIKSHMAYQIIRFCLFVPQFTYVLRCCPLWECPNLLSHLDSILKDTVINIFNCQISDTSWAQATLPIRFGGLGLRSVSSVSLPAFLSSAHSIHPLFIKIITNSFGNIGIQSLAEAINAWKRVCPSDVPANPNIQKNWDEPLINLAQTDILNSSSTTDRARLLASAEPESGYWLQANPSSNTGTLLDNHTFNLSLSLRLGANISEPHRCHCGAAVDRQGHHGLSCRRSAGRQSRHASLNDVIRRALVSVNVPATLEPNGIARDDGKRPDGMTLVPWSRGRPLVWDATCVDTLAASHVTATTREAGAAAAQAETNKRRKYKALGSDYFFVPFGVETLGPWGPGAKLLFKELSQRLVEKTNDPRAGAYLGQRISLAIQRGNAASLLGTLPTASDLDLVFYI

SEQ ID NO: 22015 - protein, 951 aa, Lysandra bellargus
MSETASEPINFIRCQFCNRSFKGVKGLNIHIGKTHSHSSNISSTPTTTPSPSCNIPFWQKISNYKLSLPILKRIPKGARVQVAKQLSSVIREVISHPDSCQRWESLLTFPFHVLHAIQDKKKSLTSIIKNNCSNFNNLTINASLHLHSHDNSPPHLHRKQHNSIHKIESKISDGDLKGAANMLFSSDSIAQYNAHTLEALRDKHPSLPPPNIPPSSSPSVQPVEASIKDVKNAIMSFRTGSASGYDGLSPQHLKDLISASEDSSRALLEDLTTLINLMLSGKVHHDFTFILYGANLCALKKKDGGIRPIAVGCTYRRIASKICCKHITNKLRDVFQPVQLGFGSKGGCEAAVHALRTYIKSKTGQVIVKVDVKNAFNSVSRSALLKEVHNHIPEIYEYILQSYGANSTLLYNRDCLLSSTGCQQGDPLGPAIFSLAIHSTITSLQSEFNVWYLDDGTLGGDPATVLHDLQVLIEKFKAIDLDLNFSKCELFLNSPITQPHDVIISEFNSLAPSIKILSKESLRLLGAPILNDGFEPYVSEQKQKFVESSGKLVAIKSHMAYQIIRFCLFVPQFTYVLRCCPLWECPNLLSHLDSILKDTVINIFNCQISDTSWAQATLPIRFGGLGLRSVSSVSLPAFLSSAHSINPLFIKIITNSFGNIGIQSLAEAINAWKRVCPSDVPANPNIQKNWDEPLINLAQTDILNSSSTTDRARLLASAEPESGYWLQANPSSNTGTLLDNHTFNLSLSLRLGANISEPHRCHCGAAVDRQGHHGLSCRRSAGRQSRHASLNDVIRRALVSVNVPATLEPNGIARDDGKRPDGMTLVAWSRGRPLVWDATCVDTLAASHVTATTREAGAAAAQAETNKRRKYEALGSDYFFVPFGVETLGPWGPGAKLLFKELSQRLVEKTNDPRAGAYLGQRISLAIQRGNAASLLGTLPAASDLDLVFYI

SEQ ID NO: 22016 - protein, 770 aa, Lysandra bellargus
MLFSSDSIAQYNAHTLEALRDKHPSLPPPNIPPSSSPSVQPVEASIKDVKNAIMSFRTGSASGYDGLSPQHLKDLISASEDSSRALLEDLTTLINLMLSGKVHHDFTFILYGANLCALKKKDGGIRPIAVGCTYRRIASKICCKHITNKLRDVFQPVQLGFGSKGGCEAAVHALRTYIKSKTGQVIVKVDVKNAFNSVSRSALLKEVHNHIPEIYEYILQSYGANSTLLYNRDCLLSSTGCQQGDPLGPAIFSLAIHSTITSLQSEFNVWYLDDGTLGGDPATVLHDLQVLIEKFKAIDLDLNFSKCELFLNSPITQPHDVIISEFNNLAPSIKILSKESLRLLGAPILNDGFEPYVSEQKQKFVESSGKLVAIKSHMAYQIIRFCLFVPQFTYVLRCCPLWECPNLLSHLDSILKDTVINIFNCQISDTSWAQATLPIRFGGLGLRSVSSVSLPAFLSSAHSIHPLFIKIITNSFGNIGIQSLAEAINAWKRVCPSDVPANPNIQKNWDEPLINLAQTDILNSSSTTDRARLLASAEPESGYWLQANPSSNTGTLLDNHTFNLSLSLRLGANISEPHRCHCGAAVDRQGHHGLSCRRSAGRQSRHASLNNVIRRALVSVNVPATLEPNGIARDDGKRPDGMTLVAWSRGRPLVWNATCVDTLAASHVTATTREAGAAAAQAETNKRRKYEALGSDYFFVPFGVETLGPWGPGAKLLFKELSQRLVEKTNDPRAGAYLGQRISLAIQRGNAASLLGTLPAASDLDLVFYI

SEQ ID NO: 22017 - protein, 951 aa, Lysandra bellargus
MSETASEPINFIRCQFCNRSFKGVKGLNIHIGKTHSHSSNISSTPTTTPSPSCNIPFWQKISNYKLSLPILKRIPKGARVQVAKQLSSVIREVISHPDSCQRWESLLTFPFHVLHAIQDKKKSLTSIIKNNCSNFNNLTINASLHLHSHDNSPPHLHRKQHNSIHKIESKISDGDLKGAANMLFSSDSIAQYNAHTLEALRDKHPSLPPPNIPPSSSPSVQPVEASIKDVKNAIMSFRTGSASGYDGLSPQHLKDLISASEDSSRALLEDLTTLINLMLSGKVHHDFTFILYGANLCALKKKDGGIRPIAVGCTYRRIASKICCKHITNKLRDVFQPVQLGFGSKGGCEAAVHALRTYIKSKTGQVIVKVDVKNAFNSVSRSALLKEVHNHIPEIYEYILQSYGANSTLLYNRDCLLSSTGCQQGDPLGPAIFSLAIHSTITSLQSEFNVWYLDDGTLGGDPATVLHDLQVLIEKFKAIDLDLNFSKCELFLNSPITQPHDVIISEFNNLAPSIKILSKESLRLLGAPILNDGFEPYVSEQKQKFVESSGKLVAIKSHMAYQIIRFCLFVPQFTYVLRCCPLWECPNLLSHLDSILKDTVINIFNCQISDTSWAQATLPIRFGGLGLRSVSSVSLPAFLSSAHSIHPLFIKIITNSFGNIGIQSLAEAINAWKRVCPSDVPANPNIQKNWDEPLINLAQTDILNSSSTTDRARLLASAEPESGYWLQANPSSNTGTLLDNHTFNLSLSLRLGANIGEPHRCHCGAAVDRQGHHGLSCRRSAGRQSRHASLNDVIRRALVSVNVPATLEPNGIARDDGKRPDGMTLVPWSRGRPLVWDATCVDTLAASHVTATTREAGAAAAQAETNKRRKYESLGSDYFFVPFGVETLGPWGPGAKLLFKELSQRLVEKTNDPRAGAYLGQRISLAIQRGNAASLLGTLPAASDLDLVFYI

SEQ ID NO: 22018 - protein, 744 aa, Lysandra coridon
MLFSSDSIAQYNAHTLEALRDKHPTLPPPNIPPSSSPSVQPVEASIKDVKNAIMYFRTGSASDYDGLSPQHLKDLISASEDSSRALLEDLTTLINLMLSGKVHHDFTNILYGANLCALKKKDGGIRPIAVGCTYRRIASKICCKHITNKLRDVFQPVQLGFGSKGGCEAAVHALRTYIKSKTGQVIVKVDVKNAFNSVSRSALLKEVHNHIPEIYEYILQSYGANSTLLYNRDCLLSSTGCQQGDPLGPAIFSLAIHSTITSLQSEFNVWYLDDGTLGGDPATVLHDLQVLIEKFKAIDLDLNFSKCELFLNSPITQPHDVIISEFNNLAPSIKILSKESLRLLGAPILNDGFEPYISEEKQKFVESSGKLVAIKSHMAYQIIRFCLFVPQFTYILRCCPLWECPNLLSHLDSILKDTVINIFNCQISDTSWAQATLPIRFGGLGLRSVSSVSLPAFLSSAHSIHPLFIKIITNSFGNIGIQSLAEAINAWKRVCPSDVPANPNIQKNWDEPLINLAQTDILNSSSTTDRARLLASAEPESGYWLQANPSSNTGTLLDNHTFNLSLSLRLGANISEPHRCHCGAAVDRQGHHGLSCRRSAGRQSRHASLNDVIRRALVSVNVPATLEPNGIARDDGKRPDGMTLVPWSRGRPLVWDATCVDTLAASHVTATTREAGAAAAQAETNKIRKYEALGSDYFFVPFGVETLGPWGPGAKLLLCLCCMSSVEYGTHRDIDYGAAAGGHK

SEQ ID NO: 22019 - protein, 951 aa, Lysandra bellargus
MSETASEPINFIRCQFCNRSFKGVKGLNIHIGKTHSHSSNISSTPTTTPSPSCNIPFWQKISNYKLSLPILKRIPKGARVQVAKQLSSVIREVISHPDSCQRWESLLTFPFHVLHAIQDKKKSLTSIIKNNCSNFNNLTINASLHLHSHDNSPPHLHRKQHNSIHKIESKISDGDLKGAANMLFSSDSIAQYNAHTLEALRDKHPSLPPPNIPPSSSPSVQPVEASIKDVKNAIMSFRTGSASGYDGLSPQHLKDLISASEDSSRALLEDLTTLINLMLSGKVHHDFTFILYGANLCALKKKDGGIRPIAVGCTYRRIASKICCKHITNKLRDVFQPVQLGFGSKGGCEAAVHALRTYIKSKTGQVIVKVDVKNAFNSVSRSALLKEVHNHIPEIYEYILQSYGANSTLLYNRDCLLSSTGCQQGDPLGPAIFSLAIHSTITSLQSEFNVWYLDDGTLGGDPATVLHDLQVLIEKFKAIDLDLNFSKCELFLNSPITQPHDVIISEFNNLAPSIKILSKESLRLLGAPILNDGFEPYVSEQKQKFVESSGKLVAIKSHMAYQIIRFCLFVPQFTYVLRCCPLWECPNLLSHLDSILKDTVINIFNCQISDTSWAQATLPIRFGGLGLRSVSGVSLPAFLSSAHSIHPLFIKIITNSFGNIGIQSLAEAINAWKRVCPSDVPANPNIQKNWDEPLINLAQTDILNSSSTTDRARLLASAEPESGYWLQANPSSNTGTLLDNHTFNLSLSLRLGANISEPHRCHCGAAVDRQGHHGLSCRRSAGRQSRHASLNDVIRRALVSVNVPATLEPNGIARDDGKRPDGMTLVPWSRGRPLVWDATCVDTLAASHVTATTREAGAAAAQAETNKRRKYEALGSDYFFVPFGVETLGPWGPGAKLLFKELSQRLVEKTNDPRAGAYLGQRISLAIQRGNAASLLGTLPAASDLDLVFYI

SEQ ID NO: 22020 - protein, 952 aa, Lysandra bellargus
MSETASEPINFIRCQFRNRSFKGVKGLNIHIGKTHSHSSNISSTPTTTPSPSCNIPFWQKISNYKLSLPILKRIPKGARVQVAKQLSSVIREVISHPNSCQRWESLLTFSFHVHVHAIQDKKKSLTSIIKNNCSNFNNLTINASLHLHSHDNSPPHLHRKQHNSIHKFESKISDGDLKSAANMLFSSDSIAQYNAHTLEALRDKHPSLPPPNITPSSSPSVQPVEASIKDVKNAIMSFRTGSASGYDGLSPQHLKDLISASEDSSRALLEDLTTLINLMLSGKVHHDFTFILYGANLCALKKKDGGIRPIAVGCTYRRIASKICCKHITNKLRDVFQPVQLGFGSKGGCEAAVHALRTYIKSKTGQVIVKVDVKNAFNSVSRSALLKEVHNHIPEIYEYILQSYGANSTLLYNRDCLLSSTGCQQGDPLGPAIFSLAIHSTITSLQSEFNVWYLDDGTLGGDPATVLHDLQVLIEKFKAIDLVLNFSKCELFLNSPITQPHDVIISEFNNLAPSIKILSKESLRLLGAPILNDGFEPYVSEQKQKFVESSGKLVAIKSHMAYQIIRFCLFVPQFTYVLRCCPLWECPNLLSHLDSILKDTVINIFNCQISDTSWAQATLPIRFGGLGLRSVSSVSLPAFLSSAHSIHPLFIKIITNSFGNIGIQSLAEAINAWKRVCPSDVPANPNIQKNWDEPLINLAQTDILNSSSTTDRARLLASAEPESAYWLQANPSSNTGTLLDNHTFNLSLSLRLGANISEPHRCHCGAAVDRQGHHGLSCRRSAGRQSRHASLNDVIRRALVSVNVPATLEPNGIARDDGKRPDGMTLVPWSRGRPLVWDATCVDTLAASHVTATTREAGAAAAQAETNKRRKYEALGSDYFFVPFGVETLGPWGPGAKLLFKELSQRLVEKTNDPRAGAYLGQRISLAIQRGNAASLLGTLPAASDLDLVFYI

SEQ ID NO: 22021 - protein, 953 aa, Lysandra coridon
MSETASEPINLIRCQFCNRSFKGVKGLNIHIGKTHSHSSNISSTPTTTPSPSASCNIPFWQKISNYKLSLPILKRIPKGARVQVAKQLSSVIREVISHPDSCQRWESLLTFPFHVLHAIQDKKKSLTSIIKNNCSNFNNLTINASLHLHSHDNSPPHLLRKQHNSIHKIESKISDGDLKGAANMLFSSDSIAQYNAHTLEALRDKHPTLPPPNIPPSSSPSVQPVEASIKDVKNAIMSFRTGSASGYDGLSPQHLKDLISASEDSSRALLEDLTTLINLMLSGKVHHDFTNILYGANLCALKKKDGGIRPIAVGCTYRRIASKICCKHITNKLRDVFQPVQLGFGSKGGCEAAVHALRTYIKSKTGQVIVKVVVKNAFNSVSRSALLKEVHNHIPEIYEYILQSYGANSTLLYNRDCLLSSSGCQQGDPLGPAIFSLAIHSTITSLQSEFNVWYLDDGTLGGDPATVLHDLQVLIEKFKAIDLDLNFSKCELFLNSPITQPHDVIISEFNNLVPSIKILSKESLRLLGAPILNDGFEPYVSEQKQKFVESSGKLVAIKSHMAYQIIRFCLFVPQFTYVLRCCPLWECHNLLSHLDSILKDTVINIFNCQISDTSWAQATLPIRFGGLGLRSVSSVSLPAFLSSAHSIHPLFIKIITNSFGNIGIQSLAEAINAWKRVCPSDVPANPNIQKNWDEPLINLAQTDILNSSSTIDRARLLASAEPESGYWLQANPSSNTGTLLDNHTFNLSLSLRLGANISEPHRCHCGAAVDRQGHHGLSCRRSAGRQSRHASLNDVIRRALVSVNVPATLEPNGIARDDGKRPDGMTLVPWSRGRPLVWDATCVDTLAASHVTATTREAGAAAAQAETNKRRKYEALGSDYFFVPFGVETLGPWGPGAKLLFKELSQRLVEKTNDPRAGAYLGQRISLAIQRGNAASLLGTLPAASDLDLVFYI

SEQ ID NO: 22022 - protein, 951 aa, Lysandra bellargus
MSETASEPINFIRCQFCNRSFKGVKGLNIHIGKTHSHSSNISSTPTTTPSPSCNIPFWQKISNYKLSLPILKRIPKGARVQVAKQLSSVIREVISHPDSCQRWESLLTFPFHVLHAIQDKKKSLTSIIKNNCSNFNNLTINASLHLHSHDNSPPHLHRKQHNSIHKIESKISDGDLKGAANMLFSSDSIAQYNAHTLEALRDKHPSLPPPNIPPSSSPSVQPVEASIKDVKNAIMSFRTGSASGYDGLSPQHLKDLISASEDSSRALLEDLTTLINLMLSGKVHHDFTFILYGANLCALKKKDGGIRPIAVGCTYRRIASKICCKHITNKLRDVFQPVQLGFGSKGGCEAAVHALRTYIKSKTGQVIVKVDVKNAFNSVSRSALLKEVHNHIPEIYEYILQSYGANSTLLYNRDCLLSSTGCQQGDPLGPAIFSLAIHSTITSLQSEFNVWYLDDGTLGGDPATVLHDLQVLIEKFKAIDLDLNFSKCELFLNSPITQPHDVIISEFNNLAPSIKILSKESLRLLGAPILNDGFEPYVSEQKQKFVESSGKLVAIKSHMAYQIIRFCLFVPQFTYVLRCCPLWECPNLLSHLDSILKDTVINIFNCQISDTSWAQATLPIRFGGLGLRSVSSVSLPAFLSSAHSIHPLFIKIITNSFGNIGIQSLAEAINAWKRVCPSDVPANPNIQKNWDEPLINLAQTDILNSSSTTDRARLLASAEPESGYWLQANPSSNTGTLLDNHTFNLSLSLRLGANISEPHRCHCGAAVDRQGHHGLSCRRSAGRQSRHASLNDVIRRALVSVNVPATLEPNGIARDDGKRPDGMTLVPWSRGRPLVWDATCVDTLAASHVTATTREAGAAAAQAETNKRRKYEALGSDYFFVPFGVETLGPWGPGAKLLFKELSQRLVEKTNDLRAGAYLGQRISLAIQRGNAASLLGTLPAASDLDLVFYI

SEQ ID NO: 22023 - protein, 951 aa, Lysandra bellargus
MSETASEPINFIRCQFCNRSFKGVKGLNIHIGKTHSHSSNISSTPTTTPSPSCNIPFWQKISNYKLSLPILKRIPKGARVQVAKQLSSVIREVISHPDSCQRWESLLTFPFHVLHAIQDKKKSLTSIIKNNCSNFNNLTINASLHLHSHDNSPPHLHRKQHNSIHKIESKISDGDLKGAANMLFSSDSIAQYNAHTLEALRDKHPSLPPPNIPPSSSPSVQPVEASIKDVKNAIMSFRTGSASGYDGLSPQHLKDLISASEDSSRALLEDLTTLINLMLSGKVHHDFTFILYGANLCALKKKDGGIRPIAVGCTYRRIASKICCKHITNKLRDVFQPVQLGFGSKGGCEAAVHALRTYIKSKTGQVIVKVDVKNAFNSVSRSALLKEVHNHIPEIYEYILQSYGANSTLLYNRDCLLSSTGCQQGDPLGPAIFSLAIHSTITSLQSEFNVWYLDDGTLGGDPATVLHDLQVLIEKFKAIDLDLNFSKCELFLNSPITQPHDVIISEFNNLAPSIKILSKESLRLLGAPILNDGFEPYVSEQKQKFVESSGKLVAIKSHMAYQIIRFCLFVPQFTYVLRCCPLWECPNLLSHLDSILKDTVINIFNCQISDTSWAQATLPIRFGGLGLRSVSSVSLPAFLSSAHSIHPLFIKIITNSFGNIGIQSLAEAINAWKRVCPSDVPANPNIQKNWDEPLINLAQTDILNSSSTTDRARLLASAEPESGYWLQANPSSNTGTLLDNHTFNLSLSLRLGANISEPHRCHCGAAVDRQGHHGLSCRRSAGRQSRHASLNDVIRRALVSVNVPATLEPNGIARDDGKRPDGMTLVPWSRGRPLVWDATCVDTLAASHVTATTREAGAAAAQAETNKRRKYESLGSDYFFVPFGVETLGPWGPGAKLLFKELSQRLVEKTNDPRAGAYLGQRISLAIQRGNAASLLGTLPAASDLDLVFYI

SEQ ID NO: 22024 - protein, 951 aa, Aricia agestis
MSETASEPINFIRCQFCNRSFKGVRGLNIHIGKTHSHSPNVSNAPTTPPSPSCDIPFWQKISNYKWSLPILKRIPKGARIQVAKQLSSIIREVISHPDSCQRWESLLTFPFLVLHAVQDKKKSLTSIIKNNCSNFNNHTINASLPIHSHDNPPPHLLRKQHNSIQKIESKISDGDLKGAANMLFSSDSIAQYNTHTLEALRDKHPTLPPQNIPPSSSPSVQPVEASIKDVKNAIMSFRTGSASGYDGLSPQHLKDLISASEDSSRALLEDLTALINLMLSGKVHHDFTSILYGANLCALKKKDGGIRPIAVGCTYRRIASKICCKHITKKLRDTFQPVQLGFGSKGGCEAAVHALRTYIKSKTGQVIVKVDVKNAFNSVSRTALLKEVHNHIPEIYEYSLQSYGANSTLLYNSDCLLSSTGCQQGDPLGPAIFSLAIHSTITSLQSEFNVWYLDDGTLGGDPATVLHDLQLLIEKFKSIDLDLNFSKCELFLNSPIAQPHDVIMSEFNNLAPSIKILSKESLRLLGAPIFNDGFEPYVSEQKQKFVESSGKLVAIKSHMAYQIIRFCLFVPQFTYVLRCCPLWEYPNLLSHLDTILKDTVMNIFNCQISDTSWAQATLPIRFGGLGLRSVSSVSLPAFLSSAHSIHPLFIQIITNSFGNIGIVSLTEAINAWKRVCPSDVPVNPNIQKNWDEPLIKLAQSEILSSSSTTDRARLLSSAEPESGYWLQAYPSSNTGTLLDNHTFNLSLSLRLGANISEPHRCHCGAAVDRQGHHGLSCRRSAGRQSRHASLNDVIRRALASVNVPATLEPNGIARDDGKRPDGMTLVPWSRGRPLVWDATCVDTLAASHLTATTREAGAAAAQAETNKRRKYEALGNDYFFVPFGVETLGPWGPGAKQMFRELSQRLVEKTNDPRAGAYLGQRISLAIQRGNAASLLGTLPAASDLDLVFYI

SEQ ID NO: 22025 - protein, 951 aa, Lysandra bellargus
MSETASEPINFIRCQFCNRSFKGVKGLNIHIGKTHSHSSNISSTPTTTPSPSCNIPFWQKISNYKLSLPILKRIPKGARVQVAKQLSSVIREVISHPDSCQRWESLLTFPFHVLHAIQDKKKSLTSIIKNNCSNFNNLTINASLHLHSHDNSPPHLHRKQHNSIHKIESKISDGDLKGAANMLFSSDSIAQYNAHTLEALRDKHPSLPPPNIPPSSSPSVQPVEASIKDVKNAIMSFRTGSASGYDGLSPQHLKDLISASEDSSRALLEDLTTLINLMLSGKVHHDFTFILYGANLCALKKKDGGIRPIAVGCTYRRIASKICCKHITNKLRDVFQPVQLGFGSKGGCEAAVHALRTYIKSKTGQVIVKVDVKNAFNSVSRSALLKEVHNHIPEIYEYILQSYGANSTLLYNRDCLLSSTGCQQGDPLGPAIFSLAIHSTITSLQSEFNVWYLDDGTLGGDPATVLHDLQVLIEKFKAIDLDLNFSKCELFLNSPITQPHDVIISEFNNLAPSIKILSKESLRLLGAPILNDGFEPYVSEQKQKFVESSGKLVAIKSHMAYQIIRFCLFVPQFTYVLRCCPLWECPNLLSHLDSILKDTVINIFNCQISDTSWAQATLPIRFGGLGLRSVSSVSLPAFLSSAHSIHPLFIKIITNSFGNIGIQSLAEAINAWKRVCPSDVPANPNIQKNWDEPLINLAQTDILNSSSTTDRARLLASAEPESGYWLQANPSSNTGKLLDNHTFNLSLSLRLGANISEPHRCHCGAAVDRQGHHGLSCRRSAGRQSRHASLNDVIRRALVSVNVPATLEPNGIARDDGKRPDGMTLVPWSRGRPLVWDATCVDTLAASHVTATTREAGAAAAQAETNKRRKYEALGSDYFFVPFGVETLGPWGPGAKLLFKELSQRLVEKTNDPRAGAYLGQRISLAIQRGNAASLLGTLPAASDLDLVFYI

SEQ ID NO: 22026 - protein, 951 aa, Lysandra coridon
MSETASEPINFIRCQFCNRSFKGVKGLNIHIGKTHSHSSNISSTPTTTPSPSCNIPFWQKISNYKLTLPILKRIPKGARVQVAKHLSSVIRDVISHPDSCQRWESLLTFPFHVLHAIQDKKKSLTSIIKNNCSNFNNLTINASLHLHSHDNSPPHLHRKQHNSIHKIESKISDGDLKGAANMLFSSDSIAQYNAHTLEALRDKHPSLPPPNIPPSSSPSVQPVEASIKDVKNAIMSFRTGSASGYDGLSPQHLKDLISASEDSSRALLEDLTTLINLMLSGKVHHDFTFILYGANLCALKKKDGGIRPIAVGCTYRRIASKICCKHITNKLRDVFQPVQLGFGSKGGCEAAVHALRTYIKSKTGQVIVKVDVKNAFNSVSRSALLKEVHNHIPEIYEYILQSYGANSTLLYNRDCLLSSTGCQQGDPLGPAIFSLAIHSTITSLQSEFNVWYLDDGTLGGDPATVLHDLQVLIEKFKAIDLDLNFSKCELFLNSPITQPHDAIISEFNNLAPSIKILSKESLRLLGAPILNDGFELYVSEQKQKFVESSGKLVAIKSHMAYQIIRFCLFVPQFTYVLRCCPLWECPNLLSYLDSILKDTVINIFNCQISDTSWAQATLPIRFGGLGLRSVSSVSLPAFLSSAHSIHPLFIKIITNSFGNIGIQSLAEAINAWKRVCPSDVPANPNIQKNWDEPLINLAQTDILNSSSTTDRARLLASAEPESGYWLQANPSSNTGTLLDNHTFNLSLSLRLGANISEPHRCHCGAAVDRQGHHGLSCRRSAGRQSRHASLNDVIRRALVSVNVPATLEPNGIARDDGKRPDGMTLVPWSRGRPLVWDATCVDTLAASHVTATTREAGAAAAQAETNKRRKYEALGSDYFFVPFGVETLGPWGPGAKLLFKELSQRLVEKTNDPRAGAYLGQRISLAIQRGNAASLLGTLPTASDLDLVFYI

SEQ ID NO: 22027 - protein, 951 aa, Lysandra bellargus
MSETASEPINFIRCQFCNRSFKGVKGLNIHIGKTHSHSSNISSTPTTTPSPSCNIPFWQKISNYKLSLPILKRIPKGARVQVAKQLSSVIREVISHPDSCQRWESLLTFPFHVLHAIQDKKKSLTSIIKNNCSNFNNLTINASLHLHSHDNSPPHLHRKQHNSIHKIESKISDGDLKGAAKMLFSSDSIAQYNAHTLEALRDKHPSLPPPNIPPSSSPSVQPVEASIKDVKNAIMSFRTGSASGYDGLSPQHLKDLISASEDSSRALLEDLTTLINLMLSGKVHHDFTFILYGANLCALKKEDGGIRPIAVGCTYRRIASKICCKHITNKLRDVFQPVQLGFGSKGGCEAAVHALRTYIKSKTGQVIVKVDVKNAFNSVSRSALLKEVHNHIPEIYEYILQSYGANSTLLYNRDCLLSSTGCQQGDPLGPAIFSLAIHSTITSLQSEFNVWYLDDGTLGGDPATVLHDLQVLIEKFKAIDLDLNFSKCELFLNSPITQPHDVIISEFNNLAPSIKILSKESLRLLGAPILNDGFEPYVSEQKQKFVESSGKLVAIKSHMAYQIIRFCLFVPQFTYVLRCCPLWECPNLLSHLDSILKDTVINIFNCQISDTSWAQATLPIRFGGLGLRSVSSVSLPAFLSSAHSIHPLFIKIITNSFGNIGIQSLAEAINAWKRVCPSDVPANPNIQKNWDEPLINLAQTDILNSSSTTDRARLLASAEPESGYWLQANPSSNTGKLLDNHTFNLSLSLRLGANISEPHRCHCGAAVDRQGHHGLSCRRSAGRQSRHASLNDVIRRALVSVNVPATLEPNGIARDDGKRPDGMTLVPWSRGRPLVWDATCVDTLAASHVTATTREAGAAAAQAETNKRRKYEALGSDYFFVPFGVETLGPWGPGAKLLFKELSQRLVEKTNDPRAGAYLGQRISLAIQRGNAASLLGTLPAASDLDLVFYI

SEQ ID NO: 22028 - protein, 951 aa, Lysandra bellargus
MSETASEPINFIRCQFCNRSFKGVKGLNIHIGKTHSHSSNISSTPTTTPSPSCNIPFWQKISNYKLSLPILKRIPKGARVQVAKQLSSVIREVISHPDSCQRWESLLTFPFHVLHAIQDKKKSLTSIIKNNCSNFNNLTINASLHLHSHDNSPPHLHRKQHNSIHKIESKISDGDLKGAANMLFSSDSIAQYNAHTLEALRDKHPSLPPPNIPPSSSPSVQPVEASIKDVKNAIMSFRTGSASGYDGLSPQHLKDLISASEDSSRALLEDLTTLINLMLSGKVHHDFTFILYGANLCALKKKDGGIRPIAVGCTYRRIASKICCKHITNKLRDVFQPVQLGFGSKGGCEAAVHALRTYIKSKTGQVIVKVDVKNAFNSVSRSALLKEVHNHIPEIYEYILQSYGANSTLLYNRDCLLSSTGCQQGDPLGPAIFSLAIHSTITSLQSEFNVWYLDDGTLGGDPATVLHDLQVLIEKFKAIDLDLNFSKCELFLNSPITQPHDVIISEFNNLAPSIKILSKESLRLLGAPILNDGFEPYVSEQKQKFVESSGKLVAIKSHMAYQIIRFCLFVPQFTYVLRCCPLWECPNLLSHLDSILKDTVINIFNCQISDTSWAQATLPIRFGGLGLRSVSSVSLPAFLSSAHSIHPLFIKIITNSFGNIGIQSLAEAINAWKRVCPSDVPANPNIQKNWDEPLINLAQTDTLNSSSTTDRARLLASAEPESGYWLQANPSSNTGTLLDNHTFNLSLSLRLGANISEPHRCHCGAAVDRQGHHGLSCRRSAGRQSRHASLNDVIRTALVSVNVPATLEPNGIARDDGKRPDGMTLVPWSRGRPLVWDATCVDTLAASHVTATTREAGAAAAQAETNKRRKYEALGSDYFFVPFGVETLGPWGPGAKLLFKELSQRLVEKTNDPRAGAYLGQRISLAIQRGNAASLLGTLPAASDLDLVFYI

SEQ ID NO: 22029 - protein, 951 aa, Lysandra bellargus
MSETASEPINFIRCQFCNRSFKGVKGLNIHIGKTHSHSSNISSTPTTTPSPSCNIPFWQKISNYKLTLPILKRIPKGARVQVAKQLSSVIREVISHPDSCQRWESLLTFPFHVLHAIQDKKKSLTSIIKNNCSNFNNLTINASLHLHSHDNSPPHLHRKQHNSIHKIESKISDGDLKGAANMLFSSDSIAQYNAHTLEALRDKHPTLPPPNIPPSSSPSVQPVEASIKDVKNAIMSFRTGSASGYDGLSPQHLKDLISASEDSSRALLEDLTTLINLMLSGKVHHDFTFILYGANLCALKKKDGGIRPIAVGCTYRRIASKICCKHITNKLRDVFQPVQLGFGSKGGCEAAVHALRTYIKSKTGQVIVKVDVKNAFNSVSRSALLKEVHNHIPEIYEYILQSYGANSTLLYNRDCLLSSTGCQQGDPLGPAIFSLAIHSTITSLQSEFNVWYLDDGTLGGDPATVLHDLQVLIEKFKAIDLDLNFSKCELFLNSPITQPHDAIISEFNNLAPSIKILSKESLRLLGAPILNDGFEPYVSEQKQKFVESSGKLVAIKSHMAYQIIRFCLFVPQFTYVLRCCPLWECPNLLSHLDSILKDTVINIFNCQISDTSWAQATLPIRFGGLGLRSVSSVSLPAFLSSAHSIHPLFIKIITNSFGNIGIQSLAEAINAWKRVCPSDVPANPNIQKNWDEPLINLAQTDILNSSSTTDRARLLASAEPESGYWLQANPSSNTGTLLDNHTFNLSLSFRLGANISEPHRCHCGAAVDRQGHHGLSCRRSAGRQSRHASLNDVIRRALVSVNVPATLEPNGIARDDGKRPDGMTLVPWSRGRPLVWDATCVDTLAASHVTATTREAGAAAAQAETNKRRKYEALGSDYFFVPFGVETLGPWGPGAKLLFKELSQRLAEKTNDPRAGAYLGQRISLAIQRGNAASLLGTLPTASDLDLVFYI

SEQ ID NO: 22030 - protein, 951 aa, Lysandra bellargus
MSETASEPINFIRCQFCNRSFKGVKGLNIHIGKTHSHSSNISSTPTTTPSPSCNIPFWQKISNYKLTLPILKRIPKGARVQVAKQLSSVIREVISHPDSCQRWESLLTFPFHVLHAIQDKKKSLTSIIKNNCSNFNNLTINASLHLHSHDNSPPHLHRKQHNSIHKIESKISDGDLKGAANMLFSSDSIAQYNAHTLEALRDKHPSLPPPNIPPSSSPSVQPVEASIKDVKNAIMSFRTGSASGYDGLSPQHLKDLISASEDSSRALLEDLTTLINLMLSGKVHHDFTFILYGANLCALKKKDGGIRPIAVGCTYRRIASKICCKHITNKLRDVFQPVQLGFGSKGGCEAAVHALRTYIKSKTGQVIVKVDVKNAFNSVSRSALLKEVHNHIPEIYEYILQSYGANSTLLYNRDCLLSSTGCQQGDPLGPAIFSLAIHSTITSLQSEFNVWYLDDGTLGGDPATVLHDLQVLIEKFKAIDLDLNFSKCELFLNSPITQPHDAIISEFNNLAPSIKILSKESLRLLGAPILNDGFEPYVSEQKQKFVESSGKLVAIKSHMAYQIIRFCLFVPQFTYVLRCCPLWECPNLLSHLDSILKDTVINIFNCQISDTSWAQATLPIRFGGLGLRSVSSVSLPAFLSSAHSIHPLFIKIITNSFGNIGIQSLAEAINAWKRVCPSDVPANPNIQKNWDEPLINLAQTDILNSSSTTDRARLLASAEPESGYWLQANPSSNTGTLLDNHTFNLSLSLRLGANISEPHRCHCGAAVDRQGHHGLSCRRSAGRQSRHASLNDVIRRALVSVNVPATLEPNGIARDDGKRPDGMTLVPWSRGRPLVWDATCVDTLAASHVTATTREAGAAAAQAETNKRRKYEALGSDYFFVPFGVETLGPWGPGAKLLFKELSQRLVEKTNDPRAGAYLGQRISLAIQRGNAASLLGTLPTASDLDLVFYI

SEQ ID NO: 22031 - protein, 716 aa, Plebejus argus
MSFRTGSASGYDGLSPQHLKDLISTPGDSTIALLADLTDLINVMLSGKVPHNVTNILYGANLCALKKKDGGIRPIAVGCTYRRIASKICCKYISRKLTDTFQPVQLGFGSKGGCEAAVHALRTYIKAKTGQVVLKVDVKNAFNAISRSALLREVQNHVPEIQEYILQCYGSDSSLLYRSDLLLSSTGCQQGDPLGPAIFSLTIHSIIISLSSEFNIWYLDDGTLGGDAATVLLDLQVLIEKFQSIDLELNFSKCELFINNDNPVVQSPDTISKFNNLAPNIKILSKQSLRLLGAPIFSDGFNTYVSEQNNFFLQSSDKLMTIKSHMAYQIIRFCLFVPKLTYALRCCPLWEYSDSLSQLDQTLRNTLVNILNCRISDTSWVQATLPIRFGSLGIRTVTSVSLPAFLSSAHSINSLFKKIVTNSLGSVGIDSLTEALKTWRETCTAEIPVNTNIQKNWDEPLLNLAKLDLLNCSSAADRARLLASAEPESGYWLQAVPSSNIGTLLDNHTFNVSVGLRIGAEITEAHRCHCSATVDRQGHHGLSCRWSAGRQSRHSTINDVIRRALATVNVPATLEPNGIARDDGRRPDGMTLIPWSRGRPLVWDATCVDTLAASHVTATSREAGAAAAHAETNKRRKYECLGEDFIFLPFGVETLGPWGPSAKVKDLSRRLVDKSNDPRAGAYLGQRISLAIQRGNAASVIGTLPAASDLDLIFYL

SEQ ID NO: 22032 - protein, 950 aa, Lysandra bellargus
MSETASEPINFIRCQFCNRSFKGVKGLNIHIGKTHSHSSNISSTPTTTPSPSCNIPFWQKISNYKLSLPILKRIPKGARVQVAKQLSSVIREVISHPDSCQRWESLLTFPFHVLHAIQDKKKSLTSIIKNNCSNFNNLTINASLHLHSHDNSLPHLHRKQHNSIHKIESKISDGDLKGAANMLFSSDSIAQYNAHTLEALRDKHPSLPPPNIPPSSSPSVQPVEASIKDVKNAIMSFRTGSASGYDGLSPQHLKDLISASEDSSRALLEDLTTLINLMLSGKVHHDFTFILYGANLCALKKKDGGIRPIAVGCTYRRIASKICCKHITNKLRDVFQPVQLGFGSKGGCEAAVHALRTYIKSKTGQVIVKVDVKNAFNSVSRSALLKEVHNHIPEIYEYILQSYGANSTLLYNRDCLLSSTGCQQGDPLGPAIFSLAIHSTITSLQSEFNVWYLDDGTLGGDPATVLHDLVLIEKFKAIDLDLNFSKCELFLNSPITQPHDVIISEFNNLAPSIKILSKESLRLLGAPILNDGFEPYVSEQKQKFVESSGKLVAIKSHMAYQIIRFCLFVPQFTYVLRCCPLWECPNLLSHLDSILKDTVINIFNCQISDTSWAQATLPIRFGGLGLRSVSSVSLPAFLSSAHSIHPLFIKIITNSFGNIGIQSLAEAINAWKRVCPSDVPANPNIQKNWDEPLINLAQTDILNSSSTTDRARLLASAEPESGYWLQANPSSNTGTLLDNHTFNLSLSLRLGANISEPHRCHCGAAVDRQGHHGLSCRRSAGRQSRHASLNDVIRRALVSVNVPATLEPNGIARDDGKRPDGMTLVPWSRGRPLVWDATCVDTLAASHVTATTREAGAAAAQAETNKRRKYEALGSDYFFVPFGVETLGPWGPGAKLLFKELSQRLVEKTNDPRAGAYLGQRISLAIQRGNAASLLGTLPAASDLDLVFYI

SEQ ID NO: 22033 - protein, 953 aa, Celastrina argiolus
MSAAASTSCSSNFIQCQFCNRSFKGARGLNIHLGKTHNHNSTVIQQHPTHPINTSTTSHPLPTIPFWQKICNYKSSIPILKRIPKGARIQVAKNLSSLIRQVISNPDCCQNWENLLTFPFHILHAAQDRQKSLTSTIKHNCTHAINPSPTNVFNGNRTPQPLRKTHNIKHKIESKVSDGDLKGAANLLFSTDTIAEYSPHTLEALHEKHPSLPPPSIPPSFSPAVQSVEACVKDIKTAIMSFRNGSAGGHDGLSPQHLKDLIGVSGDSGGALLVDLTALINLMLSGKVPKEITGIIYGANLCALKKKDGGIRPIAVGCTYRRIASKICCTRISRKLADTFQPVQLGFGSKGGCEAAVHALRTYLKTKSGQVVLKVDVKNAFNSVSRSALLKEVQNHVPEIYDYILQCYGADSTLLYQNDRLFSSTGCQQGDPLGPALFSLAIHPIITSLTSEFNVWYLDDGTIGGETASVLQDLITEKFKSIDLDLNFSKCELFINDSLDIWHEVTPKFNNLAPNIKILSKESLRLLGAPILSEGYNSFISEQNHKFSESSGKLTTINSHMAYQIIRFCLFVPKLMYVLRCCPLWSFPNFLSQLDLTLKNTLVNVLNCNISDTSWIQAVLPIRFGGLGIRKVSSVSLPAFLSSAHSIHKLFTKIISNSLGCVGIDSLPEAIITWRGLCSDEIPVQPHIQKNWDEPLLNLAHSDLLNCCTPADRARLLASAEPESGYWLQALPSSNIGTLLDNHTFSLSVSLRLGTAINEPHLCHCGATVDRQGHHGLSCRRSAGRQSRHASINDIIRRALATVNVPATLEPNGIVRDDGRRPDGMSLVPWSHGKPLVWDATCVDTLAASHVTATAKKAGAAAAHAETHKRRKYESIGDGYIFLPFGVETLGPWGPSAKRLLKDLSKRLTEKTNDPRAGAYLGQRISLAIQRGNTASLLGTLPAAADLDIVFYI

SEQ ID NO: 22034 - protein, 1099 aa, Poecilobdella manillensis
MDSRLDLATNRLPSTTNGMSGSRCVCGRTFATERGLKIHRSKTNCKAQRQRTTAKVRVDKTPDDTGPESHHSSVCIRVSCPGQDPPRARIRFPRGSDKESWSGLDEELKRGLKKVLKDGSLKSFSDFIYDKCVGKFGVIPAKEPQKVYESRRQRDINRLKGEKKALRRRWKVANEDEREGLSVLWEDVKRRVRDLRGAERARKRKYERRKAMRSFFSDPYKYGRSLLDPPKSGVLTVEQEKLEEHFVRTYSDLLQHEALQERLDIPAVPLPASPFCMASPSLEDVRRVVRKARNRSAPGPNGVPYLLYKRCPKTLYLLYSLVEGAWSSATIHDEWKKAEGVYIPKEKDSRDLNQFRPISLLNVEGKIFFSIMASRLTEFVMANQYVDISVQKGGVPGVPGCIEHTSMIWEAIQRARRGRLSLYVVWLDLANAYGSVPHQLLWKTLEAHHVPQPVIHILQEYFNGFMMRFSTQAYTTKWVPLQVGIAMGCAISPTLFVLAMQILLKAVGSDIPEAHIGKGVYMPPIKAFMDDTTLIMNRKRIVQETLDKLDDLLGWCRMAFKPAKSRSLSLVRGKICRDAFFEMAGQRIPTVSEEPVKSLGRMFDDSLTDKSMKNAIVTQTSKGPQAIEAAPLQGRFKVWLLQFVLLPRLLWPLTIYEIGLSAVEGLERKINRHTRTWLGLPPALSSVALYSRSASLRLPLRSIVEEYKLSKIRTQWMLNMMDNRIREVNPLLRSGKKFRAQKEIYESVNVLMFEEVRGPIQTDRHAVGWNHFQKWSQASSSTRGAMIGQERRQKEEQDRVTKAVQLAQQGKWTTWEDVIQRSLTWSDLWKLSPLRLAFAVRSIYDQLPSKDNLRRWGLVEDAKCGLCDGAETLHHVLSNCTYALAHGRYTWRHNQVLREVCEATKAAVTRANSRAISKQRKIYFLREGHAHLCRKRCKTPRKDILAEANDWTVAADLEGMRHYPQVLIESGKRPDMVLMSPSSDAIILVELTVPWEDRMQYSNALKAEKYADLAVDLEAKGFRVDLFPIEVGARGVVGKSTYAFLTKIGLSSRERTKTMTKMSEEAEAASFWIWQMRGKETSSDATAKGPEKAADLRSE

SEQ ID NO: 22035 - protein, 1106 aa, Poecilobdella manillensis
MDSRLDLATNRLPSTTNAPDNGMSGSRCVCGRAFATERGLKIHRSKTNCGCKAQRQRTTAKVRVDKTPDDTGPESHHSSVCVRVSCPGQDPPRARIRFPRGSDKESWSGLDEELKRGLKKVLKDGSVKSFSDFIYDKCVGKFGVIPAKEPQKVHESRRQRDINRLKGEKKALRRRWKMANEDEREGLSVLWEDVKRRVRDLRGAERARKRKYERRKAMRSFFSDPYKYGRSLLDPPKSGVLTVEQEKLEEHLVRTYSDLLQHEALQERLDIPAVPLPASPFCMASPSLEEVRRVVRKARNRSAPGPNGVPYLLYKRCPKTLYLLYSLVEGAWSSATIHDEWKKAEGVYIPKEKDSRDLNQFRPISLLNVEGKIFFSIMASRLTEFVMANQYVDISVQKGGVPGVPGCIEHTSMIWEAIQRARRGRLSLCVVWLDLANAYGSVPHQLLWKTLEAHHVPQPVIRILQEYFNGFMMRFSTQAYTTKWVPLQVGIAMGCAISPTLFVLAMQILLKAVGSDIPEAHIGKGVYMPPIKAFMDDTTLIMNRKRVVQETLDKLDDLLGWCRMAFKPAKSRSLSLVRGKICRDAFFEVAGQRIPTVSEEPVKSLGRMFDDSLADKSMKNAIVTQTSKGLQAIEAAPLQGRFKVWLLQFVLLPRLLWPLTIYEIGLSAVEGLERKINRHTRTWLGLPPALSSVALYSRSASLRLPLRSIVEEYKLSKIRTQWMLNNSADNRIREVNPLLRSGKKFRAQKEIDESVNVLMFEEVRGPIQTDRHAVGWNHFQKWSQASSSTRGAMIGQERRRKEEQDRVTKAVQLAQQGKWTTWEDVIQRSLTWSDLWKLSPLRLAFAVRSIYDQLPSKDNLRRWGLVEDSKCGLCDGAETLHHVLSNCTYALAHGRYTWRHNQVLREVCEATKAAVTKANSRAISKQRKIYFLREGHAHLCRKRCKTPRKDILAEANDWTVAADLEGMRHYPQVLIESGKRPDMVLMSPSSDAIILVELTVPWEDRMQYSNALKAEKYADLAVDLEAKGFRVDLFPIEVGARGVVGKSTYAFLTKIGLSSRERTKTMTKMSEAAEAASFWIWQMRGKETSSDATAKGPEKAADLRSE

SEQ ID NO: 22036 - protein, 1117 aa, Poecilobdella manillensis
MVPAERRGRMTDHQRLDLATNRLPSTTNAPDNGMSGSRCVCGRAFATERGLKIHRSKTNCGCKAQRQRTTAKVRVDKTPDDTGPESHHSSACVRVSCPGQDPPRARIRFPRGSDKESWSGLDEELKRGLKKVLKDGSVKSFSDFIYDKCVGKFGVIPAKEPQKVHESRRQRDINRLKGEKKALRRRWKMANEDEREGLSVLWEDVKRRVRDLRGAERARKRKYERRKAMRSFFSDPYKYGRSLLDPPKSGVLTVEQEKLEEHLVRTYSDLLQHEALQERLDIPAVPLPASPFCMASPSLEEVRRVVRKARNRSAPGPNGVPYLLYKRCPKTLYLLYSLVEGAWSSATIHDEWKKAEGVYIPKEKDSRDLNQFRPISLLNVEGKIFFSIMASRLTEFVMANQYVDISVQKGGVPGVPGCIEHTSMIWEAIQRARRGRLSLYVVWLDLANAYGSVPHQLLWKTLEAHHVPQPVIRILQEYFNGFMMRFSTQAYTTKWVPLQVGIAMGCAISPTLFVLAMQILLKAVGSDIPEAHIGKGVYMPPIKAFMDDTTLIMNRKRVVQETLDKLDDLLGWCRMAFKPAKSRSLSLVRGKICRDAFFEVAGQRIPTVSEEPVKSLGRMFDDSLTDKSMKNAIVTQTSKGLQAIEAAPLQGRFKVWLLQFVLLPRLLWPLTIYEIGLSAVEGLERKINRHTRTWLGLPPALSSVALYSRSASLRLPLRSIVEEYKLSKIRTQWMLNNSADNRIREVNPLLRSGKKFRAQKEIDESVNVLMFEEVRGPIQTDRHAVGWNHFQKWSQASSSTRGAMIGQERRRKEEQDRVTKAVQLAQQGKWTTWEDVIQRSLTWSDLWKLSPLRLAFAVRSIYDQLPSKDNLRRWGLVEDGKCGLCDGAETLHHVLSNCTYALAHGRYTWRHNQVLREVCEATKAAVTKANSRAISKQRKIYFLREGHAHLCRKRCKTPRKDILAEANDWTVAADLEGMRHYPQVLIESGKRPDMVLMSPSSDAIILVELTVPWEDRMQYSNALKAEKYADLAVDLEAKGFRVDLFPIEVGARGVVGKSTYAFLTKIGLSSRERTKTMTKMSEAAEAASFWIWQMRGKETSSDAIAKGPEKAADLRSE

SEQ ID NO: 22037 - protein, 1173 aa, Poecilobdella manillensis
MAIWHSGIDRGTTRRAWWRPGKTGDVSERRGRDWASDPRDKTTATSPDYDICPHGPSRKEGENDGPSMDSRLDLATNRLPSTTNAPDNGMSGSRCVCGRAFATERGLKIHRSKTNCGCKAQRQRTTAKVRADKTPDDTGPESHHSSVCVRVSCPGQDPPRARIRFPRGSDKESWSGLDEELKRGLKKVLKDGSVKSFSDFIYDKCVGKFGVIPAKEPQKVHESRRQRDINRLKGEKKALRRRWKMANEDEREGLSVLWEDVKRRVRDLRGAERARKRKYERRKAMRSFFSDPYKYGRSLLDPPKSGVLTVEQEKLEEHLVRTYSDLLQHEALQERLDIPAVPLPASPFCMASPSLEEVRRVVRKARNRSAPGPNGVPYLLYKRCPKTLYLLYSLVEGAWSSATIHDEWKKAEGVYIPKEKDSRDLNQFRPISLLNVEGKIFFSIMASRLTEFVMANQYVDISVQKGGVPGVPGCIEHTSMIWEAIQRARRGRLSLYVVWLDLANAYGSVPHQLLWKTLEAHHVPQPVIRILQEYFNGFMMRFSTQAYTTKWVPLQVGIAMGCAISPTLFVLAMQILLKAVGSDIPEAHIGKGVYMPPIKAFMDDTTLIMNRKRVVQETLDKLDDLLGWCRMAFKPAKSRSLSLVRGKICRDAFFEVAGQRIPTVSEEPVKSLGRMFDDSLTDKSVKNAIVTQTSKGLQAIEAAPLQGRFKVWLLQFVLLPRLLWPLTIYEIGLSAVEGLERKINRHTRTWLGLPPALSSVALYSRSASLRLPLRSIVEEYKLSKIRTQWMLNNSADNRIREVNPLLRSGKKFRAQKEIDESVNVLMFEEVRGPIQTDRHAVGWNHFQKWSQASSSTRGAMIGQERRRKEEQDRVTKAVQLAQQGKWTTWEDVIQRSLTWSDLWKLSPLRLAFAVRSIYDQLPSKDNLRRWGLVEDSKCGLCDGAETLHHVLSNCTYALAHGRYTWRHNQVLREVCEATKAAVTKANSRAISKQRKIYFLREGHAHLCRKRCKTPRKDILAEANDWTVAADLEGMRHYPQVLIESGKRPDMVLMSPSSDAIILVELTVPWEDRMQYSNALKAEKYADLAVDLEAKGFRVDLFPIEVGARGVVGKSTYAFLTKIGLSSRERTKTMTKMSEAAEAASFWIWQMRGKETSSDATAKGPEKAADLRSE

SEQ ID NO: 22038 - protein, 929 aa, Poecilobdella manillensis
MANEDEREGLSVLWEDVKRRVRDLRGAERARKRKYERRKAMRSFFSDPYKYGRSLLDPPKSGVLTVEQEKLEEHLVRTYSDLFQHEALQERLDIPAVPLPASPFCMASPSLEEVRRVVRKARNRSAPGPNGVPYLLYKRCPKTLYLLYSLVEGAWSSATIHDEWKKAEGVYIPKEKDSRDLNQFRPISLLNVEGKIFFSIMASRLTEFVMANQYVDISVQKGGVPGVPGCIEHTSMIWEAIQRARRGRLSLYVVWLDLANAYGSVPHQLLWKTLEAHHVPQPVIRILQEYFNGFMMRFSTQAYTTKWVPLQVGIAMGCAISPTLFVLAMQILLKAVGSDIPEAHIGKGVYMPPIKAFMDDTTLIMNRKRVVQETLDKLDDLLGWCRMAFKPAKSRSLSLVRGKICRDVFFEVAGQRIPTVSEEPVKSLGRMFDDSLTDKSMKNAIVTQTSKGLQAIEAAPLQGRFKVWLLQFVLLPRLLWPLTIYEIGLSAVEGLERKINRHTRTWLGLPPALSSVALYSRSASLRLPLRSIVEEYKLSKIRTQWMLNNSADNRIREVNPLLRSGKKFRAQKEIDESVNVLMFEEVRGPIQTDRHAVGWNHFQKWSQASSSTRGAMIGQERRRKEEQDRVTKAVQLAQQGKWTTWEDVIQRSLTWSDIWKLSPLRLAFAVRSIYDQLPSKDNLRRWGLVEDGKCGLCDGAETLHHVLSNCTYALAHGRYTWRHNQVLREVCEATKAAVTKANSRAISKQRKIYFLREGHAHLCRKRCKTPRKDILAEANDWTVAADLEGMRHYPQVLIESGKRPDMVLMSPSSDAIILVELTVPWEDRMQYSNALKAEKYADLAVDLEAKGFRVDLFPIEVGARGVVGKSTYAFLTKIGLSSRERTKTMTKMSEAAEAASFWIWQMRGKETSSDAIAKGPEKAADLRSE

SEQ ID NO: 22039 - protein, 1173 aa, Poecilobdella manillensis
MAIWHSGIDRGTTRRAWWRPGKTGDVSERRGRDWASDPRDKTTATSPDYEICPHGPSRKEGENDGPSMDSRLDLATNRLPSTTNAPDNGMSGSRCVCGRAFATERGLKIHRSKTNCGCKAQRQRTTAKVRVDKTPDDTGPESHHSSACVRVSCPGQDPPRARIRFPRGSDKESWSGLDEELKRGLKKVLKDGSVKSFSDFIYDKCVGKFGVIPAKEPQKVHESRRQRDINRLKGEKKALRRRWKMANEDEREGLSVLWEDVKRRVRDLRGAERARKRKYERRKAMRSFFSDPYKYGRSLLDPPKSGVLTVEQEKLEEHLVRTYSDLLQHEALQERLDIPAVPLPASPFCMASPSLEEVRRVVRKARNRSAPGPNGVPYLLYKRCPKTLYLLYSLVEGAWSSATIHDEWKKAEGVYIPKEKDSRDLNQFRPISLLNVEGKIFFSIMASRLTEFVMANQYVDISVQKGGVPGVPGCIEHTSMIWEAIQRARRGRLSLYVVWLDLANAYGSVPHQLLWKTLEAHHVPQPVIRILQEYFNGFMMRFSTQAYTTKWVPLQVGIAMGCAISPTLFVLAMQILLKAVGSDIPEAHIGKGVYMPPIKAFMDDTTLIMNRKRVVQETLDKLDDLLGWCRMAFKPAKSRSLSLVRGKICRDAFFEVAGQRIPTVSEEPVKSLGRMFDDSLTDKSMKNAIVTQTSKGLQAIEAAPLQGRFKVWLLQFVLLPRLLWPLTIYEIGLSAVEGLERKINRHTRTWLGLPPALSSVALYSRSASLRLPLRSIVEEYKLSKIRTQWMLNNSADNRIREVNPLLRSGKKFRAQKEIDESVNVLMFEEVRGPIQTDRHAVGWNHFQKWSQASSSTRGAMIGQERRRKEEQDRVTKAVQLAQQGKWTTWEDVIQRSLTWSDLWKLSPLRLAFAVRSIYDQLPSKDNLRRWGLVEDGKCGLCDGAETLHHVLSNCTYALAHGRYTWRHNQVLREVCEATKAAVTKANSRAISKQRKIYFLREGHAHLCRKRCKTPRKDILAEANDWTVAADLEGMRHYPQVLIESGKRPDMVLMSPSSDAIILVELTVPWEDRMQYSNALKAEKYADLAVDLEAKGFRVDLFPIEVGARGVVGKSTYAFLTKIGLSSRERTKTMTKMSEAAEAASFWIWQMRGKETSSDAIAKGPEKAADLRSE

SEQ ID NO: 22040 - protein, 1173 aa, Poecilobdella manillensis
MAIWHSGIDRGTTRRAWWRPGKTGDVSERRGREWASDPRDKTTATSPDYEICPHGPSRKEGENDGPSMDSRLDLATNRLPSTTNAPDNGMSGSRCVCGRAFATERGLKIHRSKTNCGCKAQRQRTTAKVRVDKTPDDTGPESHHSSACVRVSCPGQDPPRARIRFPRGSDKESWSGLDEELKRGLKKVLKDGSVKSFSDFIYDKCVGKFGVIPAKEPQKVHESRRQRDINRLKGEKKALRRRWKMANEDEREGLSVLWEDVKRRVRDLRGAERARKRKYERRKAMRSFFSDPYKYGRSLLDPPKSGVLTVEQEKLEEHLVRTYSDLLQHEALQERLDIPAVPLPASPFCMASPSLEEVRRVVRKARNRSAPGPNGVPYLLYKRCPKTLYLLYSLVGGAWSSATIHDEWKKAEGVYIPKEKDSRDLNQFRPISLLNVEGKIFFSIMASRLTEFVMANQYVDISVQKGGVPGVPGCIEHTSMIWEAIQRARRGRLSLYVVWLDLANAYGSVPHQLLWKTLEAHHVPQPVIRILQEYFNGFMMRFSTQAYTTKWVPLQVGIAMGCAISPTLFVLAMQILLKAVGSDIPEAHIGKGVYMPPIKAFMDDTTLIMNRKRVVQEALDKLDDLLGWCRMAFKPAKSRSLSLVRGKICRDAFFEVAGQRIPTVSEEPVKSLGRMFDDSLTDKSMKNAIVTQTSKGLQAIEAAPLQGRFKVWLLQFVLLPRLLWPLTIYEIGLSAVEGLERKINRHTRTWLGLPPALSSVALYSRSASLRLPLRSIVEEYKLSKIRTQWMLNNSADNRIREVNPLLRSGKKFRAQKEIDESVNVLMFEEVRGPIQTDRHAVGWNHFQKWSQASSSTRGAMIGQERRRKEEQDRVTKAVQLAQQGKWTTWEDVIQRSLTWSDLWKLSPLRLAFAVRSIYDQLPSKDNLRRWGLVEDGKCGLCDGAETLHHVLSNCTYALAHGRYTWRHNQVLREVCEATKAAVTKANSRAISKQRKIYFLREGHAHLCRKRCKTPRKDILAEANDWTVAADLEGMRHYPQVLIESGKRPDMVLMSPSSDAIILVELTVPWEDRMQYSNALKAEKYADLAVDLEAKGFRVDLFPIEVGARGVVGKSTYAFLTKIGLSSRERTKTMTKMSEAAEAASFWIWQMRGKETSSDAIAKGPEKAADLRSE

SEQ ID NO: 22041 - protein, 1173 aa, Poecilobdella manillensis
MAIWHSGIDRGTTRRAWWRPGKTGDVSERRGCDWASDPRDKTTATSPDYDICPHGPSRKEGENDGPSMDSRLDLATNRLPSTTNAPDNGMSGSRCVCGRAFATERGLKIHRSKTNCRCKAQRQRTTAKVRVDKTPDDTGPESHHSSVCVRVSCPGQDPPRARIRFPRGSDKESWSRLDEELKRGLKKVLKDGSVKSFSDFIYDKCVGKFGVIPAKEPQKVHESRRQRDISRLKGEKKALRRRWKMANEDEREGLSVLWEDVKRRVRDLRGAERARKRKYERRKAMRSFFSDPYKYGRSLLDPPKSGVLTVEQEKLEEHLVRTYSDLLQHEALQERLNIPTVPLPASPFCMASPSLEEVRRVVRKARNRSAPGPNGVPYLLYKRCPKTLYLLYSLVEGAWSSATIHDEWKKAEGVYIPKEKDSRDLNQFRPISLLNVEGKIFFSIMASRLTEFVMANQYVDISVQKGGVPGVPGCIEHTSMIWEAIQRARRGRLSLYVVWLDLANAYGSVPHQLLWKTLEAHHVPQPVIRILQEYFNGFMMRFSTQAYTTKWVPLQVRIAMGCAISPTLFVLAMQILLKAVGSDIPEAHIGKGVYMPPIKAFMDDTTLIMNRKRVVQETLDKLDDLLGWCRMAFKPAKSRSLSLVRGKICRDAFFEMAGQRIPTVSEEPVKSLGRMFDDSLTDKSMKNAIVTQTSKGLQAIEAAPLQGRFKVWLLQFVLLPRLLWPLTIYEIGLSAVEGLERKINRHTRTWLGLPPALSSVALYSRSASLRLPLRSIVEEYKLSKIRTQWMLNNSADNRIREVNPLLRSGKKFRAQKEIDESVNVLMFEEVRGPIQTDRHAVGWNHFQKWSQASSSTRGAMIGQERRRKEEQDRVTKAVQLAQQGKWTTWEDVIQRSLTWSDLWKLSPLRLAFAVRSIYDQLPSKDNLRRWGLVEDGKCGLCDGAETLHHVLSNCTYALAHGRYTWRHNQVLREVCEATKAAVTKANSRAISKQRKIYFLREGHAHLCRKRCKTPRKDILAEANDWTVAADLEGMRHYPQVLIESGKRPDMVLMSPSSDAIILVELTVPWEDRMQYSNALKAEKYANLAVDLEAKGFRVDLFPIEVGARGVVGKSTYAFLTKIGLSSRERTKTMTKMSEAAEAASFWIWQMRGKETSSDATAKGPEKAADLRSE

SEQ ID NO: 22042 - protein, 1106 aa, Poecilobdella manillensis
MDSRLDLATNRLPSTTNAPDNGMSGSRCVCGRAFATERGLKIHRSKTNCGCKAQRQRTTAKVRVDKTPDDTGPESHHSSVCVRVSCPGQDPPRARIRFPRGSDKESWSGLDEELKRGLKKVLKDGSVKSFSDFIYDKCVGKFGVIPAKEPQKVHESRRQRDINRLKGEKKALRRRWKMANEDEREGLSVLWEDVKRRVRDLRGAERARKRKYERRKAMRSFFSDPYKYGRSLLDPPKSGVLTVEQEKLEEHLVRTYSDLLQHEALQERLDIPAVPLPASPFCMASPSLEEVRRVVRKARNRSAPGPNGVPYLLYKRCPKTLYLLYSLVEGAWSSATIHDEWKKAEGVYIPKEKDSRDLNQFRPISLLNVEGKIFFSIMASRLTEFVMANQYVDISVQKGGVPGVPGCIEHTSMIWEAIQRARRGRLSLYVVWLDLANAYGSVPHQLLWKTLEAHHVPQPVIRILQEYFNGFMMRFSTQAYTTKWVPLQVGIAMGCAISPTLFVLAMQILLKAVGSDIPEAHIGKGVYMPPIKAFMDDTTLIMNRKRVVQETLDKLDDVLGWCRMAFKPAKSRSLSLVRGKICRDAFFEVAGQRIPTVSEEPVKSLGRMFDDSLTDKSMKNAIVTQTSKGLQAIEAAPLQGRFKVWLLQFVLLPRLLWPLTIYEIGLSAVEGLERKINRHTRTWLGLPPALSSVALYSRSASLRLPLRSIVEEYKLSKIRTQWMLNNSADNRIREVNPLLRSGKKFRAQKEIDESVNILMFEEVRGPIQTDRYAVGWNHFQKWSQASSSTRGAMIGQERRRKEEQDRVTKAVQLAQQGKWTTWEDVIQRSLTWSDLWKLSPLRLAFAVRSIYDQLPSKDNLRRWGLVEDGKCGLCDGAETLHHVLSNCTYALAHGRYTWRHNQVLREVCEATKAAVTKANSRAISKQRKIYFLREGHAHLCRKRCKTPRKDILAEANDWTVAADLEGMRHYPQVLIESGKRPDVVLMSPSSDAIILVELTVPWEDRMQYSNALKAEKYADLAVDLEAKGFRVDLFPIEVGARGVVGKSTYAFLTKIGLSSRERTKTMTKMSEAAEAASFWIWQMRGKETSSDATVKGPEKAADLRSE

SEQ ID NO: 22043 - protein, 1095 aa, Poecilobdella manillensis
MYKYSHGMLLSFFDDYLDLISDCHSYNLRNSNEFQSDPARLKLKLFLIKCTGPRSYSNIPFDIKSSTSLATFSKLYKSHPPRARIRFPRGSDKESWSGLDEELKRGLKKVLKDGSVKSFSDFIYDKCVGKFGVIPAKEPQKVHESRRQRDINRLKGEKKALRRRWKMANEDEREGLSVLWEDVKRRVRDLRGAERARKRKYERRKAMRSFFSDPYKYGRSLLDPPKSGVLTVEQEKLEEHLVRTYSDLLQHEALQERLDIPAVPLPASPFCMASPSLEEVRRVVRKARNRSAPGPNGVPYLLYKRCPKTLYLLYSLVEGAWSSATIHDEWKKAEGVYIPKEKDSRDLNQFRPISLLNVEGKIFFSIMASRLTEFVMANQYVDISVQKGGVPGVPGCIEHTSMIWEAIQRARRGRLSLYVVWLDLANAYGSVPHQLLWKTLEAHHVPQPVIRILQEYFNGFMMRFSTQAYTTKWVPLQVGIAMGCAISPTLFVLAMQILLKAVGSDIPEAHIGKGVYMPPIKAFMDDTTLIMNRKRVVQETLDKLDDLLGWCRMAFKPAKSRSLSLVRGKIFRDAFFEVAGQRIPTVSEEPVKSLGRMFDDSLTDKSMKNAIVTQTSKGLQAIEAAPLQGRFKVWLLQFVLLPRLLWPLTIYEIGLSAVEGLERKINRHTRTWLGLPPALSSVALYSRSASLRLPLRSIVEEYKLSKIRTQWMLNNSADNRIREVNPLLRSGKKFRAQKEIDESVNVLMFEEVRGPIQTDRHAVGWNHFQKWSQASSSTRGAMIGQERRRKEEQDRVTKAVQLAQQGKWTTWEDVIQRSLTWSDLWKLSPLRLAFAVRSIYDQLPSKDNLRRWGLVEDGKCGLCDGAETLHHVLSNCTYALAHGRYTWRHNQVLREVCEATKAAVTKANSRAISKQRKIYFLREGHAHLCRKRCKTPRKDILAEANDWTVAADLEGMRHYPQVLIESGKRPDMVLMSPSSDAIILVELTVPWEDRMQYSNALKAEKYADLAVDLEAKGFRVDLFPIEVGARGVVGKSTYAFLTKIGLSSRERTKTMTKMSEAAEAASFWIWQMRGKETSSDAIAKGPEKAADLRSE

SEQ ID NO: 22044 - protein, 1215 aa, Poecilobdella manillensis
MRPTPGERQGFQRAETFEDGGPSLRIPVGKLRGGVSSIYTTAMAIWHSGIDRGTTRRAWWRPGKTGDVSERRGRDWASDPRDKTTATSPDYEICPHGPSRKEGENDGPSMDSRLDLATNRLPSTTNAPDNGMSGSRCVCGRAFATERGLKIHRSKTNCGCKAQRQRTTAKVRVDKTPDDTGPESHHSSACVRVSCPGQDPPRARIRFPRGSDKESWSGLDEELKRGLKKVLKDGSVKSFSDFIYDKCVGKFGVIPAKEPQKVHESRRQRDINRLKGEKKALRRRWKMANEDEREGLSVLWEDVKRRVRDLRGAERARKRKYERRKAMRSFFSDPYKYGRSLLDPPKSGVLTVEQEKLEEHLVRTYSDLLQHEALQERLDIPAVPLPASPFCMASPSLEEVRRVVRKARNRSAPGPNGVPYLLYKRCPKTLYLLYSLVEGAWSSATIHDEWKKAEGVYIPKEKDSRDLNQFRPISLLNVEGKIFFSIMASRLTEFVMANQYVDISVQKGGVPGVPGCIEHTSMIWEAIQRARRGRLSLYVVWLDLANAYGSVPHQLLWKTLEAHHVPQPVIRILQEYFNGFMMRFSTQAYTTKWVPLQVGIAMGCAISPTLFVLAMQILLKAVGSDIPEAHIGKGVYMPPIKAFMDDTTLIMNRKRVVQETLDKLDDLLGWCRMAFKPAKSRSLSLVRGKICRDAFFEVAGQRIPTVSEEPVKSLGRMFDDSLTDKSMKNAIVTQTSKGLQAIEAAPLQGRFKVWLLQFVLLPRLLWPLTIYEIGLSAVEGLERKINRHTRTWLGLPPALSSVALYSRSASLRLPLRSIVEEYKLSKIRTQWMLNNSADNRIREVNPLLRSGKKFRAQKEIDESVNVLMFEEVRGPIQTDRHAVGWNHFQKWSQASSSTRGAMIGQERRRKEEQDRVTKAVQLAQQGKWTTWEDVIQRSLTWSDLWKLSPLRLAFAVRSIYDQLPSKDNLRRWGLVEDGKCGLCDGAETLHHVLSNCTYALAHGRYTWRHNQVLREVCEATKAAVTKANSRAISKQRKIYFLREGHAHLCRKRCKTPRKDILAEANDWTVAADLEGMRHYPQVLIESGKRPDMVLMSPSSDAIILVELTVPWEDRMQYSNALKAEKYADLAVDLEAKGFRVDLFPIEVGARGVVGKSTYAFLTKIGLSSRERTKTMTKMSEAAEAASFWIWQMRGKETSSDAIAKGPEKAADLRSE

SEQ ID NO: 22045 - protein, 872 aa, Hirudo verbana
MRSFFSDPYRYGRSLLDPPKSGELSVEQDKLEEHLLKTYSDALRHESLQERVDIPAVPLPTSPFCLASPSLEEVRGVVRKARNRSAPGPNGVPYLLYKRCPKTLYLLHSLIQRAWSSATVDDEWKKAEGVYIPKEKDSKGLNQFRPISLLNVEGKIFFSIMASRLTEFVMSNQYVDISVQKGGIPGVPGCIEHTSMIWEAIQRAKRSRLSLYVVWLDLANAYGSVPHQLLWKTLEAHHVPQPVIHILQEYFSGFMMRFSTKTYTTRWVPLEVGIAMGCTISPSLFVLAMQILLKAAGSNIPEAHIGKGVYMPPIKAFMDDTTLIMNRKKVVQNTLDRLNNLLGWCRMAFKPAKSRSLALVRGKIRRDVFFDVAEQRIPTVSEEPVKSLGRVFDESLTDKSMRGAILQQTIEGLQAIEAAPLQGRFKVWMFQFVLLPRLLWPLTIYEIGLSVVEKLERKVNRYTRKWLGLPPALSSVALYSRSTSLRLPLRSIVEEYKLSKIRTQWMLNNSADSRIREVKPLLRSGRKFRAQNEIDESVAELTFEEVRGPTQTDRHAVGWNHLPKWSQASSSTKAAMINQERRRKVEQDRVTRAVQQSQQGKWTTWEDVMQRSLTWSDMWKMSPLRLAFAIRSVYDQLPSRDNLQKWGLVEDTKCGLCGGTETLHHVLSNCTYALANGRYTWRHNQVLREVCEAAKAAVSKANSRTIANQRKIYFLREGFAHLCKKRCQTPRRDILAEANDWTVAADLEGMRHYPQVLIESGKRPDLVLVSSSTDAIILVELTVPWEDRLQYSNALKADKYADLSMDLEAKGYRTDLFPIEVGARGVVGRSTYAFLAKIGLSSRERKKAMTRMSEAAEAASFWIWHMRSQKKS

SEQ ID NO: 22046 - protein, 1215 aa, Poecilobdella manillensis
MRPTPGERQGFQRAETFEDGGPSLRIPVGKLRGGVPSIYTTAMAIWHSGIDRGTTRRAWWRPGKTGDVSERRGRDWASDPRDKTTATSPDYDICPHGPSRKEGENDGPSMDSRLDLATNRLPSTTNAPDNGMSGSRCVCGRAFATERGLKIHRSKTNCGCKAQRQRTTAKVRVDKTPDDTGPESHHSSVCVRVSCPGQDPPRARIRFPRGSDKESWSGLDEELKRGLKKVLKDGSVKSFSDFIYDKCVGKFGVIPAKEPQKVHESRRQRDINRLKGEKKALRRRWKMANEDEREGLSVLWEDVKRRVRDLRGAERARKRKYERRKAMRSFFSDPYKYGRSLLDPPKSGVLTVEQEKLEEHLVRTYSDLLQHEALQERLDIPAVPLPASPFCMASPSLEEVRRVVRKARNRSAPGPNGVPYLLYKRCPKTLYLLYSLVEGAWSSATIHDEWKKAEGVYIPKEKDSRDLNQFRPISLLNVEGKIFFSIMASRLTEFVMANQYVDISVQKGGVPGVPGCIEHTSMIWEAIQRARRGRLSLYVVWLDLANAYGSVPHQLLWKTLEAHHVPQPVIRILQEYFNGFMMRFSTQAYTTKWVPLQVGIAMGCAISPTLFVLAMQILLKAVGSDIPEAHIGKGVYMPPIKAFMDDTTLIMNRKRVVQETLDKLDDLLGWCRMAFKPAKSRSLSLVRGKICRDAFFEVAGQRIPTVSEEPVKSLGRMFDDSLTDKSMKSAIVTQTSKGLQAIEAAPLQGRFKVWLLQFVLLPRLLWPLTIYEIGLSAVEGLERKINRHTRTWLGLPPALSSVALYSRSASLRLPLRSIVEEYKLSKIRTQWMLNNSADNRIREVNPLLRSGKKFRAQKEIDESVNVLMFEEVRGPIQTDRHAVGWNHFQKWSQASSSTRGAMIGQERRRKEEQDRVTKAVQLAQQGKWTTWEDVIQRSLTWSDLWKLSPLRLAFAVRSIYDQLPSKDNLRRWGLVEDSKCGLCDGAETLHHVLSNCTYALAHGRYTWRHNQVLREVCEATKAAVTKANSRAISKQRKIYFLREGHAHLCRKRCKTPRKDILAEANDWTVAADLEGMRHYPQVLIESGKRPDMVLMSPSSDAIILVELTVPWEDRMQYSNALKAEKYADLAVDLEAKGFRVDLFPIEVGARGVVGKSTYAFLTKIGLSSRERTKTMTKMSEAAEAASFWIWQMRGKETSSDATAKGPEKAADLRSE

SEQ ID NO: 22047 - protein, 1084 aa, Poecilobdella manillensis
MSGSRCVCGRAFATERGLKIHRSKTNCGCKAQRQRTTAKVRVDKTPDDTGPESHHSSACVRVSCPGQDPPRARIRFPRGSDKESWSGLDEELKRGLKKVLKDGSVKSFSDFIYDKCVGKFGVIPAKEPQKVHESRRQRDINRLKGEKKALRRRWKMANEDEREGLSVLWEDVKRRVRDLRGAERARKRKYERRKAMRSFFSDPYKYGRSLLDPPKSGVLTVEQEKLEEHLVRTYSDLLQHEALQERLDIPAVPLPASPFCMASPSLEEVRRVVRKARNRSAPGPNGVPYLLYKRCPKTLYLLYSLVEGAWSSATIHDEWKKAEGVYIPKEKDSRDLNQFRPISLLNVEGKIFFSIMASRLTEFVMANQYVDISVQKGGVPGVPGCIEHTSMIWEAIQRARRGRLSLYVVWLDLANAYGSVPHQLLWKTLEAHHVPQPVIHILQEYFNGFMMRFSTQAYTTKWVPLQVGIAMGCAISPTLFVLAMQILLKAVGSDIPEAHIGKGVYMPPIKAFMDDTTLIMNRKRVVQETLDKLDDLLGWCRMAFKPAKSRSLSLVRGKICRDAFFEVAGQRIPTVSEEPVKSLGRMFDDSLTDKSMKNAIVTQTSKGLQAIEAAPLQGRFKVWLLQFVLLPRLLWPLTIYEIGLSAVEGLERKINRHTRTWLGLPPALSSVALYSRSASLRLPLRSIVEEYKLSKIRTQWMLNNSADNRIREVNPLLRSGKKFRAQKEIDESVNVLMFEEVRGPIQTDRHAVGWNHFQKWSQASSSTRGAMIGQERRRKEEQDRVTKAVQLAQQGKWTTWEDVIQRSLTWSDLWKLSPLRLAFAVRSIYDQLPSKDNLRRWGLVEDGKCGLCDGAETLHHVLSNCTYALAHGRYTWRHNQVLREVCEATKAAVTKANSRVISKQRKIYFLREGHAHLCRKRCKTPRKDILAEANDWTVAADLEGMRHYPQVLIESGKRPDMVLMSPSSDAIILVELTVPWEDRMQYSNALKAEKYADLAVDLEAKGFRVDLFPIEVGARGVVGKSTYAFLTKIGLSSRERTKTMTKMSEAAEAASFWIWQMRGKETSSDALAKGPEKAADLRSE

SEQ ID NO: 22048 - protein, 1215 aa, Poecilobdella manillensis
MRPTPGERQGFQRAETFEDGGPSLRIPVGKLRGGVSSIYTTAMAIWHSGIDRGTTRRAWWRPGKTGDVSERRGRDWASDPRDKTTATSPDYDICPHGPSRKEGENDGPSMDSRLDLATNRLPSTTNAPDNGMSGSRCVCGRAFATERGLKIHRSKTNCGCKAQRQRTTAKVRADKTPDDTGPESHHSSVCVRVSCPGQDPPRARIRFPRGSDKESWSGLDEELKRGLKKVLKDGSVKSFSDFIYDKCVGKFGVIPAKEPQKVHESRRQRDINRLKGEKKALRRRWKMANEDEREGLSVLWEDVKRRVRDLRGAERARKRKYERRKAMRSFFSDPYKYGRSLLDPPKSGVLTVEQEKLEEHLVRTYSDLLQHEALQERLDIPAVPLPASPFCMASPSLEEVRRVVRKARNRSAPGPNGVPYLLYKRCPKTLYLLYSLVEGAWSSATIHDEWKKAEGVYIPKEKDSRDLNQFRPISLLNVEGKIFFSIMASRLTEFVMANQYVDISVQKGGVPGVPGCIEHTSMIWEAIQRARRGRLSLYVVWLDLANAYGSVPHQLLWKTLEAHHVPQPVIRILQEYFNGFMMRFSTQAYTTKWVPLQVGIAMGCAISPTLFVLAMQILLKAVGSDIPEAHIGKGVYMPPIKAFMDDTTLIMNRKRVVQETLDKLDDLLGWCRMAFKPAKSRSLSLVRGKICRDAFFEVAGQRIPTVSEEPVKSLGRMFDDSLTDKSVKNAIVTQTSKGLQAIEAAPLQGRFKVWLLQFVLLPRLLWPLTIYEIGLSAVEGLERKINRHTRTWLGLPPALSSVALYSRSASLRLPLRSIVEEYKLSKIRTQWMLNNSADNRIREVNPLLRSGKKFRAQKEIDESVNVLMFEEVRGPIQTDRHAVGWNHFQKWSQASSSTRGAMIGQERRRKEEQDRVTKAVQLAQQGKWTTWEDVIQRSLTWSDLWKLSPLRLAFAVRSIYDQLPSKDNLRRWGLVEDSKCGLCDGAETLHHVLSNCTYALAHGRYTWRHNQVLREVCEATKAAVTKANSRAISKQRKIYFLREGHAHLCRKRCKTPRKDILAEANDWTVAADLEGMRHYPQVLIESGKRPDMVLMSPSSDAIILVELTVPWEDRMQYSNALKAEKYADLAVDLEAKGFRVDLFPIEVGARGVVGKSTYAFLTKIGLSSRERTKTMTKMSEAAEAASFWIWQMRGKETSSDATAKGPEKAADLRSE

SEQ ID NO: 22049 - protein, 1215 aa, Poecilobdella manillensis
MRPTPGERQGFQRAETFEDGGPSLRIPVGKLRGGVSSIYTTAMAIWHSGIDRGTTRRAWWRPGETGDVSERRGRDWASDPRDKTTATSPDYEICPHGPSRKEGENDGPSMDSRLDLATNRLPSTTNAPDNGMSGSRCVCGRAFATERGLKIHRSKTNCGCKAQRQRTTAKVRVDKTPDDTGPESHHSSACVRVSCPGQDPPRARIRFPRGSDKESWSGLDEELKRGLKKVLKDGSVKSFSDFIYDKCVGKFGVIPAKEPQKVHESRRQRDINRLKGEKKALRRRWKMANEDEREGLSVLWEDVKRRVRDLRGAERARKRKYERRKAMRSFFSDPYKYGRSLLDPPKSGVLTVEQEKLEEHLVRTYSDLLQHEALQERLDIPAVPLPASPFCMASPSLEEVRRVVRKARNRSAPGPNGVPYLLYKRCPKTLYLLYSLVEGAWSSATIHDEWKKAEGVYIPKEKDSRDLNQFRPISLLNVEGKIFFSIMASRLTEFVMANQYVDISVQKGGVPGVPGCIEHTSMIWEAIQRARRGRLSLYVVWLDLANAYGSVPHQLLWKTLEAHHVPQPVIRILQEYFNGFMMRFSTQAYTTKWVPLQVGIAMGCAISPTLFVLAMQILLKAVGSDIPEAHIGKGVYMPPIKAFMDDTTLIMNRKRVVQETLDKLDDLLGWCRMAFKPAKSRSLSLVRGKICRDAFFEVAGQRIPTVSEEPVKSLGRMFDDSLTDKSMKNAIVTQTSKGLQAIEAAPLQGRFKVWLLQFVLLPRLLWPLTIYEIGLSAVEGLERKINRHTRTWLGLPPALSSVALYSRSASLRLPLRSIVEEYKLSKIRTQWMLNNSADNRIREVNPLLRSGKKFRAQKEIDESVNVLMFEEVRGPIQTDRHAVGWNHFQKWSQASSSTRGAMIGQERRRKEEQDRVTKAVQLAQQGKWTTWEDVIQRSLTWSDLWKLSPLRLAFAVRSIYDQLPSKDNLRRWGLVEDGKCGLCDGAETLHHVLSNCTYALAHGRYTWRHNQVLREVCEATKAAVTKANSRAISKQRKIYFLREGHAHLCRKRCKTPRKDILAEANDWTVAADLEGMRHYPQVLIESGKRPDMVLMSPSSDAIILVELTVPWEDRMQYSNALKAEKYADLAVDLEAKGFRVDLFPIEVGARGVVGKSTYAFLTKIGLSSRERTKTMTKMSEAAEAASFWIWQMRGKETSSDAIAKGPEKAADLRSE

SEQ ID NO: 22050 - protein, 966 aa, Poecilobdella manillensis
MAIWHSGIDRGTTRRAWWRPGKTGDVSERRGRDWASDPRDKTTATSPDYDICPHGPSRKEGENDGPSMDSRLDLATNRLPSTTNALDNGMSGSRCVCGRTFATERGLKIHRSKTNCGCKAQRQRTTAKVRVDKTPLPASPFCMASPSLEEVRRVVRKARNRSAPGPNGVPYLLYKRCPKTLYLLYSLVEGAWSSATIHDEWKKAEGVYIPKEKDSRDLNQFTPISLLNGEGKIFFSIMASRLTEFVMANQYVDISVQKGGVPGVPGCIEHTSMIWEAIQRARRGRLSLYAVWLDLANAYGSVPHQLLWKTLEAHHVPQPVIHILQEYFNGFMMRFSTQAYTTKWVPLQVGIAMGCAISPTLFVLPMQILLKAVGSDIPEAHIGKGVYMPPVKAFMDDTTLIMNRKRIVQETLDKLDDLLGWCRMAFKPAKSRSLSLVRGKICRDAFFEVAGQRIPTVSEEPVKSLGRMFDDSLTDKSMKNAIVTQTSKGLQAIEAAPLHGRFKVWLLQLVLLPRLLWPLTIYEIGLSAVEGLKRKINRHTRTWLGLPPALSSVALYSRSASLRLPLRSIVEEYKLSKIRTQWMLNNSADNRIREVNPLLRSGKKFRAQKEIDESVNVLMFEEVRGPIQTDRHAVGWNHFQKWSQASSSTRGAMIGQERRRKEEQDRVTKAVQLAQQGKWTTWEDVIQRSLTWSDLWKLSPLRLTFAVRSIYDQLPSKDNLRRWGLVEDAKCGLCDGAETLHHVISNCTYALAHGRYTWRHNQVLREVCEATKAAVTRANSRAISKQRKIYFLREGHAHLRRKRCKTPRKDILAEANDWTVAADLEGMRHYPQVLIESGKRPDMVLMSPSSDAIILVELTVPWEDRMQYSNALKAEKYADLAVDLEAKGFRVDLFPIEVGARGVVGKSTYAFLTKIGLSSRERTKTMTKMSEAAEAASFWIWQMRGKETSSDATAKGPEKAADLRSE

SEQ ID NO: 22051 - protein, 929 aa, Poecilobdella manillensis
MANEDEREGLSVLWEDVKRRVRDLRGAERARKRKYERRKAMRSFFSDPYKYGRSLLDPPKSGVLTVEQGKLEEHLVRTYSDLLQHEALQERLDIPAVPLPASPFCMASPSLEEVRRVVRKARNRSAPGPNGVPYLLYKRCPKTLYLLYSLVEGAWSSATIHDEWKKAEGVYIPKEKDSRDLNQFRPISLLNVEGKIFFSIMASRLTEFVMANQYVDISVQKGGVPGVPGCIEHTSMIWEAIQRARRGRLSLYVVWLDLANAYGSVPHQLLWKTLEAHHVPQPVIRILQEYFNGFMMRFSTQAYTTKWVPLQVGIAMGCAISPTLFVLAMQILLKAVGSDIPEAHIGKGVYMPPIKAFMDDTTLIMNRKRVVQETLDKLDDLLGWCRMAFKPAKSRSLSLVRGKICRDAFFEVAGQRIPTVSEEPVKSLGRMFDDSLTDKSMKNAIVTQTSKGLQAIEAAPLQGRFKVWLLQFVLLPRLLWPLTIYEIGLSAVEGLERKINRHTRTWLGLPPALSSVALYSRSASLRLPLRSIVEEYKLSKIRTQWMLNNSADNRIREVNPLLRSGKKFRAQKEIDESVNVLMFEEVRGPIQTDRHAVGWNHFQKWSQASSSTRGAMIGQERRRKEEQDRVTKAVQLAQQGKWTTWEDVIQRSLTWSDLWKLSPLRLAFAVRSIYDQLPSKDNLRRWGLVEDGKCGLCDGAETLHHVLSNCTYALAHGRYTWRHNQVLREVCEATKAAVTKANSRAISKQRKIYFLREGHTHLCRKRCKTPRKDILAEANDWTVAADLEGMRHYPQVLIESGKRPDMVLMSPSSDAIILVELTVPWEDRMQYSNALKAEKYADLAVDLEAKGFRVDLFPIEVGARGVVGKSTYAFLTKIGLSSRERTKTMTKMSEAAEAASFWIWQMRGKETSSDAIAKGPEKAADLRSE

SEQ ID NO: 22052 - protein, 929 aa, Poecilobdella manillensis
MANEDEREGLSVLWEDVKRRVRDLRGAERARKRKYERRKAMRSFFSDPYKYGRSLLDPPKSGVLTVEQEKLEEHLVRTYSDLLQHEALQERLDIPAVPLPASPFCMASPSLEEVRRVVRKARNRSAPGPNGVPYLLYKRCPKTLYLLYSLVEGAWSSATIHDEWKKAEGVYIPKEKDSRDLNQFRPISLLNVEGKIFFSIMASRLTDFVMANQYVDISVQKGGVPGVPGCIEHTSMIWEAIQRARRGRLSLYVVWLDLANAYGSVPHQLLWKTLEAHHVPQPVIRILQEYFNGFMMRFSTQAYTTKWVPLQVGIAMGCAISPTLFVLAMQILLKAVGSDIPEAHIGKGVYMPPIKAFMDDTTLIMNRKRVVQETLDKLDDVLGWCRMAFKPAKSRSLSLVRGKICRDAFFEVAGQRIPTVSEEPVKSLGRMFDDSLTDKSMKNAIVTQTSKGLQAIEAAPLQGRFKVWLLQFVLLPRLIWPLTIYEIGLSAVEGLERKINRHTRTWLGLPLALSSVALYSRSASLRLPLRSIVEEYKLSKIRTQWMLNNSADNRIREVNPLLRSGKKFRAQKEIDESVNILMFEEVRGPIQTDRHAVGWNHFQKWSQASSSTRGAMIGQERRRKEEQDRVTKAVQLAQQGKWTTWEDVIQRSLTWSDLWKLSPLRLAFAVRSIYDQLPSKDNLRRWGLVEDGKCGLCDGAETLHHVLSNCTYALAHGRYTWRHNQVLREVCEATKAAVTKANSRAISKQRKIYFLREGHAHLCRKRCKTPRKDILAEANDWTVAADLEGMRHYPQVLIESGKRPDMVLMSPSSDAIILVELTVPWEDRMQYSNALKAEKYADLAVDLEAKGFRVDLFPIEVGARGVIGKSTYAFLTKIGLSSRERTKTMTKMSEAAEAASFWIWQMRGKETSSDATAKGPEKAADLRSE

SEQ ID NO: 22053 - protein, 1243 aa, Leptinotarsa texana
MEMAKQLEPCKQKNKCIMVMDSLKRKSPGLSPQSDYPGGDSIAVTVGATSANNINTPTIECNPPRDVAHTAEAMPAPPIVNNERITLLFPVEGQHDCITCRQSGGIKFLQTAKQVEQHMDADHSNLKFVWKCRGCNKDFKNWQGVNIHQRYCSGIVPVEQGDYPCASCPRIFTAQRGLATHERHEHPEVRNQARLKSAEPSAPKPRKVLEGGWTIEETRLLEELEVRYSGERFINKALEPYFPGKTNKQISSKRSDLRRRQVRREEAANPREPTLHDLTGDERATSDSESDSGSEENHSDMTNITDATYNTNNDEGIFNIFQPVPEILVGEEEEVTWRRTLAASVVRSYHELKNKLKGREYPELALRLVSVAESIVRDPARIPEACLESLEQAVEKLTDLMSREKPAERQGIPGKSQKEGKRASSNRRTNRRKRNFEKVQHLAEKDMKHLADLIVKDELYELEQPRTSLPKTEDIESLYSTLWSNREQTTFPGSWGRKVEALRGVTVIPPIEIAKIRSRYKRLKAKTACGPDGVEKSDISEKALVIMTLLFNCCLAAGYYPKSWKINRTALIPKCGKDPLLIANWRPITISSVISRLFSGTIDESLRKHVEFSYRQKGFTSEAGTANNVAILQKVLAVMKKEEGGVCSLLDISKAFDTVPHEAIVPAVTRLGVPSYIASYIASSYEGCKTVIKGCDGNVELELLRGVKQGDPMSPFLFNAVVDPLLTFLDNRGKGIAIGDREVSVLAFADDLTLVNKSVKEAEDDILTTVDYFKSLGMNLSIAKCCSFKIRALRKTWTIENPELKIRGENVEYVGPDKSYRYLGIDFTPWKGSISGGDSLRRLVDCVSRTAGVKTLKPMQKLELIKKYLYPKYRYALTLDMPAKTALKQADDEIRQIIRRIFHLADSLTNYFVYTRTRDGGLGLPRLETSIQLAVLRRHISMTKSQDEVVRGVAESPDQVNIAVKAARNLRIQLPDNIKECQAIRDRLLQEEFTKWKSLSSQGVGVLYYRDNICSHKWLSRRDLLTESRRINAIRLRTNTFGNRTTLARAGYEGPIDCRHCRLRPESLSHVLGGCPRWKDRVIHRHNEIQNIVESEITKSYPESRILSEPTLLTVAGERRKPDLVIKNRERVFIVDVAVCYEDGASLKAIAEVKRDKYEEVKEAALEEMGGRSVEVLPFVVGARGIVPRFTVNALRRLGIYDRSLVMTISMVALRASINLACDFVGTDPLQEAEEGYNINLTP

SEQ ID NO: 22054 - protein, 837 aa, Leptinotarsa defecta
MSREKPAERQGIPGKNQKEGKRASSNRRTNRRKRNFEKVQHLAEKDMKRLADLIVKDELYDLEQPRTSLPKTEDIESLYSTLWSNREQTTFPGSWGRKVEALRGVTVIPPIEIAKIRARYRRLKAKTAAGPDGVEKSDISEKALTIMTLLFNCCLAAGYYPKSWKINRTALIPKCGKDPLLIANWRPITISSVISRLFSGTIDESLRNHVEFSYRQKGFTSEAGTANNVAILQKVLAVMKKEEGGVCSLLDISKAFDTVPHEAIEPAVTRLGVPSYIASYIARSYEGCKTVIKGCDGNVELELLRGVKQGDPMSPLLFNAVVDPLLTFLDNRGEGIAIGDKEVSVLAFADDLTLVNKSVKEAEADILTTVDYFKSLGMNLSISKCCSFKIRALRKSWTIENPELKIRGEDVEYAGPDKSFRYLGIDFTPWKGSISGGDSLRRLVDCVSRTAGVKTLKPMQKLELIKKYIYPKYRYALSLDVPTKTALKQADDEIRQIIRRIFHLADSLTNYFVYTRTRDGGLGLPRLETAIQLAVLRRHISMTTSKDEVVRSIAESPDQVNIAVKAARNLRIQLPDNIKECQTIRDRLLQAEFTKWKSLSSQGVGVLYYRDNICSHKWLSRRDLLTESRRINAIRLRTNTFGNRTSLARAGYEGPIDCRHCRLRPESLSHVLGGCPRWKDRVIHRHNEIQNIVESEITKSYPESRILREPTLQTVAGERRKPDLVIKNRERVFIVDVAVCYEDGASLKAIAEVKQTKYEEVKEAALEEMGGRSVEVIPFVVGARGIVPRFTVNALRKLGIYDRSLVMTISMVALRASISLACDFVGTDPLHEAEEQV

SEQ ID NO: 22055 - protein, 1224 aa, Leptinotarsa lineolata
MVMEPLERNCPGLAPRSDYPGGDSRANPVEAMSAPNTKSLAIELSPPRDVACSSEAAPAPPTNTNEKLILMFPVEGQYDCITCRQSGGITFLQTAKQVEQHVLSDHPTFKFAWQCRRCQKEYKSWKGVNIHKSHCKGEVAPVIQGDFPCTSCPRTFTAQRGLSTHERHEHPEVRNRARIESAKPRVAKPRKVLEGGWTVEEERLLVELETQYSEVKFINKALEPHFPGKTNRQIRDKRSDLRRRQVRREESDNVRRPTLHTLTGDDRASSDSEMHSESESSNSIRTKTTDNDNYSNCDNGMLNIFQPVPEVLDGEEDEVTWRRTLATSVVSSYHKLKDKLKGMEYPKLALRLVTIAESIARDPAHIPEDCPESLEQAVEKLTDLVSREKPAGRQGFPGKIQSKGKQTSSNRRANRRVQNFRRVQQLADKDMKRLADLIVKDELYDLEQPKTSLPKKEDIESLYSTLWSNREPTTFPANWGRKVSTLRGATVIPPIEIGKIRARYKRLKAKTAAGPDGVEKSDISEKALTIMTLLFNCCLAAGYYPNSWKRNRTSLIPKEGKDPLSVANWRPITISSIISRLFSGTIDESMRRHVDFSYRQKGFTSEAGTANNVALLQKVLANMKRTEGGVCSILDISKAFDTVPHEAIEPAIIRLGIPPYIAGYIARSYEGSKTVIRGSDGSVGIELLRGVKQGDPMSPFLFNAVVDPLLTFLDNRGKGIAIGEQKISVLAFADDLTLVSKSVEEAKDDILTTVDYFKSLGMNLSIAKCCSFKIRATRKSWAIENPELKIRGENVEYVGPDKSFRYLGIDFTPWKGSVSGGSSLRRLVDCINRTAGVKTLKPMQKLELVKKYIIPKYRYALSLDAPSKTALKQADDEIRQIIRRIFHLADSLTNYFFYTQTKDGGLGLPRLETVIQLAVLRRHVSMMNSSDEVVRGVAACPDQVKAAEMAARNLRIQLPDSIKECQAIRERQLQLEFTNWKRLSSQGVGVLYYRDNICSHKWLSRRDLLTESRRINAIRLRTNTFGNRTTLARAGYDGPIECRHCRLRPEALSHVLGGCPRWKDRVIHRHNEIQSIVESEIIKRHPDARILCEPTLLSNAGERRKPDLVIKNRERVFVVDVAICYEDEASLKAIAEVKQKKYEEVKEAALKEMGGRTVEVIPFVVGARGIVPRFTVNALRRLDIYDRSLVTTISMVTLRSSLSLACDFVGTDPQQEVESSQHPN

SEQ ID NO: 22056 - protein, 1226 aa, Leptinotarsa juncta
MVMDSLERNSPGLSPQSDYPGGDSTAVIVGATSANNTNTLTIECDPPRDVAHTTEAMPAPPRVNNERITLLFPVEGQHDCITCRQSGGIKFLQTAKQVEQHMDADHSNLKFVWKCRGCIKEFKNWQGVNIHQHYCSGTIPVEQGDYPCTSCPRTFSAQRGLATHERHEHPEVRNQARLKSAEPSAPKPRKALEGGWTLEEVRLLEELEIRYSGERFINKVLEPYFPGKTNKQISSKRSDLRRRQVRREEAANPREPTLHDLTGDERATSDSESDSDSEENQPDMTNIPEETCNTNIDNGILNIFQPVPEILAGEEEEVTWRRTLATSVIRSYHELKNKLKGREYPDLALRLVSVAESIVRDPARIPEACLESLEQAVEKLTDLMSREKPAERQGIPGKSQKEGKRTSSNRRANRRQRNFVKVQLLAEKDMKRLADLIVKDELYDLEQPKTSLPKTEDIESLYSTLWSNREQTTFPGSWGRKVEALRGVTVIPPIEFAKIRARYKRLKAKTAAGPDGVEKSDISEKALVIMTLLFNCCLAAGYYPKSWKINRTALIPKCGKDPLLIANWRPITISSVISRLFSGTIDESLRKHVEFSYRQKGFTSEAGTANNVAILQKVLAVMKKEEGGVCSLLDISKAFDTVPHEAIVPAVTRLGVPSYIASYIAGSYEGCKTVIKGCDGNVELELLRGVKQGDPMSPFLFNAVVDPLLTFLDNQGKGIAIGDREVSVLAFADDLTLVNKSVKEAEDDILTTVDYFKSLGMNLSIAKCCSFKIRALRKTWTIENPELKIRGENVEYVGPDKSYRYLGIDFTPWKGSISGGDSLRRLVDCVNRTAGVKTLKPMQKLELIKKYIYPKYRYGLTLDMPSKTALKQADDEIRQVIRRIFHLADSLTNYFVYTRTRDGGLGLPRLETSIQLAVLRRHISMTESQDEVVRGVAESPDQVNIAVKAARNLRVQLPDNIKECQAIRDRLLQAEFTKWKSLSSQGVGVLYYRDNICSHKWLSRRDLLTESRRINAIRLRTNTFGNRTTLARAGYEGPIECRHCRLRPESLSHVLGGCPRWKDRVIHRHNEIQNIVESEITKSYPESRILNEPTLLTVAGERRKPDLVIKNRERVFIVDVAVCYEDGASLKAIAEVKRDKYEEVKEAALEEMGGRSVEVLPFVVGARGIVPRFTVNALRRLGIYDRSLVMTISMVALRASISLACDFVGTDPLQEAEEGYNINLTP

SEQ ID NO: 22057 - protein, 1052 aa, Armadillidium vulgare
MDRQRRGRREVENPEAEVQPAVGSVCGACGREFANYGGMRVHYRRMHPEQFHADEIAARVVVKGRWPHSEVVALMNHEATLILNGLTDRINQRLAELHTGRYLEAIKGRRRRESYRDGVASLVDSMLAEQNPPRGPDPVPDPAGDRDLVLPGARPEEVDPAVGIGWREAMTTAVDTLLVEANGVEGSTPVRLNAQEDVGQNTETLLNAVLVEAGVVPRRAEKIAEPPPRPPRGGNEPPLGARNLRRWKWEKVQRLWSTSRGRAADAVLNDTIIQQDNIPQEDKIRYWRDIFGTESVPDNRRSGKVNPNYDLVEPVNTDEVTYALRGMAETSPGPDGVKLGALKGVRKALLAALFNQVWVSGDLPPSMKEARTVLIPKGATPEGPGEFRPITITSVITRCFHRILADRCMRGTAISPRQRGFVKADGCAENIVVLGSLLSKSQQERECSLFGAFVDLRKAFDSVSHNSIARCLLRIGVPEQLVGYIVAQYTHASTTLFGNQLPINLGVRQGDPLSPFVFNCLLDSVLAGIPKGLGVPMGDGEVTHLAFADDVILLSSSRSGLQAILNHYLEGVSLIGLHPGMNKCASFGIQLDGNWKRWLWDTTPFAFRDQPIPALNCRETYRYLGSEIGMSKQGFATVHANFARKLMRVKNGPLRPQQKLWIVREKLISSLWHELVFAFGITAGQLEKLDRTSRDFIRQILHLPKDVSLGFFHSSIKGGGMGIPRISTRVPVLRSKRLDKLVGLPDDVLRSVTDSGFFQKESQKAARWRVKGERIGGELGELDLHRRLLYSSRDGRGLAGVAEASTNSHDWLRGCTALFNGRDFIDSLKLRGNLLATGERKLRGKGTPPCSVGCRVGDSLGHWLQGCPEGHHLRVARHDKLVNYVASQLVGKGHRVAVEPAIPTPAGMRKPDLVIETRDGSTHVVDVQIVADSAVTSLKAAHERKVAYYNTPPVLEWVDRWRQSTSPRPGLRAEVGSLTISWRGYLAADSYLTMRKLNLGSYHQRVMIVKAMQGSLAIARSRLRRGLRKATFRLMKCGGIGDGVLGNPWRLA

SEQ ID NO: 22058 - protein, 866 aa, Armadillidium nasatum
MAMSAAVDSLLVEASGVEGSTPVRLNAGEDVLVNTEALLNAVLVEAGVVPRRAENIAEPPARPPREGNPPPLGARNLRQWKWEKVQRLWQKSRGRAADVVLNDRIIQQDNIPEEDKTRYWREIFGTESVPDDRRSGDVNSNHLLAEPVTTAEVTWALRGMAETSPGPDGVKLNSIKKVRGALLAALFNQIWLTGDLPPSMKGARTVLIPKSAAPEGPGEFRPITITSVLTRCFHRILADRCSRGTAISPRQRGFVKADGCAENIVVLSSLLSNAQQERKGSLYGAFIDLRKAFDSVSHNSIARCLLRVGVPEQLVGYIVAQYTHATTTLNGEQLPINRGVRQGDPLSPFVFNCLLDSVLAEIPEGLGVPVGDGEVSHLAFADDVVLLSSSRSGLQAILEHYLGGVSLIGLHPGMNKCSTFAIVVDGKRKRWLWDKTPFAVGDQPMPALSCRETYRYLGAEIGMRKQGFAEVHANFARRLMRVKNGPLRPQQKLWIVREKLIPSLWHELVFSFGITAGQLEKLDRTSRDFTRQILHLPKDVSLGFFHSSIKEGGLGIPRISTRVPVLRSKRLDKLADSPDNVLQAVMETGFFLKESQKAARWRVKGMRIGGELGERDLHRDLLYSSRDGRGLSGVEEASTNSHEWLRGCTNIFSGRDFIDSLKLRGNLIATGERRLRGRGTPPCPVGCRVGDSLGHWLQGCPESHLLRVSRHDKIVNYVAAQLREKGHRVAVEPAVPTPAGMRKPDLVIETREGTTHVVDVQIVSDSNVTSLRAAHERKVAYYNTPPVLEWVERWRQGTRPRPDLRAEIGSITISWRGYLAANSSLTMRRLGLNSYQQGIIIVKAMQGSLAIVRSRLRRGLPRWQAG

SEQ ID NO: 22059 - protein, 912 aa, Armadillidium nasatum
MVDSMLAEQNPPRGPDPVPDPAVDRDPVLPGVRPEEAGPVVGIGWREAMTTAVDNLLVEANEVEGSTPIQLNAGEDVLNNTETLLNAVLVEAGVVPRRAEVRAEPPPRPHRGGNEPPLGARNLRRWKWEKVQRLWCTSRWRAADAVLNDTIIQQDNILEEDKVRFWREIFGTESVPDNRQSGEVNPNYDLVEPVNTEEVTCALRGMAETSPGPDGVKLGALKRVRKTLLAALFNQVWVSGDLPPSMKEARTVLIPKGATPEGPGEFRPITITSVITRCFHRILADRCMRGTAISPRQRGFVKADGCAENIVVLSSLLSKSQQDRECSLFGAFIDLRKAFDSVSHHSIARCLLRVGVPEQLVGYIVAQYTHASTTLFGNQLPINRGVRQGDPLSPFVFNCVLDSVLAGIPKGLGVPMGDGEVNHLAFADDVILLSSSRAGLQAILEHYLGGVSLIGLHPGMNKCASFGIQIDGKRKRWLWDNTPFAVGEQPIPALSCRETYRYLGSEIGMLKQGFATVHANFARKLMRVKNGPLRPQQKLWIVREKLIPSLWHELVFSFGITAGQLEKLDRTSRDFIRQILHLPKDVSLGFFHSPIKDGGLGMPRISTRVPVLRSKRLDKLADQPDDVLRSVTDSGFFQKESQKAARWRVKGERIGGELGELDLHRRLLYSSRDGRGLAGVAEASTNSHDWLRGCTALFNGRDFIDSLKLRGNLLATGERKLRGRGTPPCSVGCRVGDSLGHWLQGCPEGHHLRVARHDKLVNYVASQLVGKGHRVAVEPAIPTPAGMRKPDLVIETRNGRTHVVDVQIVADSAITSLKAAHERKVAYYNTPPVLEWVERWRQSTSPRPDLRAEVGSLTISWRGYLAADSSHTMRKLNLGSYQQGIMIVKAMQGSLAIARSRLRRGLRRQLVG

SEQ ID NO: 22060 - protein, 865 aa, Armadillidium vulgare
MSAAVDSLLVEANGVEGSTPVHLNAGDDVHNNTETLLNAVLAEAGVVPRRAENIAQPPTRPPREGNPPPFGARNLRQWKWEKVQRLWQTSRGRAADVVLNDRIIQQDAIPEEDKTRYWREIFGTESVPDDRRSGEVNSNHLLAEPVNTAEVTWALRGMADTSPGTDGVKLNSIKKVREALLAALFNQIWMTGDLPPSMKGARTVLIPKSASPEGPGEFRPITITSVLTRCFHRILADRCSRGMTISPRQRGFVKADGCAENIVVLSSLLSNAQQERKGSLYGAFIDLRKAFDSVSHNSIARCLLRVGVPEQLVGYIVAQYAHATTTLNGEQLPINRGVRQGDPLSPFVFNCLLDSVLAEIPEGLGVPLGDGEVSHLAFADDVVLLSSSRSGLQAILEHYLGGVSLIGLHPGMNKCSSFAIVVDGKRKRWLWDKTPFAVGGQPMPALNCRETYRYLGTEIGMRKQGFAEAHANFARRLMRVKNGPLRPQQKLWIVREKLIPSLWHQLVFSFGITAGQLEKLDRTSRDFIRQILHLPKDVSLGFFHSSIKEGGLGIPRISTRVPILRSKRLDKLADSPDNVLQAVMETGFFRKESQKAARWRVEGMRIGGELGETDLHRNLLYSSRDGRGLSGVEEASTNSHEWLRGCTNLFRGSDFIDSLKLRGNLIATGERRLRGRGTPPCSVGCRVGDSLGHWLQGCPESHLLRVSRHDKIVNHVAAQLREKGHRVVVEPAIPTPAGMRKPDLVIETREGITHVVDVRIVSDTNVTSLRAAHERKVAYYNAPPVLKWVERWRQSTSPQPDPRAEVRSITISWRGYLAANSSLTMRKLGLNSYQQGIIIVKAMQGSLAIVRNRLRRGLPRWQAGQ

SEQ ID NO: 22061 - protein, 882 aa, Armadillidium nasatum
MTTAVDNLLVEANEVEGSTPIQLNAGEDVRNNTDTLLNAVLVEAGVVPRRAETRAEPPPRPPRGGNEPPLGARNLRRWKWEKVQRLWCTSRWRAADAVLNDIIQQDNILEEDKVRFWREIFGTESVPDNRQSGEVNPNYDLVEPVNTEEVTCALRGMAETSPGPDGVKLGALKRVRKTLLAALFNQVWVSGDLPPSMKEARTVLIIKGATPEGPGEFRPITITSVITRCFHRILADRCMRGTTISPRQRGFVKADGCAENIVVLSSLLSRSQQDRECSLFGAFIDLRKAFDSVSHHSIARCLLRVGVPEQLVGYIVAQYTHASTTLFGNQLPINRGVRQGDPLSPFVFNCVLDSVLAGIPKGLGVPMGDGEVNHLAFADDVILLSSSRAGLQAILEHYLGGVSLIGLHPGMNKCASFGIQIDGKRKRWLWDNTPFAVGEQPIPALSCRETYRYLGSEIGMLKQGFATVHANFARKLMRVKNGPLRPQQKLWIVREKLIPSLWHELVFSFGITAGQLEKLDRTSRDFIRQILHLPKDVSLGFFHSPIKDGGMGIPRISTRVPVLRSKRLDKLADQPDDVLRSVTDSGFFQKESQKAARWRVKGERIGGELGELDLHRRLLYSSRDGRGLAGVAEASTNSHEWLRGCTALFNGRDFIDSLKLRGNLLATGERKLRGRGTPPCSVGCRVGDSLGHWLQGCPEGHHLRVARHDKLVNYVASLLVGKWHPVAVEPAIPTPAGMRKPDLVIETRNGRTRVVDVQIVADSAITSLKAAHERKVAYYNTPPVLEWVERWRQSTSPRPDLRAEVGSLTISWRGYLAADSSHTMRKLNLGSYQQGIMIVKAMQGSLAIARSRLRRGLRRQPCRLMKCRGTDWGLFSGAPFDL

SEQ ID NO: 22062 - protein, 1192 aa, Dysdera silvatica
MYAVLSFRFCFLACSRITKSMVSCSLHPRVLFRHPFCSSVSKLLLSLCRLISSEMHPVSILYRVLRHVMEYIYIYIYISDSDDMNHNENMNGESVVALLNQNRIRTLSRGVCSKNMQQSLLGGAGSCSGAYNCTATRTNRAHSALQPSIGATTRAERARQRMSWTIDMNTYIMRTYYTITKLETDMTNYRPTLHAKFAQQYPHLDISIERITTQRRNIITRNLLAEPILQRLRDEVANDLANTSTSVANPEVPEAPAIGAREPLQTSIEQEERRDVEKMEEGFQCALAEYEGSDDATKPRIPRQPASWKLCKATKILNEHTLPLHLQKHNSLQEIHTAIYCATVAASRVNGYEVRNEDRNNRGSKTQPPWQVRLEKRIEELRRSIGRITQYMQGNRSKKLVRKVKMALKRNRIHTRHEEPNKHISEYLDTLKQKLGVYARRLRRYKDCTNRKQQNMQFQANQKAFYRKLQETSASQDKYEAPKPAVIETFWKTLWSNEVQHKSAPWIQQEMEATRGIEEMEYTGITIEELQQVIQRTHNWKAPGIDGIHNFWYKKFTSAHGPLAKELTAIIEDPSKMPEFLCKGITYLLPKDQDTSNPAKYRPITCLNTLYNILTGCISEKISRHSESNNLMAEEQKGCQKGTLGCKEQLTIDSVILEQARKQKRKLNTAYIDYKKAFDSVPHSWLLEILSIYKVHPSIIRFLQSSMKQWRTRLQLNTPDSKIKTAEIPIRRGIFQGDALSPQWFCLALNPLSRMLNASKYGYMLKKDKRNLHKVSHLMYVDDIKLYAPTITQLRQLISITETFSKDIGMEFGLDKCKIQKNSKEDLPGIELEDGRLLKTLDEGETYKYLGIMQKRQQEHKKVKVQLTQAFQERLRSIVKTKLSGKNTTQAINAYAVPVLTYSFGIIKWSNTELEQLQRKMRTIQRRAGQLHPATAIERQTLPREEGGRGQADLKDLHDKQIQSMRQYFQLKSPRSPLIQAIIQADANYTPLNLCSTEERVLETANEQKLRTWAGKPLHGRHYNDLQQPHVDKKASTSWLAKGTLQPETEGFMLAIQDQVIATRNNQKFIQRKDIESDKCRHCHAASETIQHVTAGCKILAQSDYKHRHDQVAKIVHQKLAANAGFLTEKCPYYKYGPETVHENETHKLYWDRAIITDKTVPHNRPDITLVDKSNKTAYLTDIAVPTPITYG

SEQ ID NO: 22063 - protein, 1240 aa, Dysdera silvatica
MNHNENMNGASVVALLNQNRIRTLSRGVCSKNMQQSLLGGAGSCSGAYNCTATRTNRAHSALQPSIGATTRAERARQRMSWTIDMNTYIMRTYYTITKLETDMTNYRPTLHAKFAQQYPHLDISIERITTQRRNIITRNLLAEPILQRLRDEVANDLVNTSTSVANPEAPAIGAREPLQTSIEEEERRDVEKMEEGFQCALAEYEGSNAAARPRIPRQPEYWKLCAATKILNEHTLPLHLQKHNSLQEIHTAIYCATVAASRVNGYEVRNEDRNNRGNKAQPPWQVRLEKRIEELRSSIGRITQYMQGNRSKKLVRKVKMALKRNRIHTRHEEPNKHISEYLDTLKQKLGVYARRLRRYKDCTNRKQQNMQFQANQKAFYRKLQETSASQDKYEAPKPAVIETFWKTLWSNEVQHKSAPWIQQEMEATRGIEEMEYTGITIEELQQVIQRTHNWKAPGIDGIHNFWYKKFTSAHGPLAKELTAIIEDPSKMPEFLCKGITYLLPKDQDTSNPAKYRPITCLNTLYKILTGCISEKISRHSESNNLMAEEQKGCQKGTLGCKEQLTIDSVILEQARKQKRKLNTAYIDYKKAFDSVPHSWLLEILSIYKVHPSIIRFLQSSMKQWRTRLQLNTPDSKIETAEIPIRRGIFQGDALSPQWFCLALNPLSRMLNTSKYGYMLKKDKRNLHKVSHLMYVDDIKLYAPTITQLRQLISITETFSKDIGMEFGLDKCKIQKNSKEDLPGIELEDGRLLKTLDEGETYKYLGIMQKRQQEHKKVKVQLTQAFQERLRSIVKTKLSGKNTTQAINAYAVPVLTYSFGIIKWSNTELEQLQRKMRTIQRRAGQLHPATAIERQTLPREEGGRGQADLKDLHDKQIQSMRQYFQLKSPRSPLIQAIIQADANYTPLNLCSTEERVLETANEQKLRTWAGKPLHGRHYNDLQQPHVDKKASNSWLAKGTLQPETEGFMLAIQDQVIATRNNQKFIQRKDIESDKCRHCHAASETIQHVMAGCKILAQSDYKHRHDQVAKIVHQKLAANAGFLTEKCPYYKYEPETVHENETHKLYWDRAIITDKTVPHNRPDITLVDKSNKTTYLIDIAVPNTNNIQTTYTTKITKYQDLRHEVRDIWGMEKILIIPLVISATGIVPKTLATNLEILNIDPNTYIEIQKATILNTCHIVRKFLDMALCPSQSLFPPRMGISMQELDNGKKERHRLVNTDMGKGMNVAINSSNLQKLKTLAS

SEQ ID NO: 22064 - protein, 1186 aa, Dysdera silvatica
MNHNENMNGASVVSLLNQNRVRTLSRGASSKNMQQSLLGGVGGCSGASNCTATRTNTAQSALQPSIGATTRAERPRQRMSWTIDMNTYIMRTYYTITKLETDMTNYRPTLHAKFAQQYPHLDISIERITTQRRNIITRNLLAEPILQRLRDEVANDLANTSTSVANPEAPAIGAREPLQPSIEEEERRDVEKMEEGFQCALAEYEGSDAATRPRIPRQPASWKLCKATKILNEHTLPLHLQNHNSLQEIHTAIYCAAVAASRANGYEVRNEGRSNRGNKAQPPWQVRLEKRIEELRSSIGRITQYMQGNRGKKLVRKVKMALKRNRIHTRHEEPNKHISEYLDTLKQKLGVYARRLRRYKDYTNKKQQNMQFQANQKAFYRKLRETPANKDKYEAPKPAEIETFWKTLWSNEVQHKSAPWIQQEMEATRGIEEMEYTGITIEELQQVIQRTHNWKAPGIDGIHNFWYKKFTSAHGPLAKELTAIIEDPSKMPEFLCKGITYLLPKDQDTSNPAKYRPITCLNTLYKILTGCISEKISRHSESNNLMTEEQKGCQKGTLGCKEQLTIDSVILEQARKQKRKLNTAYIDYKKAFDSVPHSWLLEILSIYKVHPSIIRFLQSSMKQWRTRLQLNTPDSKIETAEIPIRRGIFQGDALSPQWFCLALNPLSRMLNTSKYGYMLKKDKRNLHKVSHLMYVDDIKLYAPTITQLRQLISITETFSKDIGMEFGLDKCKIQKNSKEDLPGIELEDGRLLKTLDEGETYKYLGIMQKRQQEHKKVKVQLTQAFQERLRSIVKTKLSGKNTTQAINAYAVPVLTYSFGIIKWSNTELEQLQRKMRTIQRRAGQLHPATAIERQTLPREEGGRGQADLKDLHDKQIQSMRQYFQLKSPRSPLIQAIIQADANYTPLNLCSTEERVLETANEQKLRTWAGKPLHGRHYNDLQQPHVDKKASNSWLAKGTLQPETEGFMLAIQDQVIATRNNQKFIQRKDIESDKCRHCHAASETIQHVMAGCKILAQSDYKHRHDQVAKIVHQKLAANAGFLTEKCPYYKYEPETVHENETHKLYWDRAIITDKTVPHNRPDITLVDKSNKTTYLIDIAVPNTNNIQTTYTTKITKYQDLRHEVRDIWGMEKILIIPLVISATGIVPKTLATNLEILNIDPNTYIEIQKATILNTCHIVRKFLDMAH

SEQ ID NO: 22065 - protein, 994 aa, Dysdera silvatica
MEEGFQCALAEYEGSDAATRPRIPRQPASWKLCAATNILNEHTLPLHLQKHNSLQEIHTAIYCAAVAASRANGYEVRNEGRSNRGNKAQPPWQVRLEKRIEELRSSIGRITQYMQGNRSKKLVRKVKMALKRNRIHTRHEEPNKHISEYLDTLKQKLGVYARRLRRYKDYTNRKQQNMQFQANQKAFYRKLRETPANKDKYEAPKPAEIETFWKTLWSNEVQHKSAPWIQQEMEATRGIEEMEYTGITIEELQQVIQRTHNWKAPGIDGIHNFWYKKFTSAHGPLAKELTAIIEDPSKMPEFLCKGITYLLPKDQDTSNPAKYRPITCLNTLYKILTGCISEKISRHSESNNLMAEEQKGCQKGTLGCKEQLTIDSVILEQARKQKRKLNTAYIDYKKAFDSVPHSWLLEILSIYKVHPSIIRFLQSSMKQWRTRLQLNTPDSKIETAEIPIRRGIFQGDALSPQWFCLALNPLSRMLNTSKYGYMLKKDKRNLHKVSHLMYVDDIKLYAPTITQLRQLISITETFSKDIGMEFGLDKCKIQKNSKEDLPGIELEDGRLLKTLDEGETYKYLGIMQKRQQEHKKVKVQLTQAFQERLRSIVKTKLSGKNTTQAINAYAVPVLTYSFGIIKWSNTELEQLQRKMRTIQRRAGQLHPATAIERQTLPREEGGRGQADLKDLHDKQIQSMRQYFQLKSPRSPLIQAIIQADANYTPLNLCSTEERVLETANEQKLRTWAGKPLHGRHYNDLQQPHVDKKASNSWLAKGTLQPETEGFMLAIQDQVIATRNNQKFIQRKDIESDKCRHCHAASETIQHVMAGCKILAQSDYKHRHDQVAKIVHQKLAANAGFLTEKCPYYKYEPETVHENETHKLYWDRAIITDKTVPHNRPDITLVDKSNKTTYLIDIAVPNTNNIQTTYTTKITKYQDLRHEVRDIWGMEKIFIIPLVISATGIVPKTLATNLEILNIDPNTYIEIQKATILNTCHIVRKFLDMAH

SEQ ID NO: 22066 - protein, 1185 aa, Dysdera silvatica
MNHNENMNGASVVSLLNQNRVRTLSRGASSKNMQQSLLGGVGGCSGASNCTATRTNTAQSALQPSIGATTRAERPRQRMSWTIDMNTYIMRTYYTITKLETDMTNYRPTLHAKFAQQYPHLDISIERITTQRRNIITRNLLAEPILQRLRDEVANDLANTSTSVANPEAPASSAREPLQPSIEEERRDVEKMEEGFQCALAEYEGSDAATRPRIPRQPASWKLCKATKILNEHTLPLHLQNHNSLQEIHTAIYCAAVAASRANGYEVRNEGRSNRGNKAQPPWQVRLEKRIEELRSSIGRITQYMQGNRGKKLVRKVKMALKRNRIHTRHEEPNKHISEYLDTLKQKLGVYARRLRRYKDYTNKKQQNMQFQANQKAFYRKLRETPANKDKYEAPKPAEIETFWKTLWSNEVQHKSAPWIQQEMEATRGIEEMEYTGITIEELQQVIQRTHNWKAPGIDGIHNFWYKKFTSAHGPLAKELTAIIEDPSKMPEFLCKGITYLLPKDQDTSNPAKYRPITCLNTLYKILTGCISEKISRHSESNNLMTEEQKGCQKGTLGCKEQLTIDSVILEQARKQKRKLNTAYIDYKKAFDSVPHSWLLEILSIYKVHPSIIRFLQSSMKQWRTRLQLNTPDSKIETAEIPIRRGIFQGDALSPQWFCLALNPLSRMLNTSKYGYMLKKDKRNLHKVSHLMYVDDIKLYAPTITQLRQLISITETFSKDIGMEFGLDKCKIQKNSKEDLPGIELEDGRLLKTLDEGETYKYLGIMQKRQQEHKKVKVQLTQAFQERLRSIVKTKLSGKNTTQAINAYAVPVLTYSFGIIKWSNTELEQLQRKMRTIQRRAGQLHPATAIERQTLPREEGGRGQADLKDLHDKQIQSMRQYFQLKSPRSPLIQAIIQADANYTPLNLCSTEERVLETANEQKLRTWAGKPLHGRHYNDLQQPHVDKKASNSWLAKGTLQPETEGFMLAIQDQVIATRNNQKFIQRKDIESDKCRHCHAASETIQHVMAGCKILAQSDYKHRHDQVAKIVHQKLAANAGFLTEKCPYYKYEPETVHENETHKLYWDRAIITDKTVPHNRPDITLVDKSNKTTYLIDIAVPNTNNIQTTYTTKITKYQDLRHEVRDIWGMEKILIIPLVISATGIVPKTLATNLEILNIDPNTYIEIQKATILNTCHIVRKFLDMAH

SEQ ID NO: 22067 - protein, 995 aa, Dysdera silvatica
MYCIYIYIYIYIYIYMHSQQRARIPRQPASWKLCKATKILNEHTLPLHLQNHNSLQEIHTAIYCAAVAASRANGYEVRNEGRSNRGNKAQPPWQVRLQKRIEELRSSIGRITQYMQGNRSKKLVRKVKMALKRNRIHTRHEEPNKHISEYLDTLKQKLGVYARRLRRYKDYTNRKQQNMQFQANQKAFYRKLRETPANKDKYEAPKPAEIETFWKTLWSNEVQHKSAPWIQQEMEATRGIEEMEYTGITIEELQQVIQRTHNWKAPGIDGIHNFWYKKFTSAHGPLAKELTAIIEDPSKMPEFLCKGITYLLPKDQDTSNPAKYRPITCLNTLYKILTGCISEKISRHSESNNLMTEEQKGCQKGTLGCKEQLTIDSVILEQARKQKRKLNTAYIDYKKAFDSVPHSWLLEILSIYKVHPSIIRFLQSSMKQWRTRLQLNTPDSKIETAEIPIRRGIFQGDALSPQWFCLALNPLSRMLNTSKYGYMLKKDKRNLHKVSHLMYVDDIKLYAPTITQLRQLISITETFSKDIGMEFGLDKCKIQKNSKEDLPGIELEDGRLLKTLDEGETYKYLGIMQKRQQEHKKVKVQLTQAFQERLRSIVKTKLSGKNTTQAINAYAVPVLTYSFGIIKWSNTELEQLQRKMRTIQRRAGQLHPATAIERQTLPREEGGRGQADLKDLHDKQIQSMRQYFQLKSPRSPLIQAIIQADANYTPLNLCSTEERVLETANEQKLRTWAGKPLHGRHYNDLQQPHVDKKASNSWLAKGTLQPETEGFMLAIQDQVIATRNNQKFIQRKDIESDKCRHCHAASETIQHVMAGCKILAQSDYKHRHDQVAKIVHQKLAANAGFLTEKCPYYKYEPETVHENETHKLYWDRAIITDKTVPHNRPDITLVDKSNKTTYLIDIAVPNTNNIQTTYTTKITKYQDLRHEVRDIWGMEKILIIPLVISATGIVPKTLATNLEILNIDPNTYIEIQKATILNTCHIVRKFLDMAH

SEQ ID NO: 22068 - protein, 1186 aa, Dysdera silvatica
MNHNENMNGASVVSLLNQNRVRVLSRGASSKNMQQSLLGGVGGCSGASNCTATRTNTAQSALQPSIGATTRAERPRQRMSWTIDMNTYIMRTYYTITKLETDMTNYRPTLHAKFAQQYPHLDISIERITTQRRNIITRNLLAEPILQRLRDEVANDLANTSTSVANPEAPASSAREPLQPSIEEEERRDVEKMEEGFQCALAEYEGSDAATRPRIPRQPASWKLCKATKILNEHTLPLHLQNHNSLQEIHTAIYCAAVAASRANGYEVRNEGRSNRGNKAQPPWQVRLEKRIEELRSSIGRITQYMQGNRSKKLVRKVKMALKRNRIHTRHEEPNKHISEYLDTLKQKLGVYARRLRRYKDYTNKKQQNMQFQANQKAFYRKLRETPANKDKYEAPKPAEIETFWKTLWSNEVQHKSAPWIQQEMEATRGIEEMEYTGITIEELQQVIQRTHNWKAPGIDGIHNFWYKKFTSAHGPLAKELTAIIEDPSKMPEFLCKGITYLLPKDQDTSNPAKYRPITCLNTLYKILTGCISEKISRHSESNNLMTEEQKGCQKGTLGCKEQLTIDSVILEQARKQKRKLNTAYIDYKKAFDSVPHSWLLEILSIYKVHPSIIRFLQSSMKQWRTRLQLNTPDSKIETAEIPIRRGIFQGDALSPQWFCLALNPLSRMLNTSKYGYMLKKDKRNLHKVSHLMYVDDIKLYAPTITQLRQLISITETFSKDIGMEFGLDKCKIQKNSKEDLPGIELEDGRLLKTLDEGETYKYLGIMQKRQQEHKKVKVQLTQAFQERLRSIVKTKLSGKNTTQAINAYAVPVLTYSFGIIKWSNTELEQLQRKMRTIQRRAGQLHPATAIERQTLPREEGGRGQADLKDLHDKQIQSMRQYFQLKSPRSPLIQAIIQADANYTPLNLCSTEERVLETANEQKLRTWAGKPLHGRHYNDLQQPHVDKKASNSWLAKGTLQPETEGFMLAIQDQVIATRNNQKFIQRKDIESDKCRHCHAASETIQHVMAGCKILAQSDYKHRHDQVAKIVHQKLAANAGFLTEKCPYYKYEPETVHENETHKLYWDRAIITDKTVPHNRPDITLVDKSNKTTYLIDIAVPNTNNIQTTYTTKITKYQDLRHEVRDIWGMEKILIIPLVISATGIVPKTLATNLEILNIDPNTYIEIQKATILNTCHIVRKFLDMAH

SEQ ID NO: 22069 - protein, 994 aa, Dysdera silvatica
MEEGFQCALAEYEGSDAATRPRIPRQPASWKLCKATKILNEHTLPLHLQNHNSLQEIHTAIYCAAVAASRANGYEVRNEGRSNRGNKAQPPWQVRLQKRIEELRSSIGRITQYMQGNRSKKLVRKVKMALKRNRIHTRHEEPNKHISEYLDTLKQKLGVYARRLRRYKDYTNRKQQNMQFQANQKAFYRKLRETPANKDKYEAPKPAEIETFWKTLWSNEVQHKSAPWIQQEMEATRGIEEMEYTGITIEELQQVIQRTHNWKAPGIDGIHNFWYKKFTSAHGPLAKELTAIIEDPSKMPEFLCKGITYLLPKDQDTSNPAKYRPITCLNTLYKILTGCISEKISRHSESNNLMTEEQKGCQKGTLGCKEQLTIDSVILEQARKQKRKLNTAYIDYKKAFDSVPHSWLLEILSIYKVHPSIIRFLQSSMKQWRTRLQLNTPDSKIETAEIPIRRGIFQGDALSPQWFCLALNPLSRMLNTSKYGYMLKKDKRNLHKVSHLMYVDDIKLYAPTITQLRQLISITETFSKDIGMEFGLDKCKIQKNSKEDLPGIELEDGRLLKTLDEGETYKYLGIMQKRQQEHKKVKVQLTQAFQERLRSIVKTKLSGKNTTQAINAYAVPVLTYSFGIIKWSNTELEQLQRKMRTIQRRAGQLHPATAIERQTLPREEGGRGQADLKDLHDKQIQSMRQYFQLKSPRSPLIQAIIQADANYTPLNLCSTEERVLETANEQKLRTWAGKPLHGRHYNDLQQPHVDKKASNSWLAKGTLQPETEGFMLAIQDQVIATRNNQKFIQRKDIESDKCRHCHAASETIQHVMAGCKILAQSDYKHRHDQVAKIVHQKLAANAGFLTEKCPYYKYEPETVHENETHKLYWDRAIITDKTVPHNRPDITLVDKSNKTTYLIDIAVPNTNNIQTTYTTKITKYQDLRHEVRDIWGMEKILIIPLVISATGIVPKTLATNLEILNIDPNTYIEIQKATILNTCHIVRKFLDMAH

SEQ ID NO: 22070 - protein, 1203 aa, Dysdera silvatica
MPPRYPGGGKKAISDSDDMNHNENMNGASVVALLNQNRVRVLSRGASSKNMQQSLLGGVGGCSGASNCTATRTNTAQSALQPNIGATTRAERPRQRMSWTIDMNTYIMRTYYTITKLETDMTNYRPTLHAKFAQQYPHLDISIERITTQRRNIITRNLLADPQIQKSRDKVTNNLANTPTSEVNAEAPTSVREPPQPSMEDEERRDVKKMEEGFQCALAEYEGSDAATRPRIPRQPASWKLCKATKILNEHTLPLHLQNHNSLQEIHTAIYCAAVAASRANGYEVRNEGRSNRGNKAQPPWQVRLEKRIEELRSSIGRITQYMQGNRSKKLVRKVKMALKRNRIHTRHEEPNKHISEYLDTLKQKLGVYARRLRRYKDYTNRKQQNMQFQANQKAFYRKLRETPANKDKYEAPKPAEIETFWKTLWSNEVQHKSAPWIQQEMEATRGIEEMEYTGITIEELQQVIQRTHNWKAPGIDGIHNFWYKKFTSAHGPLAKELTAIIEDPSKMPEFLCKGITYLLPKDQDTSNPAKYRPITCLNTLYKILTGCISEKISRHSESNNLMTEEQKGCQKGTLGCKEQLTIDSVILEQARKQKRKLNTAYIDYKKAFDSVPHSWLLEILSIYKVHPSIIRFLQSSMKQWRTRLQLNTPDSKIETAEIPIRRGIFQGDALSPQWFCLALNPLSRMLNTSKYGYMLKKDKRNLHKVSHLMYVDDIKLYAPTITQLRQLISITETFSKDIGMEFGLDKCKIQKNSKEDLPGIELEDGRLLKTLDEGETYKYLGIMQKRQQEHKKVKVQLTQAFQERLRSIVKTKLSGKNTTQAINAYAVPVLTYSFGIIKWSNTELEQLQRKMRTIQRRAGQLHPATAIERQTLPREEGGRGQADLKDLHDKQIQSMRQYFQLKSPRSPLIQATVLADANYTPLNLCNTEERVLETANEQKLRTWAGKPLHGRHYNDLQQPHVDKKASNSWLAKGTLQPETEGFMLAIQDQVIATRNNQKFIQRKDIESDKCRHCHAASETIQHVMAGCKILAQSDYKHRHDQVAKIVHQKLAANAGFLTEKCPYYKYEPETVHENETHKLYWDRAIITDKTVPHNRPDITLVDKSNKTTYLIDIAVPNTNNIQTTYTTKITKYQDLRHEVRDIWGMEKILIIPLVISATGIVPKTLATNLEILNIDPNTYIEIQKATILNTCHIVRKFLDMAH

SEQ ID NO: 22071 - protein, 918 aa, Dysdera silvatica
MATYTHTHTHTHTHTHTHTYIYGIEELRSSIGRITQYMQGNRSKKLVRKVKMALKRNRIHTRHEEPNKHISEYLDTLKQKLGVYARRLRRYKDYTNKKQQNMQFQANQKAFYRKLRETPANKDKYEAPKPAEIETFWKTLWSNEVQHKSAPWIQQEMEATRGIEEMEYTGITIEELQQVIQRTHNWKAPGIDGIHNFWYKKFTSAHGPLAKELTAIIEDPSKMPEFLCKGITYLLPKDQDTSNPAKYRPITCLNTLYKILTGCISEKISRHSESNNLMTEEQKGCQKGTLGCKEQLTIDSVILEQARKQKRKLNTAYIDYKKAFDSVPHSWLLEILSIYKVHPSIIRFLQSSMKQWRTRLQLNTPDSKIETAEIPIRRGIFQGDALSPQWFCLALNPLSRMLNTSKYGYMLKKDKRNLHKVSHLMYVDDIKLYAPTITQLRQLISITETFSKDIGMEFGLDKCKIQKNSKEDLPGIELEDGRLLKTLDEGETYKYLGIMQKRQQEHKKVKVQLTQAFQERLRSIVKTKLSGKNTTQAINAYAVPVLTYSFGIIKWSNTELEQLQRKMRTIQRRAGQLHPATAIERQTLPREEGGRGQADLKDLHDKQIQSMRQYFQLKSPRSPLIQAIIQADANYTPLNLCSTEERVLETANEQKLRTWAGKPLHGRHYNDLQQPHVDKKASNSWLAKGTLQPETEGFMLAIQDQVIATRNNQKFIQRKDIESDKCRHCHAASETIQHVMAGCKILAQSDYKHRHDQVAKIVHQKLAANAGFLTEKCPYYKYEPETVHENETHKLYWDRAIITDKTVPHNRPDITLVDKSNKTTYLIDIAVPNTNNIQTTYTTKITKYQDLRHEVRDIWGMEKIFIIPLVISATGIVPKTLATNLEILNIDPNTYIEIQKATILNTCHIVRKFLDMAH

SEQ ID NO: 22072 - protein, 881 aa, Dysdera silvatica
MQGNRGKKLVRKVKMALKRNRIHTRHEEPNKHISEYLDTLKQKLGVYARRLRRYKDYTNKKQQNMQFQANQKAFYRKLRETPANKDKYEAPKPAEIETFWKTLWSNEVQHKSAPWIQQEMEATRGIEEMEYTGITIEELQQVIQRTHNWKAPGIDGIHNFWYKKFTSAHGPLAKELTAIIEDPSKMPEFLCKGITYLLPKDQDTSNPAKYRPITCLNTLYKILTGCISEKISRHSESNNLMTEEQKGCQKGTLGCKEQLTIDSVILEQARKQKRKLNTAYIDYKKAFDSVPHSWLLEILSIYKVHPSIIRFLQSSMKQWRTRLQLNTPDSKIETAEIPIRRGIFQGDALSPQWFCLALNPLSRMLNTSKYGYMLKKDKRNLHKVSHLMYVDDIKLYAPTITQLRQLISITETFSKDIGMEFGLDKCKIQKNSKEDLPGIELEDGRLLKTLDEGETYKYLGIMQKRQQEHKKVKVQLTQAFQERLRSIVKTKLSGKNTTQAINAYAVPVLTYSFGIIKWSNTELEQLQRKMRTIQRRAGQLHPATAIERQTLPREEGGRGQADLKDLHDKQIQSMRQYFQLKSPRSPLIQAIIQADANYTPLNLCSTEERVLETANEQKLRTWAGKPLHGRHYNDLQQPHVDKKASNSWLAKGTLQPETEGFMLAIQDQVIATRNNQKFIQRKDIESDKCRHCHAASETIQHVMAGCKILAQSDYKHRHDQVAKIVHQKLAANAGFLTEKCPYYKYEPETVHENETHKLYWDRAIITDKTVPHNRPDITLVDKSNKTTYLIDIAVPNTNNIQTTYTTKITKYQDLRHEVRDIWGMEKIFIIPLVISATGIVPKTLATNLEILNIDPNTYIEIQKATILNTCHIVRKFLDMAH

SEQ ID NO: 22073 - protein, 893 aa, Dysdera silvatica
MHCCSIGRITQYMQGNRSKKLVRKVKMALKRNRIHTRHEEPNKHISEYLDTLKQKLGVYARRLRRYKDYTNKKQQNMQFQANQKAFYRKLRETPANKDKYEAPKPAEIETFWKTLWSNEVQHKSAPWIQQEMEATRGIEEMEYTGITIEELQQVIQRTHNWKAPGIDGIHNFWYKKFTSAHGPLAKELTAIIEDPSKMPEFLCKGITYLLPKDQDTSNPAKYRPITCLNTLYKILTGCISEKISRHSESNNLMTEEQKGCQKGTLGCKEQLTIDSVILEQARKQKRKLNTAYIDYKKAFDSVPHSWLLEILSIYKVHPSIIRFLQSSMKQWRTRLQLNTPDSKIETAEIPIRRGIFQGDALSPQWFCLALNPLSRMLNTSKYGYMLKKDKRNLHKVSHLMYVDDIKLYAPTITQLRQLISITETFSKDIGMEFGLDKCKIQKNSKEDLPGIELEDGRLLKTLDEGETYKYLGIMQKRQQEHKKVKVQLTQAFQERLRSIVKTKLSGKNTTQAINAYAVPVLTYSFGIIKWSNTELEQLQRKMRTIQRRAGQLHPATAIERQTLPREEGGRGQADLKDLHDKQIQSMRQYFQLKSPRSPLIQAIIQADANYTPLNLCSTEERVLETANEQKLRTWAGKPLHGRHYNDLQQPHVDKKASNSWLAKGTLQPETEGFMLAIQDQVIATRNNQKFIQRKDIESDKCRHCHAASETIQHVMAGCKILAQSDYKHRHDQVAKIVHQKLAANAGFLTEKCPYYKYEPETVHENETHKLYWDRAIITDKTVPHNRPDITLVDKSNKTTYLIDIAVPNTNNIQTTYTTKITKYQDLRHEVRDIWGMEKIFIIPLVISATGIVPKTLATNLEILNIDPNTYIEIQKATILNTCHIVRKFLDMAH

SEQ ID NO: 22074 - protein, 994 aa, Dysdera silvatica
MEEGFQCALAEYEGSDAATRPRIPRQPASWKLCKATKILNEHTLPLHLQNHNSLQEIHTAIYCAAVAASRANGYEVRNEGRSNRGNKAQPPWQVRLEKRIEELRSSIGRITQYMQGNRGKKLVRKVKMALKRNRIHTRHEEPNKHISEYLDTLKQKLGVYARRLRRYKDYTNKKQQNMQFQANQKAFYRKLRETPANKDKYEAPKPAEIETFWKTLWSNEVQHKSAPWIQQEMEATRGIEEMEYTGITIEELQQVIQRTHNWKAPGIDGIHNFWYKKFTSAHGPLAKELTAIIEDPSKMPEFLCKGITYLLPKDQDTSNPAKYRPITCLNTLYKILTGCISEKISRHSESNNLMTEEQKGCQKGTLGCKEQLTIDSVILEQARKQKRKLNTAYIDYKKAFDSVPHSWLLEILSIYKVHPSIIRFLQSSMKQWRTRLQLNTPDSKIETAEIPIRRGIFQGDALSPQWFCLALNPLSRMLNTSKYGYMLKKDKRNLHKVSHLMYVDDIKLYAPTITQLRQLISITETFSKDIGMEFGLDKCKIQKNSKEDLPGIELEDGRLLKTLDEGETYKYLGIMQKRQQEHKKVKVQLTQAFQERLRSIVKTKLSGKNTTQAINAYAVPVLTYSFGIIKWSNTELEQLQRKMRTIQRRAGQLHPATAIERQTLPREEGGRGQADLKDLHDKQIQSMRQYFQLKSPRSPLIQAIIQADANYTPLNLCSTEERVLETANEQKLRTWAGKPLHGRHYNDLQQPHVDKKASNSWLAKGTLQPETEGFMLAIQDQVIATRNNQKFIQRKDIESDKCRHCHAASETIQHVMAGCKILAQSDYKHRHDQVAKIVHQKLAANAGFLTEKCPYYKYEPETVHENETHKLYWDRAIITDKTVPHNRPDITLVDKSNKTTYLIDIAVPNTNNIQTTYTTKITKYQDLRHEVRDIWGMEKIFIIPLVISATGIVPKTLATNLEILNIDPNTYIEIQKATILNTCHIVRKFLDMAH

SEQ ID NO: 22075 - protein, 1186 aa, Dysdera silvatica
MNHNENMNGASVVSLLNQNRVRTLSRGASSKNMQQSLLGGVGGCSGASNCTATRTNTAQSALQPSIGATTRAERPRQRMSWTIDMNTYIMRTYYTITKLETDMTNYRPTLHAKFAQQYPHLDISIERITTQRRNIITRNLLAEPILQRLRDEVANDLANTSTSVANPEAPAIGAREPLQTSIEEEERRDVEKMEEGFQCALAEYEGSDAATRPRIPRQPASWKLCKATKILNEHTLPLHLQNHNSLQEIHTAIYCAAVAASRANGYEVRNEGRSNRGNKAQPPWQVRLEKRIEELRSSIGRITQYMQGNRGKKLVRKVKMALKRNRIHTRHEEPNKHISEYLDTLKQKLGVYARRLRRYKDYTNKKQQNMQFQANQKAFYRKLRETPANKDKYEAPKPAEIETFWKTLWSNEVQHKSAPWIQQEMEATRGIEEMEYTGITIEELQQVIQRTHNWKAPGIDGIHNFWYKKFTSAHGPLAKELTAIIEDPSKMPEFLCKGITYLLPKDQDTSNPAKYRPITCLNTLYKILTGCISEKISRHSESNNLMTEEQKGCQKGTLGCKEQLTIDSVILEQARKQKRKLNTAYIDYKKAFDSVPHSWLLEILSIYKVHPSIIRFLQSSMKQWRTRLQLNTPDSKIETAEIPIRRGIFQGDALSPQWFCLALNPLSRMLNTSKYGYMLKKDKRNLHKVSHLMYVDDIKLYAPTITQLRQLISITETFSKDIGMEFGLDKCKIQKNSKEDLPGIELEDGRLLKTLDEGETYKYLGIMQKRQQEHKKVKVQLTQAFQERLRSIVKTKLSGKNTTQAINAYAVPVLTYSFGIIKWSNTELEQLQRKMRTIQRRAGQLHPATAIERQTLPREEGGRGQADLKDLHDKQIQSMRQYFQLKSPRSPLIQAIIQADANYTPLNLCSTEERVLETANEQKLRTWAGKPLHGRHYNDLQQPHVDKKASNSWLAKGTLQPETEGFMLAIQDQVIATRNNQKFIQRKDIESDKCRHCHAASETIQHVMAGCKILAQSDYKHRHDQVAKIVHQKLAANAGFLTEKCPYYKYEPETVHENETHKLYWDRAIITDKTVPHNRPDITLVDKSNKTTYLIDIAVPNTNNIQTTYTTKITKYQDLRHEVRDIWGMEKILIIPLVISATGIVPKTLATNLEILNIDPNTYIEIQKATILNTCHIVRKFLDMAH

SEQ ID NO: 22076 - protein, 1097 aa, Dysdera silvatica
MRTYYTITKLETDMTNYRPTLHAKFAQQYPHLDISIERITTQRRNIITRNLLAEPILQRLRDEVANDLANTSTSVANPEAPAIGAREPLQPSIEEEERRDVEKMEEGFQCALAEYEGSDAATRPRIPRQPASWKLCKATKILNEHTLPLHLQNHNSLQEIHTAIYCAAVAASRANGYEVRNEGRSNRGNKAQPPWQVRLQKRIEELRSSIGRITQYMQGNRSKKLVRKVKMALKRNRIHTRHEEPNKHISEYLDTLKQKLGVYARRLRRYKDYTNKKQQNMQFQANQKAFYRKLRETPANKDKYEAPKPAEIETFWKTLWSNEVQHKSAPWIQQEMEATRGIEEMEYTGITIEELQQVIQRTHNWKAPGIDGIHNFWYKKFTSAHGPLAKELTAIIEDPSKMPEFLCKGITYLLPKDQDTSNPAKYRPITCLNTLYKILTGCISEKISRHSESNNLMAEEQKGCQKGTLGCKEQLTIDSVILEQARKQKRKLNTAYIDYKKAFDSVPHSWLLEILSIYKVHPSIIRFLQSSMKQWRTRLQLNTPDSKIETAEIPIRRGIFQGDALSPQWFCLALNPLSRMLNASKYGYMLKKDKRNLHKVSHLMYVDDIKLYAPTITQLRQLISITETFSKDIGMEFGLDKCKIQKNSKEDLPGIELEDGRLLKTLDEGETYKYLGIMQKRQQEHKKVKVQLTQAFQERLRSIVKTKLSGKNTTQAINAYAVPVLTYSFGIIKWSNTELEQLQRKMRTIQRRAGQLHPATAIERQTLPREEGGRGQADLKDLHDKQIQSMRQYFQLKSPRSPLIQAIIQADANYTPLNLCSTEERVLETANEQKLRTWAGKPLHGRHYNDLQQPHVDKKASNSWLAKGTLQPETEGFMLAIQDQVIATRNNQKFIQRKDIESDKCRHCHAASETIQHVMAGCKILAQSDYKHRHDQVAKIVHQKLAANAGFLTEKCPYYKYEPETVHENETHKLYWDRAIITDKTVPHNRPDITLVDKSSKTTYLIDIAVPNTNNIQTTYTTKITKYQDLRHEVRDIWGMEKILIIPLVISATGIVPKTLATNLEILNIDPNTYIEIQKATILNTCHIVRKFLDMAH

SEQ ID NO: 22077 - protein, 1213 aa, Dysdera silvatica
MNHNENMNGASVVSLLNQNRVRVLSRGASSKNMQQSLLGGVGGCSGASNCTATRTNTAQSALQPSIGATTRAERPRQRMSWTIDMNTYIMRTYYTITKLETDMTNYRPTLHAKFAQQYPHLDISIERITTQRRNIITRNLLAEPILQRLRDEVANDLANTSTSVANPEAPASSAREPLQPSIEEEERRDVEKMEEGFQCALAEYEGSDAATRPRIPRQPASWKLCKATKILNEHTLPLHLQNHNSLQEIHTAIYCAAVAASRANGYEVRNEGRSNRGNKAQPPWQVRLEKRIEELRSSIGRITQYMQGNRSKKLVRKVKMALKRNRIHTRHEEPNKHISEYLDTLKQKLGVYARRLRRYKDYTNRKQQNMQFQANQKAFYRKLRETPANKDKYEAPKPAEIETFWKTLWSNEVQHKSAPWIQQEMEATRGIEEMEYTGITIEELQQVIQRTHNWKAPGIDGIHNFWYKKFTSAHGPLAKELTAIIEDPSKMPEFLCKGITYLLPKDQDTSNPAKYRPITCLNTLYKILTGCISEKISRHSESNNLMTEEQKGCQKGTLGCKEQLTIDSVILEQARKQKRKLNTAYIDYKKAFDSVPHSWLLEILSIYKVHPSIIRFLQSSMKQWRTRLQLNTPDSKIETAEIPIRRGIFQGDALSPQWFCLALNPLSRMLNTSKYGYMLKKDKRNLHKVSHLMYVDDIKLYAPTITQLRQLISITETFSKDIGMEFGLDKCKIQKNSKEDLPGIELEDGRLLKTLDEGETYKYLGIMQKRQQEHKKVKVQLTQAFQERLRSIVKTKLSGKNTTQAINAYAVPVLTYSFGIIKWSNTELEQLQRKMRTIQRRAGQLHPATAIERQTLPREEGGRGQADLKDLHDKQIQSMRQYFQLKSPRSPLIQAIIQADANYTPLNLCSTEERVLETANEQKLRTWAGKPLHGRHYNDLQQPHVDKKASNSWLAKGTLQPETEGFMLAIQDQVIATRNNQKFIQRKDIESDKCRHCHAASETIQHVMAGCKILAQSDYKHRHDQVAKIVHQKLAANAGFLTEKCPYYKYEPETVHENETHKLYWDRAIITDKTVPHNRPDITLVDKSNKTTYLIDIAVPNTNNIQTTYTTKITKYQDLRHEVRDIWGMEKILIIPLVISATGIVPKTLATNLEILNIDPNTYIEIQKATILKTDVTFIVEVFDSGTLLIEKPRSGEHGYARPSFRFQEVCLL

SEQ ID NO: 22078 - protein, 881 aa, Dysdera silvatica
MQGNRSKKLVRKVKMALKRNRIHTRHEEPNKHISEYLDTLKQKLGVYARRLRRYKDYTNKKQQNMQFQANQKAFYRKLRETPANKDKYEAPKPAEIETFWKTLWSNEVQHKSAPWIQQEMEATRGIEEMEYTGITIEELQQVIQRTHNWKAPGIDGIHNFWYKKFTSAHGPLAKELTAIIEDPSKMPEFLCKGITYLLPKDQDTSNPAKYRPITCLNTLYKILTGCISEKISRHSESNNLMAEEQKGCQKGTLGCKEQLTIDSVILEQARKQKRKLNTAYIDYKKAFDSVPHSWLLEILSIYKVHPSIIRFLQSSMKQWRTRLQLNTPDSKIETAEIPIRRGIFQGDALSPQWFCLALNPLSRMLNTSKYGYMLKKDKRNLHKVSHLMYVDDIKLYAPTITQLRQLISITETFSKDIGMEFGLDKCKIQKNSKEDLPGIELEDGRLLKTLDEGETYKYLGIMQKRQQEHKKVKVQLTQAFQERLRSIVKTKLSGKNTTQAINAYAVPVLTYSFGIIKWSNTELEQLQRKMRTIQRRAGQLHPATAIERQTLPREEGGRGQADLKDLHDKQIQSMRQYFQLKSPRSPLIQAIIQADANYTPLNLCSTEERVLETANEQKLRTWAGKPLHGRHYNDLQQPHVDKKASNSWLAKGTLQPETEGFMLAIQDQVIATRNNQKFIQRKDIESDKCRHCHAASETIQHVMAGCKILAQSDYKHRHDQVAKIVHQKLAANAGFLTEKCPYYKYEPETVHENETHKLYWDRAIITDKTVPHNRPDITLVDKSNKTTYLIDIAVPNTNNIQTTYTTKITKYQDLRHEVRDIWGMEKILIIPLVISATGIVPKTLATNLEILNIDPNTYIEIQKATILNTCHIVRKFLDMAH

SEQ ID NO: 22079 - protein, 1186 aa, Dysdera silvatica
MNHNENMNGASVVALLNQNRVRTLSRGARSKNMQQSLLGGAGGCSGASNCTATRTNTAQSALQPNTGTTTRAERPRQRMSWTIDMNTYIMRTYYTITKLETDMTNYRPTLHAKFAQQYPHLDISIERITTQRRNIITRNLLAEPILQRLRDEVANDLANTSTSVANPEAPAIGAREPLQPSIEEEERRDVEKMEEGFQCALAEYEGSDATTRPRIPHQPASWKLCKATKILNEHTLPLHLQKHNSLQEIHTAIYCAAVAASRANGYEVRNEGRNNRGNKAQPPWQVRLEKRIEELRSSIGRITQYMQGNRSKKLVRKVKMALKRNRIHTRHEEPNKHISEYLDTLKQKLGVYARRLRRYKDYTNRKQQNMQFQANQKAFYRKLRETPANQDKYEAPKPAEIETFWKTLWSNEVQHKSAPWIQQEMEATRGIEEMEYTGITIEELQQVIQRTHNWKAPGIDGIHNFWYKKFTSAHGPLAKELTAIIEDPSKMPEFLCKGITYLLPKDQDTSNPAKYRPITCLNTLYKILTGCISEKISRHSESNNLMAEEQKGCQKGTLGCKEQLTIDSVILEQARKQKRKLNTAYIDYKKAFDSVPHSWLLEILSIYKVHPSIIRFLQSSMKQWRTRLQLNTPDSKIETAEIPIRRGIFQGDALSPQWFCLALNPLSRMLNTSKYGYMLKKDKRNLHKVSHLMYVDDIKLYAPTITQLRQLISITETFSKDIGMEFGLDKCKIQKNSKEDLPGIELEDGRLLKTLDEGETYKYLGIMQKRQQEHKKVKVQLTQAFQERLRSIVKTKLSGKNTTQAINAYAVPVLTYSFGIIKWSNTELEQLQRKMRTIQRRAGQLHPATAIERQTLPREEGGRGQADLKDLHDKQIQSMRQYFQLKSPRSPLIQAIIQADANYTPLNLCSTEERVLETANEQKLRTWAGKPLHGRHYNDLQQPHVDKKASNSWLAKGTLQPETEGFMLAIQDQVIATRNNQKFIQRKDIESDKCRHCHAASETIQHVMAGCKILAQSDYKHRHDQVAKIVHQKLAANAGFLTEKCPYYKYEPETVHENETHKLYWDRAIITDKTVPHNRPDITLVDKSNKTTYLIDIAVPNTNNIQTTYTTKITKYQDLRHEVRDIWGMEKILIIPLVISATGIVPKTLATNLEILNIDPNTYIEIQKATILNTCHIVRKFLDMAH

SEQ ID NO: 22080 - protein, 1186 aa, Dysdera silvatica
MNHNENMNGASVVSLLNQNRVRVLSRGASSKNMQQSLLGGVGGCSGASNCTATRTNTAQSALQPSIGATTRAERPRQRMSWTIDMNTYIMRTYYTITKLETDMTNYRPTLHAKFAQQYPHLDISIERITTQRRNIITRNLLAEPILQRLRDEVANDLANTSTSVANPEAPASSAREPLQPSIEEEERRDVEKMEEGFQCALAEYEGSDAATRPRIPRQPASWKLCKATKILNEHTLPLHLQKHNSLQEIHTAIYCAAVAASRANGYEVRNEGRSNRGNKAQPPWQVRLEKRIEELRSSIGRITQYMQGNRSKKLVRKVKMALKRNRIHTRHEEPNKHISEYLDTLKQKLGVYARRLRRYKDYTNRKQQNMQFQANQKAFYRKLRETPANKDKYEAPKPAEIETFWKTLWSNEVQHKSAPWIQQEMEATRGIEEMEYTGITIEELQQVIQRTHNWKAPGIDGIHNFWYKKFTSAHGPLAKELTAIIEDPSKMPEFLCKGITYLLPKDQDTSNPAKYRPITCLNTLYKILTGCISEKISRHSESNNLMTEEQKGCQKGTLGCKEQLTIDSVILEQARKQKRKLNTAYIDYKKAFDSVPHSWLLEILSIYKVHPSIIRFLQSSMKQWRTRLQLNTPDSKIETAEIPIRRGIFQGDALSPQWFCLALNPLSRMLNTSKYGYMLKKDKRNLHKVSHLMYVDDIKLYAPTITQLRQLISITETFSKDIGMEFGLDKCKIQKNSKEDLPGIELEDGRLLKTLDEGETYKYLGIMQKRQQEHKKVKVQLTQAFQERLRSIVKTKLSGKNTTQAINAYAVPVLTYSFGIIKWSNTELEQLQRKMRTIQRRAGQLHPATAIERQTLPREEGGRGQADLKDLHDKQIQSMRQYFQLKSPRSPLIQAIIQADANYTPLNLCSTEERVLETANEQKLRTWAGKPLHGRHYNDLQQPHVDKKASNSWLAKGTLQPETEGFMLAIQDQVIATRNNQKFIQRKDIESDKCRHCHAASETIQHVMAGCKILAQSDYKHRHDQVAKIVHQKLAANAGFLTEKCPYYKYEPETVHENETHKLYWDRAIITDKTVPHNRPDITLVDKSNKTTYLIDIAVPNTNNIQTTYTTKITKYQDLRHEVRDIWGMEKIFIIPLVISATGIVPKTLATNLEILNIDPNTYIEIQKATILNTCHIVRKFLDMAH

SEQ ID NO: 22081 - protein, 1154 aa, Dysdera silvatica
MQQSLLGGVGGCSGASNCTATRTNTAQSALQPSIGATTRAERPRQRMSWTIDMNTYIMRTYYTITKLETDMTNYRPTLHAKFAQQYPHLDISIERITTQRRNIITRNLLAEPILQRLRDEVANDLANTSTSVANPEAPAIGAREPLQPSIEEEERRDVEKMEEGFQCALAEYEGSDAATRPRIPRQPASWKLCKATKILNEHTLPLHLQNHNSLQEIHTAIYCAAVAASRANGYEVRNEGRSNRGNKAQPPWQVRLEKRIEELRSSIGRITQYMQGNRGKKLVRKVKMALKRNRIHTRHEEPNKHISEYLDTLKQKLGVYARRLRRYKDYTNKKQQNMQFQANQKAFYRKLRETPANKDKYEAPKPAEIETFWKTLWSNEVQHKSAPWIQQEMEATRGIEEMEYTGITIEELQQVIQRTHNWKAPGIDGIHNFWYKKFTSAHGPLAKELTAIIEDPSKMPEFLCKGITYLLPKDQDTSNPAKYRPITCLNTLYKILTGCISEKISRHSESNNLMTEEQKGCQKGTLGCKEQLTIDSVILEQARKQKRKLNTAYIDYKKAFDSVPHSWLLEILSIYKVHPSIIRFLQSSMKQWRTRLQLNTPDSKIETAEIPIRRGIFQGDALSPQWFCLALNPLSRMLNTSKYGYMLKKDKRNLHKVSHLMYVDDIKLYAPTITQLRQLISITETFSKDIGMEFGLDKCKIQKNSKEDLPGIELEDGRLLKTLDEGETYKYLGIMQKRQQEHKKVKVQLTQAFQERLRSIVKTKLSGKNTTQAINAYAVPVLTYSFGIIKWSNTELEQLQRKMRTIQRRAGQLHPATAIERQTLPREEGGRGQADLKDLHDKQIQSMRQYFQLKSPRSPLIQAIIQADANYTPLNLCSTEERVLETANEQKLRTWAGKPLHGRHYNDLQQPHVDKKASNSWLAKGTLQPETEGFMLAIQDQVIATRNNQKFIQRKDIESDKCRHCHAASETIQHVMAGCKILAQSDYKHRHDQVAKIVHQKLAANAGFLTEKCPYYKYEPETVHENETHKLYWDRAIITDKTVPHNRPDITLVDKSNKTTYLIDIAVPNTNNIQTTYTTKITKYQDLRHEVRDIWGMEKILIIPLVISATGIVPKTLATNLEILNIDPNTYIEIQKATILNTCHIVRKFLDMAH

SEQ ID NO: 22082 - protein, 1108 aa, Dysdera silvatica
MSWTIDMNTYIMRTYYTITKLETDMTNYRPTLHAKFAQQYPHLDISIERITTQRRNIITRNLLAEPILQRLRDEVANDLANTSTSVANPEAPASSAREPLQPSIEEEERRDVEKMEEGFQCALAEYEGSDAATRPRIPRQPASWKLCKATKILNEHTLPLHLQNHNSLQEIHTAIYCAAVAASRANGYEVRNEGRSNRGNKAQPPWQVRLEKRIEELRSSIGRITQYMQGNRGKKLVRKVKMALKRNRIHTRHEEPNKHISEYLDTLKQKLGVYARRLRRYKDYTNKKQQNMQFQANQKAFYRKLRETPANKDKYEAPKPAEIETFWKTLWSNEVQHKSAPWIQQEMEATRGIEEMEYTGITIEELQQVIQRTHNWKAPGIDGIHNFWYKKFTSAHGPLAKELTAIIEDPSKMPEFLCKGITYLLPKDQDTSNPAKYRPITCLNTLYKILTGCISEKISRHSESNNLMTEEQKGCQKGTLGCKEQLTIDSVILEQARKQKRKLNTAYIDYKKAFDSVPHSWLLEILSIYKVHPSIIRFLQSSMKQWRTRLQLNTPDSKIETAEIPIRRGIFQGDALSPQWFCLALNPLSRMLNTSKYGYMLKKDKRNLHKVSHLMYVDDIKLYAPTITQLRQLISITETFSKDIGMEFGLDKCKIQKNSKEDLPGIELEDGRLLKTLDEGETYKYLGIMQKRQQEHKKVKVQLTQAFQERLRSIVKTKLSGKNTTQAINAYAVPVLTYSFGIIKWSNTELEQLQRKMRTIQRRAGQLHPATAIERQTLPREEGGRGQADLKDLHDKQIQSMRQYFQLKSPRSPLIQAIIQADANYTPLNLCSTEERVLETANEQKLRTWAGKPLHGRHYNDLQQPHVDKKASNSWLAKGTLQPETEGFMLAIQDQVIATRNNQKFIQRKDIESDKCRHCHAASETIQHVMAGCKILAQSDYKHRHDQVAKIVHQKLAANAGFLTEKCPYYKYEPETVHENETHKLYWDRAIITDKTVPHNRPDITLVDKSNKTTYLIDIAVPNTNNIQTTYTTKITKYQDLRHEVRDIWGMEKILIIPLVISATGIVPKTLATNLEILNIDPNTYIEIQKATILNTCHIVRKFLDMAH

SEQ ID NO: 22083 - protein, 1186 aa, Dysdera silvatica
MNHNENMNGASVVSLLNQNRVRTLSRGASSKNMQQSLLGGVGGCSGASNCTATRTNTAQSALQPSIGATTRAERPRQRMSWTIDMNTYIMRTYYTITKLETDMTNYRPTLHAKFAQQYPHLDISIERITTQRRNIITRNLLAEPILQRLRDEVANDLANTSTSVANPEAPASSAREPLQPSIEEEERRDVEKMEEGFQCALAEYEGSDAATRPRIPRQPASWKLCKATKILNEHTLPLHLQNHNSLQEIHTAIYCAAVAASRANGYEVRNEGRSNRGNKAQPPWQVRLEKRIEELRSSIGRITQYMQGNRGKKLVRKVKMALKRNRIHTRHEEPNKHISEYLDTLKQKLGVYARRLRRYKDYTNKKQQNMQFQANQKAFYRKLRETPANKDKYEAPKPAEIETFWKTLWSNEVQHKSAPWIQQEMEATRGIEEMEYTGITIEELQQVIQRTHNWKAPGIDGIHNFWYKKFTSAHGPLAKELTAIIEDPSKMPEFLCKGITYLLPKDQDTSNPAKYRPITCLNTLYKILTGCISEKISRHSESNNLMTEEQKGCQKGTLGCKEQLTIDSVILEQARKQKRKLNTAYIDYKKAFDSVPHSWLLEILSIYKVHPSIIRFLQSSMKQWRTRLQLNTPDSKIETAEIPIRRGIFQGDALSPQWFCLALNPLSRMLNTSKYGYMLKKDKRNLHKVSHLMYVDDIKLYAPTITQLRQLISITETFSKDIGMEFGLDKCKIQKNSKEDLPGIELEDGRLLKTLDEGETYKYLGIMQKRQQEHKKVKVQLTQAFQERLRSIVKTKLSGKNTTQAINAYAVPVLTYSFGIIKWSNTELEQLQRKMRTIQRRAGQLHPATAIERQTLPREEGGRGQADLKDLHDKQIQSMRQYFQLKSPRSPLIQAIIQADANYTPLNLCSTEERVLETANEQKLRTWAGKPLHGRHYNDLQQPHVDKKASNSWLAKGTLQPETEGFMLAIQDQVIATRNNQKFIQRKDIESDKCRHCHAASETIQHVMAGCKILAQSDYKHRHDQVAKIVHQKLAANAGFLTEKCPYYKYEPETVHENETHKLYWDRAIITDKTVPHNRPDITLVDKSNKTTYLIDIAVPNTNNIQTTYTTKITKYQDLRHEVRDIWGMEKILIIPLVISATGIVPKTLATNLEILNIDPNTYIEIQKATILNTCHIVRKFLDMAH

SEQ ID NO: 22084 - protein, 1186 aa, Dysdera silvatica
MNHNENMNGASVVSLLNQNRVRVLSRGASSKNMQQSLLGGVGGCSGASNCTATRTNTAQSALQPSIGATTRAERPRQRMSWTIDMNTYIMRTYYTITKLETDMTNYRPTLHAKFAQQYPHLDISIERITTQRRNIITRNLLAEPILQRLRDEVANDLANTSTSVANPEPPVSSPREPLQPSIEEEERRDVEKMEEGFQCALAEYEGSDAATRPRIPRQPASWKLCKATKILNEHTLPLHLQNHNSLQEIHTAIYCAAVAASRANGYEVRNEGRSNRGNKAQPPWQVRLEKRIEELRSSIGRITQYMQGNRSKKLVRKVKMALKRNRIHTRHEEPNKHISEYLDTLKQKLGVYARRLRRYKDYTNRKQQNMQFQANQKAFYRKLRETPANKDKYEAPKPAEIETFWKTLWSNEVQHKSAPWIQQEMEATRGIEEMEYTGITIEELQQVIQRTHNWKAPGIDGIHNFWYKKFTSAHGPLAKELTAIIEDPSKMPEFLCKGITYLLPKDQDTSNPAKYRPITCLNTLYKILTGCISEKISRHSESNNLMTEEQKGCQKGTLGCKEQLTIDSVILEQARKQKRKLNTAYIDYKKAFDSVPHSWLLEILSIYKVHPSIIRFLQSSMKQWRTRLQLNTPDSKIETAEIPIRRGIFQGDALSPQWFCLALNPLSRMLNTSKYGYMLKKDKRNLHKVSHLMYVDDIKLYAPTITQLRQLISITETFSKDIGMEFGLDKCKIQKNSKEDLPGIELEDGRLLKTLDEGETYKYLGIMQKRQQEHKKVKVQLTQAFQERLRSIVKTKLSGKNTTQAINAYAVPVLTYSFGIIKWSNTELEQLQRKMRTIQRRAGQLHPATAIERQTLPREEGGRGQADLKDLHDKQIQSMRQYFQLKSPRSPLIQAIIQADANYTPLNLCSTEERVLETANEQKLRTWAGKPLHGRHYNDLQQPHVDKKASNSWLAKGTLQPETEGFMLAIQDQVIATRNNQKFIQRKDIESDKCRHCHAASETIQHVMAGCKILAQSDYKHRHDQVAKIVHQKLAANAGFLTEKCPYYKYEPETVHENETHKLYWDRAIITDKTVPHNRPDITLVDKSNKTTYLIDIAVPNTNNIQTTYTTKITKYQDLRHEVRDIWGMEKILIIPLVISATGIVPKTLATNLEILNIDPNTYIEIQKATILNTCHIVRKFLDMAH

SEQ ID NO: 22085 - protein, 1186 aa, Dysdera silvatica
MNHNENMNGASVVSLLNQNRVRVLSRGASSKNMQQSLLGGVGGCSGASNCTATRTNTAQSALQPSIGATTRAERPRQRMSWTIDMNTYIMRTYYTITKLETDMTNYRPTLHAKFAQQYPHLDISIERITTQRRNIITRNLLAEPILQRLRDEVANDLANTSTSVANPEAPASSAREPLQPSIEEEERRDVEKMEEGFQCALAEYEGSDAATRPRIPRQPASWKLCKATKILNEHTLPLHLQNHNSLQEIHTAIYCAAVAASRANGYEVRNEGRSNRGNKAQPPWQVRLEKRIEELRSSIGRITQYMQGNRSKKLVRKVKMALKRNRIHTRHEEPNKHISEYLDTLKQKLGVYARRLRRYKDYTNRKQQNMQFQANQKAFYRKLRETPANKDKYEAPKPAEIETFWKTLWSNEVQHKSAPWIQQEMEATRGIEEMEYTGITIEELQQVIQRTHNWKAPGIDGIHNFWYKKFTSAHGPLAKELTAIIEDPSKMPEFLCKGITYLLPKDQDTSNPAKYRPITCLNTLYKILTGCISEKISRHSESNNLMTEEQKGCQKGTLGCKEQLTIDSVILEQARKQKRKLNTAYIDYKKAFDSVPHSWLLEILSIYKVHPSIIRFLQSSMKQWRTRLQLNTPDSKIETAEIPIRRGIFQGDALSPQWFCLALNPLSRMLNTSKYGYMLKKDKRNLHKVSHLMYVDDIKLYAPTITQLRQLISITETFSKDIGMEFGLDKCKIQKNSKEDLPGIELEDGRLLKTLDEGETYKYLGIMQKRQQEHKKVKVQLTQAFQERLRSIVKTKLSGKNTTQAINAYAVPVLTYSFGIIKWSNTELEQLQRKMRTIQRRAGQLHPATAIERQTLPREEGGRGQADLKDLHDKQIQSMRQYFQLKSPRSPLIQAIIQADANYTPLNLCSTEERVLETANEQKLRTWAGKPLHGRHYNDLQQPHVDKKASNSWLAKGTLQPETEGFMLAIQDQVIATRNNQKFIQRKDIESDKCRHCHAASETIQHVMAGCKILAQSDYKHRHDQVAKIVHQKLAANAGFLTEKCPYYKYEPETVHENETHKLYWDRAIITDKTVPHNRPDITLVDKSNKTTYLIDIAVPNTNNIQTTYTTKITKYQDLRHEVRDIWGMEKILIIPLVISATGIVPKTLATNLEILNIDPNTYIEIQKATILNTCHIVRKFLDMAH

SEQ ID NO: 22086 - protein, 1196 aa, Dysdera silvatica
MYIYISDSDDMNHNENMNGASVVALLNQNRVRVLSRGASSKNMQQSLLGGVGGCSGASNCTATRTNTAQSALQPSIGATTRAERPRQRMSWTIDMNTYIMRTYYTITKLETDMTNYRPTLHAKFAQQYPHLDISIERITTQRRNIITRNLLAEPILQRLRDEVANDLANTSTSVANPEAPASSAREPLQPSIEEEERRDVEKMEEGFQCALAEYEGSDAATRPRIPRQPASWKLCKATKILNEHTLPLHLQNHNSLQEIHTAIYCAAVAASRANGYEVRNEGRSNRGNKAQPPWQVRLEKRIEELRSSIGRITQYMQGNRSKKLVRKVKMALKRNRIHTRHEEPNKHISEYLDTLKQKLGVYARRLRRYKDYTNRKQQNMQFQANQKAFYRKLRETPANKDKYEAPKPAEIETFWKTLWSNEVQHKSAPWIQQEMEATRGIEEMEYTGITIEELQQVIQRTHNWKAPGIDGIHNFWYKKFTSAHGPLAKELTAIIEDPSKMPEFLCKGITYLLPKDQDTSNPAKYRPITCLNTLYKILTGCISEKISRHSESNNLMTEEQKGCQKGTLGCKEQLTIDSVILEQARKQKRKLNTAYIDYKKAFDSVPHSWLLEILSIYKVHPSIIRFLQSSMKQWRTRLQLNTPDSKIETAEIPIRRGIFQGDALSPQWFCLALNPLSRMLNTSKYGYMLKKDKRNLHKVSHLMYVDDIKLYAPTITQLRQLISITETFSKDIGMEFGLDKCKIQKNSKEDLPGIELEDGRLLKTLDEGETYKYLGIMQKRQQEHKKVKVQLTQAFQERLRSIVKTKLSGKNTTQAINAYAVPVLTYSFGIIKWSNTELEQLQRKMRTIQRRAGQLHPATAIERQTLPREEGGRGQADLKDLHDKQIQSMRQYFQLKSPRSPLIQAIIQADANYTPLNLCSTEERVLETANEQKLRTWAGKPLHGRHYNDLQQPHVDKKASNSWLAKGTLQPETEGFMLAIQDQVIATRNNQKFIQRKDIESDKCRHCHAASETIQHVMAGCKILAQSDYKHRHDQVAKIVHQKLAANAGFLTEKCPYYKYEPETVHENETHKLYWDRAIITDKTVPHNRPDITLVDKSNKTTYLIDIAVPNTNNIQTTYTTKITKYQDLRHEVRDIWGMEKILIIPLVISATGIVPKTLATNLEILNIDPNTYIEIQKATILNTCHIVRKFLDMAH

SEQ ID NO: 22087 - protein, 1108 aa, Dysdera silvatica
MSWTIDMNTYIMRTYYTITKLETDMTNYRPTLHAKFAQQYPHLDISIERITTQRRNIITRNLLAEPILQRLRDEVANDLANTSTSVANPEAPASSAREPLQPSIEEEERRDVEKMEEGFQCALAEYEGSDAATRPRIPRQPASWKLCKATKILNEHTLPLHLQNHNSLQEIHTAIYCAAVAASRANGYEVRNEGRSNRGNKAQPPWQVRLQKRIEELRSSIGRITQYMQGNRSKKLVRKVKMALKRNRIHTRHEEPNKHISEYLDTLKQKLGVYARRLRRYKDYTNRKQQNMQFQANQKAFYRKLRETPANKDKYEAPKPAEIETFWKTLWSNEVQHKSAPWIQQEMEATRGIEEMEYTGITIEELQQVIQRTHNWKAPGIDGIHNFWYKKFTSAHGPLAKELTAIIEDPSKMPEFLCKGITYLLPKDQDTSNPAKYRPITCLNTLYKILTGCISEKISRHSESNNLMTEEQKGCQKGTLGCKEQLTIDSVILEQARKQKRKLNTAYIDYKKAFDSVPHSWLLEILSIYKVHPSIIRFLQSSMKQWRTRLQLNTPDSKIETAEIPIRRGIFQGDALSPQWFCLALNPLSRMLNASKYGYMLKKDKRNLHKVSHLMYVDDIKLYAPTITQLRQLISITETFSKDIGMEFGLDKCKIQKNSKEDLPGIELEDGRLLKTLDEGETYKYLGIMQKRQQEHKKVKVQLTQAFQERLRSIVKTKLSGKNTTQAINAYAVPVLTYSFGIIKWSNTELEQLQRKMRTIQRRAGQLHPATAIERQTLPREEGGRGQADLKDLHDKQIQSMRQYFQLKSPRSPLIQAIIQADANYTPLNLCSTEERVLETANEQKLRTWAGKPLHGRHYNDLQQPHVDKKASNSWLAKGTLQPETEGFMLAIQDQVIATRNNQKFIQRKDIESDKCRHCHAASETIQHVMAGCKILAQSDYKHRHDQVAKIVHQKLAANAGFLTEKCPYYKYEPETVHENETHKLYWDRAIITDKTVPHNRPDITIVDKTSKTTYLIDIAVPNTNNIQTTYTTKITKYQDLRHEVRDIWGMEKILIIPLVISATGIVPKTLATNLEILNIDPNTYIEIQKATILNTCHIVRKFLDMAH

SEQ ID NO: 22088 - protein, 1177 aa, Dysdera silvatica
MNHNENMNGASVVALLNQNRVRVLSRGARSKNMQQSLLGGVGGCSGASNCTATRTNTAQSALQPSIGATTRAERPRQRMSWTIDMNTYIMRTYYTITKLETDMTNYRPTLHAKFAQQYPHLDISIERITTQRRNIITRNLLAEPILQRLRDEVANDLANTSTSVANPEAPVSSPREPLQTSIEQEERRDVEKMEEGFQCALAEYEGSDAATRPRIPRQPASWKLCKATKILNEHTLPLHLQNHNSLQEIHTAIYCAAVAASRANGYEVRNEGRSNRGNKAQPPWQVRLEKRIEELRSSIGRITQYMQGNRSKKLVRKVKMALKRNRIHTRHEEPNKHISEYLDTLKQKLGVYARRLRRYKDYTNRKQQNMQFQANQKAFYRKLRETPANKDKYEAPKPAEIETFWKTLWSNEVQHKSAPWIQQEMEATRGIEEMEYTGITIEELQQVIQRTHNWKAPGIDGIHNFWYKKFTSAHGPLAKELTAIIEDPSKMPEFLCKGITYLLPKDQDTSNPAKYRPITCLNTLYKILTGCISEKISRHSESNNLMTEEQKGCQKGTLGCKEQLTIDSVILEQARKQKRKLNTAYIDYKKAFDSVPHSWLLEILSIYKVHPSIIRFLQSSMKQWRTRLQLNTPDSKIETAEIPIRRGIFQGDALSPQWFCLALNPLSRMLKKDKRNLHKVSHLMYVDDIKLYAPTITQLRQLISITETFSKDIGMEFGLDKCKIQKNSKEDLPGIELEDGRLLKTLDEGETYKYLGIMQKRQQEHKKVKVQLTQAFQERLRSIVKTKLSGKNTTQAINAYAVPVLTYSFGIIKWSNTELEQLQRKMRTIQRRAGQLHPATAIERQTLPREEGGRGQADLKDLHDKQIQSMRQYFQLKSPRSPLIQAIIQADANYTPLNLCSTEERVLETANEQKLRTWAGKPLHGRHYNDLQQPHVDKKASNSWLAKGTLQPETEGFMLAIQDQVIATRNNQKFIQRKDIESDKCRHCHAASETIQHVMAGCKILAQSDYKHRHDQVAKIVHQKLAANAGFLTEKCPYYKYEPETVHENETHKLYWDRAIITDKTVPHNRPDITLVDKSNKTTYLIDIAVPNTNNIQTTYTTKITKYQDLRHEVRDIWGMEKIFIIPLVISATGIVPKTLATNLEILNIDPNTYIEIQKATILNTCHIVRKFLDMAH

SEQ ID NO: 22089 - protein, 933 aa, Dysdera silvatica
MEEGFQCALAEYEGSDATTRPRIPRQPASRANGYEVRNEGRSNRGNKAQPPWQVRLQKRIEELRSSIGRITQYMQGNRSKKLVRKVKMALKRNRIHTRHEEPNKHISEYLDTLKQKLGVYARRLRRYKDYTNRKQQNMQFQANQKAFYRKLRETPANKDKYEAPKPAEIETFWKTLWSNEVQHKSAPWIQQEMEATRGIEEMEYTGITIEELQQVIQRTHNWKAPGIDGIHNFWYKKFTSAHGPLAKELTAIIEDPSKMPEFLCKGITYLLPKDQDTSNPAKYRPITCLNTLYKILTGCISEKISRHSESNNLMTEEQKGCQKQKRKLNTAYIDYKKAFDSVPHSWLLEILSIYKVHPSIIRFLQSSMKQWRTRLQLNTPDSKIETAEIPIRRGIFQGDALSPQWFCLALNPLSRMLNTSKYGYMLKKDKRNLHKVSHLMYVDDIKLYAPTITQLRQLISITETFSKDIGMEFGLDKCKIQKNSKEDLPGIELEDGRLLKTLDEGETYKYLGIMQKRQQEHKKVKVQLTQAFQERLRSIVKTKLSGKNTTQAINAYAVPVLTYSFGIIKWSNTELEQLQRKMRTIQRRAGQLHPATAIERQTLPREEGGRGQADLKDLHDKQIQSMRQYFQLKSPRSPLIQAIIQADANYTPLNLCSTEERVLETANEQKLRTWAGKPLHGRHYNDLQQPHVDKKASNSWLAKGTLQPETEGFMLAIQDQVIATRNNQKFIQRKDIESDKCRHCHAASETIQHVMAGCKILAQSDYKHRHDQVAKIVHQKLAANAGFLTEKCPYYKYEPETVHENETHKLYWDRAIITDKTVPHNRPDITLVDKSNKTTYLIDIAVPNTNNIQTTYTTKITKYQDLRHEVRDIWGMEKIFIIPLVISATGIVPKTLATNLGILNIDPNTYIEIQKATILNTCHIVRKFLDMAH

SEQ ID NO: 22090 - protein, 1186 aa, Dysdera silvatica
MNHNENMNGASVVALLNQNRIRTLSRGVCSKNMQQSLLGGAGSCSGAYNCTATRTNRAHSALQPSIGATTRAERARQRMSWTIDMNTYIMRTYYTITKLETDMTNYRPTLHAKFAQQYPHLDISIERITTQRRNIITRNLLAQPILQRLRDEVANDLVNTSTSVANPEAPAIGAREPLQTSIEEEERRDVEKMEEGFQCALAEYEGSNAAARPRIPRQPEYWKLCAATKILNEHTLPLHLQKHNSLQEIHTAIYCAAVAASRANGYEVRNEDRNNRGSKAQPPWQVRLEKRIEELRSSIGRITQYMQGNRSKKLVRKVKMALKRNRIHTRHEEPNKHISEYLDTLKQKLGVYARRLRRYKDCTNRKQQNMQFQANQKAFYRKLQETPANKDKYEAPKPAVIETFWKTLWSNEVQHKSAPWIQQEMEATRGIEEMEYTGITIEELQQVIQRTHNWKAPGIDGIHNFWYKKFTSAHGPLAKELTAIIEDPSKMPEFLCKGITYLLPKDQDTSNPAKYRPITCLNTLYKILTGCISEKISRHSESNNLMAEEQKGCQKGTLGCKEQLTIDSVILEQARKQKRKLNTAYIDYKKAFDSVPHSWLLEILSIYKVHPSIIRFLQSSMKQWRTRLQLNTPDSKIETAEIPIRRGIFQGDALSPQWFCLALNPLSRMLNTSKYGYMLKKDKRNLHKVSHLMYVDDIKLYAPTITQLRQLISITETFSKDIGMEFGLDKCKIQKNSKEDLPGIELEDGRLLKTLDEGETYKYLGIMQKRQQEHKKVKVQLTQAFQERLRSIVKTKLSGKNTTQAINAYAVPVLTYSFGIIKWSNTELEQLQRKMRTIQRRAGQLHPATAIERQTLPREEGGRGQADLKDLHDKQIQSMRQYFQLKSPRSPLIQAIIQADANYTPLNLCSTEERVLETANEQKLRTWAGKPLHGRHYNDLQQPHVDKKASNSWLAKGTLQPETEGFMLAIQDQVIATRNNQKFIQRKDIESDKCRHCHAASETIQHVMAGCKILAQSDYKHRHDQVAKIVHQKLAANAGFLTEKCPYYKYEPETVHENETHKLYWDRAIITDKTVPHNRPDITLVDKSNKTTYLIDIAVPNTNNIQTTYTTKITKYQDLRHEVRDIWGMEKILIIPLVISATGIVPKTLATNLEILNIDPNTYIEIQKATILNTCHIVRKFLDMAH

SEQ ID NO: 22091 - protein, 881 aa, Dysdera silvatica
MQGNRGKKLVRKVKMALKRNRIHTRHEEPNKHISEYLDTLKQKLGVYARRLRRYKDYTNKKQQNMQFQANQKAFYRKLRETPANKDKYEAPKPAEIETFWKTLWSNEVQHKSAPWIQQEMEATRGIEEMEYTGITIEELQQVIQRTHNWKAPGIDGIHNFWYKKFTSAHGPLAKELTAIIEDPSKMPEFLCKGITYLLPKDQDTSNPAKYRPITCLNTLYKILTGCISEKISRHSESNNLMTEEQKGCQKGTLGCKEQLTIDSVILEQARKQKRKLNTAYIDYKKAFDSVPHSWLLEILSIYKVHPSIIRFLQSSMKQWRTRLQLNTPDSKIETAEIPIRRGIFQGDALSPQWFCLALNPLSRMLNTSKYGYMLKKDKRNLHKVSHLMYVDDIKLYAPTITQLRQLISITETFSKDIGMEFGLDKCKIQKNSKEDLPGIELEDGRLLKTLDEGETYKYLGIMQKRQQEHKKVKVQLTQAFQERLRSIVKTKLSGKNTTQAINAYAVPVLTYSFGIIKWSNTELEQLQRKMRTIQRRAGQLHPATAIERQTLPREEGGRGQADLKDLHDKQIQSMRQYFQLKSPRSPLIQAIIQADANYTPLNLCSTEERVLETANEQKLRTWAGKPLHGRHYNDLQQPHVDKKASNSWLAKGTLQPETEGFMLAIQDQVIATRNNQKFIQRKDIESDKCRHCHAASETIQHVMAGCKILAQSDYKHRHDQVAKIVHQKLAANAGFLTEKCPYYKYEPETVHENETHKLYWDRAIITDKTVPHNRPDITLVDKSNKTTYLIDIAVPNTNNIQTTYTTKITKYQDLRHEVRDIWGMEKILIIPLVISATGIVPKTLATNLEILNIDPNTYIEIQKATILNTCHIVRKFLDMAH

SEQ ID NO: 22092 - protein, 1097 aa, Dysdera silvatica
MYSIYVYLLCIRYMYILQALYVYLICTRYMYIFYVYDICIFYRHSIYILNILAEPILQRLRDEVANDLANTSTSVANPEAPAIGAREPLQPSIEEEERRDVEKMEEGFQCALAEYEGSDAATRPRIPRQPASWKLCKATKILNEHTLPLHLQNHNSLQEIHTAIYCAAVAASRANGYEVRNEGRSNRGNKAQPPWQVRLQKRIEELRSSIGRITQYMQGNRSKKLVRKVKMALKRNRIHTRHEEPNKHISEYLDTLKQKLGVYARRLRRYKDYTNKKQQNMQFQANQKAFYRKLRETPANKDKYEAPKPAEIETFWKTLWSNEVQHKSAPWIQQEMEATRGIEEMEYTGITIEELQQVIQRTHNWKAPGIDGIHNFWYKKFTSAHGPLAKELTAIIEDPSKMPEFLCKGITYLLPKDQDTSNPAKYRPITCLNTLYKILTGCISEKISRHSESNNLMTEEQKGCQKGTLGCKEQLTIDSVILEQARKQKRKLNTAYIDYKKAFDSVPHSWLLEILSIYKVHPSIIRFLQSSMKQWRTRLQLNTPDSKIETAEIPIRRGIFQGDALSPQWFCLALNPLSRMLNTSKYGYMLKKDKRNLHKVSHLMYVDDIKLYAPTITQLRQLISITETFSKDIGMEFGLDKCKIQKNSKEDLPGIELEDGRLLKTLDEGETYKYLGIMQKRQQEHKKVKVQLTQAFQERLRSIVKTKLSGKNTTQAINAYAVPVLTYSFGIIKWSNTELEQLQRKMRTIQRRAGQLHPATAIERQTLPREEGGRGQADLKDLHDKQIQSMRQYFQLKSPRSPLIQAIIQADANYTPLNLCSTEERVLETANEQKLRTWAGKPLHGRHYNDLQQPHVDKKASNSWLAKGTLQPETEGFMLAIQDQVIATRNNQKFIQRKDIESDKCRHCHAASETIQHVMAGCKILAQSDYKHRHDQVAKIVHQKLAANAGFLTEKCPYYKYEPETVHENETHKLYWDRAIITDKTVPHNRPDITLVDKSNKTTYLIDIAVPNTNNIQTTYTTKITKYQDLRHEVRDIWGMEKILIIPLVISATGIVPKTLATNLEILNIDPNTYIEIQKATILNTCHIVRKFLDMAH

SEQ ID NO: 22093 - protein, 1108 aa, Dysdera silvatica
MSWTIDMNTYIMRTYYTITKLETDMTNYRPTLHAKFAQQYPHLDISIERITTQRRNIITRNLLAEPILQRLRDEVANDLANTSTSVANPEAPASSAREPLQPSIEEEERRDVEKMEEGFQCALAEYEGSDAATRPRIPRQPASWKLCKATKILNEHTLPLHLQNHNSLQEIHTAIYCAAVAASRANGYEVRNEGRSNRGNKAQPPWQVRLQKRIEELRSSIGRITQYMQGNRSKKLVRKVKMALKRNRIHTRHEEPNKHISEYLDTLKQKLGVYARRLRRYKDYTNRKQQNMQFQANQKAFYRKLRETPANKDKYEAPKPAEIETFWKTLWSNEVQHKSAPWIQQEMEATRGIEEMEYTGITIEELQQVIQRTHNWKAPGIDGIHNFWYKKFTSAHGPLAKELTAIIEDPSKMPEFLCKGITYLLPKDQDTSNPAKYRPITCLNTLYKILTGCISEKISRHSESNNLMTEEQKGCQKGTLGCKEQLTIDSVILEQARKQKRKLNTAYIDYKKAFDSVPHSWLLEILSIYKVHPSIIRFLQSSMKQWRTRLQLNTPDSKIETAEIPIRRGIFQGDALSPQWFCLALNPLSRMLNTSKYGYMLKKDKRNLHKVSHLMYVDDIKLYAPTITQLRQLISITETFSKDIGMEFGLDKCKIQKNSKEDLPGIELEDGRLLKTLDEGETYKYLGIMQKRQQEHKKVKVQLTQAFQERLRSIVKTKLSGKNTTQAINAYAVPVLTYSFGIIKWSNTELEQLQRKMRTIQRRAGQLHPATAIERQTLPREEGGRGQADLKDLHDKQIQSMRQYFQLKSPRSPLIQAIIQADANYTPLNLCSTEERVLETANEQKLRTWAGKPLHGRHYNDLQQPHVDKKASNSWLAKGTLQPETEGFMLAIQDQVIATRNNQKFIQRKDIESDKCRHCHAASETIQHVMAGCKILAQSDYKHRHDQVAKIVHQKLAANAGFLTEKCPYYKYEPETVHENETHKLYWDRAIITDKTVPHNRPDITLVDKSNKTTYLIDIAVPNTNNIQTTYTTKITKYQDLRHEVRDIWGMEKILIIPLVISATGIVPKTLATNLEILNIDPNTYIEIQKATILNTCHIVRKFLDMAH

SEQ ID NO: 22094 - protein, 927 aa, Dysdera silvatica
MYTHNGYEVRNEGRSNRGNKAQPPWQVRLEKRIEELRSSIGRITQYMQGNRSKKLVRKVKMALKRNRIHTRHEEPNKHISEYLDTLKQKLGVYARRLRRYKDYTNRKQQNMQFQANQKAFYRKLRETPANKDKYEAPKPAEIETFWKTLWSNEVQHKSAPWIQQEMEATRGIEEMEYTGITIEELQQVIQRTHNWKAPGIDGIHNFWYKKFTSAHGPLAKELTAIIEDPSKMPEFLCKGITYLLPKDQDTSNPAKYRPITCLNTLYKILTGCISEKISRHSESNNLMTEEQKGCQKGTLGCKEQLTIDSVILEQARKQKRKLNTAYIDYKKAFDSVPHSWLLEILSIYKVHPSIIRFLQSSMKQWRTRLQLNTPDSKIETAEIPIRRGIFQGDALSPQWFCLALNPLSRMLNTSKYGYMLKKDKRNLHKVSHLMYVDDIKLYAPTITQLRQLISITETFSKDIGMEFGLDKCKIQKNSKEDLPGIELEDGRLLKTLDEGETYKYLGIMQKRQQEHKKVKVQLTQAFQERLRSIVKTKLSGKNTTQAINAYAVPVLTYSFGIIKWSNTELEQLQRKMRTIQRRAGQLHPATAIERQTLPREEGGRGQADLKDLHDKQIQSMRQYFQLKSPRSPLIQAIIQADANYTPLNLCSTEERVLETANEQKLRTWAGKPLHGRHYNDLQQPHVDKKASNSWLAKGTLQPETEGFMLAIQDQVIATRNNQKFIQRKDIESDKCRHCHAASETIQHVMAGCKILAQSDYKHRHDQVAKIVHQKLAANAGFLTEKCPYYKYEPETVHENETHKLYWDRAIITDKTVPHNRPDITLVDKSNKTTYLIDIAVPNTNNIQTTYTTKITKYQDLRHEVRDIWGMEKIFIIPLVISATGIVPKTLATNLEILNIDPNTYIEIQKATILNTCHIVRKFLDMAH

SEQ ID NO: 22095 - protein, 1186 aa, Dysdera silvatica
MNHNENMNGASVVSLLNQNRVRVLSRGASSKNMQQSLLGGVGGCSGASNCTATRTNTAQSALQPSIGATTRAERPRQRMSWTIDMNTYIMRTYYTITKLETDMTNYRPTLHAKFAQQYPHLDISIERITTQRRNIITRNLLAEPILQRLRDEVANDLANTSTSVANPEAPASSAREPLQPSIEEEERRDVEKMEEGFQCALAEYEGSDAATRPRIPRQPASWKLCKATKILNEHTLPLHLQNHNSLQEIHTAIYCAAVAASRANGYEVRNEGRSNRGNKAQPPWQVRLEKRIEELRSSIGRITQYMQGNRSKKLVRKVKMALKRNRIHTRHEEPNKHISEYLDTLKQKLGVYARRLRRYKDYTNKKQQNMQFQANQKAFYRKLRETPANKDKYEAPKPAEIETFWKTLWSNEVQHKSAPWIQQEMEATRGIEEMEYTGITIEELQQVIQRTHNWKAPGIDGIHNFWYKKFTSAHGPLAKELTAIIEDPSKMPEFLCKGITYLLPKDQDTSNPAKYRPITCLNTLYKILTGCISEKISRHSESNNLMTEEQKGCQKGTLGCKEQLTIDSVILEQARKQKRKLNTAYIDYKKAFDSVPHSWLLEILSIYKVHPSIIRFLQSSMKQWRTRLQLNTPDSKIETAEIPIRRGIFQGDALSPQWFCLALNPLSRMLNASKYGYMLKKDKRNLHKVSHLMYVDDIKLYAPTITQLRQLISITETFSKDIGMEFGLDKCKIQKNSKEDLPGIELEDGRLLKTLDEGETYKYLGIMQKRQQEHKKVKVQLTQAFQERLRSIVKTKLSGKNTTQAINAYAVPVLTYSFGIIKWSNTELEQLQRKMRTIQRRAGQLHPATAIERQTLPREEGGRGQADLKDLHDKQIQSMRQYFQLKSPRSPLIQAIIQADANYTPLNLCSTEERVLETANEQKLRTWAGKPLHGRHYNDLQQPHVDKKASNSWLAKGTLQPETEGFMLAIQDQVIATRNNQKFIQRKDIESDKCRHCHAASETIQHVMAGCKILAQSDYKHRHDQVAKIVHQKLAANAGFLTEKCPYYKYEPETVHENETHKLYWDRAIITDKTVPHNRPDITLVDKSNKTTYLIDIAVPNTNNIQTTYTTKITKYQDLRHEVRDIWGMEKILIIPLVISATGIVPKTLATNLEILNIDPNTYIEIQKATILNTCHIVRKFLDMAH

SEQ ID NO: 22096 - protein, 1186 aa, Dysdera silvatica
MNHNENMNGASVVSLLNQNRVRTLSRGASSKNMQQSLLGGVGGCSGASNCTATRTNTAQSALQPSIGATTRAERPRQRMSWTIDMNTYIMRTYYTITKLETDMTNYRPTLHAKFAQQYPHLDISIERITTQRRNIITRNLLAEPILQRLRDEVANDLANTSTSVANPEAPAIGAREPLQTSIEQEERRDVEKMEEGFQCALAEYEGSDAATRPRIPRQPASWKLCKATKILNEHTLPLHLQNHNSLQEIHTAIYCAAVAASRANGYEVRNEGRSNRGNKAQPPWQVRLEKRIEELRSSIGRITQYMQGNRGKKLVRKVKMALKRNRIHTRHEEPNKHISEYLDTLKQKLGVYARRLRRYKDYTNKKQQNMQFQANQKAFYRKLRETPANKDKYEAPKPAEIETFWKTLWSNEVQHKSAPWIQQEMEATRGIEEMEYTGITIEELQQVIQRTHNWKAPGIDGIHNFWYKKFTSAHGPLAKELTAIIEDPSKMPEFLCKGITYLLPKDQDTSNPAKYRPITCLNTLYKILTGCISEKISRHSESNNLMTEEQKGCQKGTLGCKEQLTIDSVILEQARKQKRKLNTAYIDYKKAFDSVPHSWLLEILSIYKVHPSIIRFLQSSMKQWRTRLQLNTPDSKIETAEIPIRRGIFQGDALSPQWFCLALNPLSRMLNTSKYGYMLKKDKRNLHKVSHLMYVDDIKLYAPTITQLRQLISITETFSKDIGMEFGLDKCKIQKNSKEDLPGIELEDGRLLKTLDEGETYKYLGIMQKRQQEHKKVKVQLTQAFQERLRSIVKTKLSGKNTTQAINAYAVPVLTYSFGIIKWSNTELEQLQRKMRTIQRRAGQLHPATAIERQTLPREEGGRGQADLKDLHDKQIQSMRQYFQLKSPRSPLIQAIIQADANYTPLNLCSTEERVLETANEQKLRTWAGKPLHGRHYNDLQQPHVDKKASNSWLAKGTLQPETEGFMLAIQDQVIATRNNQKFIQRKDIESDKCRHCHAASETIQHVMAGCKILAQSDYKHRHDQVAKIVHQKLAANAGFLTEKCPYYKYEPETVHENETHKLYWDRAIITDKTVPHNRPDITLVDKSNKTTYLIDIAVPNTNNIQTTYTTKITKYQDLRHEVRDIWGMEKILIIPLVISATGIVPKTLATNLEILNIDPNTYIEIQKATILNTCHIVRKFLDMAH

SEQ ID NO: 22097 - protein, 1186 aa, Dysdera silvatica
MNHNENMNGASVVSLLNQNRVRVLSRGASSKNMQQSLLGGVGGCSGASNCTATRTNTAQSALQPSIGATTRAERPRQRMSWTIDMNTYIMRTYYTITKLETDMTNYRPTLHAKFAQQYPHLDISIERITTQRRNIITRNLLAEPILQRLRDEVANDLANTSTSVANPEAPASSAREPLQPSIEEEERRDVEKMEEGFQCALAEYEGSDAATRPRIPRQPASWKLCKATKILNEHTLPLHLQNHNSLQEIHTAIYCAAVAASRANGYEVRNEGRSNRGNKAQPPWQVRLEKRIEELRSSIGRITQYMQGNRSKKLVRKVKMALKRNRIHTRHEEPNKHISEYLDTLKQKLGVYARRLRRYKDYTNRKQQNMQFQANQKAFYRKLRETPANKDKYEAPKPAEIETFWKTLWSNEVQHKSAPWIQQEMEATRGIEEMEYTGITIEELQQVIQRTHNWKAPGIDGIHNFWYKKFTSAHGPLAKELTAIIEDPSKMPEFLCKGITYLLPKDQDTSNPAKYRPITCLNTLYKILTGCISEKISRHSESNNLMTEEQKGCQKGTLGCKEQLTIDSVILEQARKQKRKLNTAYIDYKKAFDSVPHSWLLEILSIYKVHPSIIRFLQSSMKQWRTRLQLNTPDSKIETAEIPIRRGIFQGDALSPQWFCLALNPLSRMLNTSKYGYMLKKDKRNLHKVSHLMYVDDIKLYAPTITQLRQLISITETFSKDIGMEFGLDKCKIQKNSKEDLPGIELEDGRLLKTLDEGETYKYLGIMQKRQQEHKKVKVQLTQAFQERLRSIVKTKLSGKNTTQAINAYAVPVLTYSFGIIKWSNTELEQLQRKMRTIQRRAGQLHPATAIERQTLPREEGGRGQADLKDLHDKQIQSMRQYFQLKSPRSPLIQAIIQADANYTPLNLCSTEERVLETANEQKLRTWAGKPLHGRHYNDLQQPHVDKKASNSWLAKGTLQPETEGFMLAIQDQVIATRNNQKFIQRKDIESDKCRHCHAASETIQHVMAGCKILAQSDYKHRHDQVAKIVHQKLAANAGFLTEKCPYYKYEPETVHENETHKLYWDRAIITDKTVPHNRPDITLVDKSNKTTYLIDIAVPNTNNIQTTYTTKITKYQDLRHEVRDIWGMEKIFIIPLVISATGIVPKTLATNLEILNIDPNTYIEIQKATILNTCHIVRKFLDMAH

SEQ ID NO: 22098 - protein, 1112 aa, Dysdera silvatica
MLLSRSWNAWSLGPCSCCSYMITKLETDMTNYRPTLYVKFAQQYPHLDISIERITTQRRNIITRNLLAEPILQRLRDEVANDLANTSTSVANPETPAIGAREPLQTSIEEEERRDVEKMEEGFQCALAEYEGSNAATRPRIPRQPASWKLCKATKILNEHTLPLHLQKHNSLQEIHTAIYCAAVAASRANGYEVRNEGRSNRGNKAQPPWQVRLQKRIEELRSSIGRITQYMQGNRSKKLVRKVKMALKRNRIHTRHEEPNKHISEYLDTLKQKLSVYARRLRRYKDYTNRKQQNKKFQTNQKAFYRKLQETSASQDKYETPKPAEIETFWKTLWSNEIQHKSAPWIQQEMEATRGIEEMEYTGITIEELQQVIQRTHNWKAPGIDGIHNFWYKKFTSAHGPLAKELTAIIEDPSKMPEFLCKGITYLLPKDQDTSNPAKYRPITCLNTLYKILTGCISEKISRHSESNNLMTEEQKGCQKGTLGCKEQLTIDSVILEQARKQKRKLNTAYIDYKKAFDSVPHSWLLEILSIYKVHPSIIRFLQSSMKQWRTRLQLNTPDSKIESAEIPIRRGIFQGDALSPQWFCLALNPLSRMLNTSKYGYMLKKDKRNLHKVSHLMYVDDIKLYAPTITQLRQLISITETFSKDIGMEFGLDKCKIQKNSKEDLPGIELEDGRLLKTLDEGETYKYLGIMQKRQQEHKKVKVQLTQAFQERLRSIVKTKLSGKNTTQAINAYAVPVLTYSFGIIKWSNTELEQLQRKMRTIQRRAGQLHPATAIERQTLPREEGGRGQADLKDLHDKQIQSMRQYFQLKSPRSPLIQAIIQADANYTPLNLCSTEERVLETANEQKLRTWAGKPLHGRHYNDLQQPHVDKKASNSWLAKGTLQPETEGFMLAIQDQVIATRNNQKFIQRKDIESDKCRHCHAASETIQHVMAGCKILAQSDYKHRHDQVAKIVHQKLAANAGFLTEKCPYYKYEPETVHENETHKLYWDRAIITDKTVPHNRPDITLVDKSNKTTYLIDIAVPNTNNIQTTYTTKITKYQDLRHEVRDIWGMEKILIIPLVISATGIVPKTLATNLEILNIDPNTYIEIQKATILNTCHIVRKFLDMAH

SEQ ID NO: 22099 - protein, 1103 aa, Dysdera silvatica
MDNRYEHHMRTYHTIKARNRHDKLQRPTLHAKFAQQYPHLDISIERITTQRRNIITTNLLAEPILQRLRDEVANDLANISTSVANPEAPANSAREPLQPSIEERRDVEKMEEGFQCALAEYEGSDATTRPRIPHQPASWKLCKATKILNEHTLPLHLQTHNFLREIHTAIYCATVAASRANGYEVRNEGRSNRGNKAQPPWQVRLQKRIEELRSSIGRITQYMQGNRSKKLVRKVKMALKRNRIHTRHEEPNKHISEYLDTLKQKLGVYARRLRRYKDYTNRKQQNKQFQTNQKAFYRKLRETPANQDKYEAPKPAEIETFWKTLWSNEVQHKSAPWIQQEMEAASGIEEMEYTGITIEELQQVIQRTHNWKAPGIDGIHNFWYKKFTSAHGPLAKELTAIIEDPSKMPEFLCKGITYLLPKDQDTSNPAKYRPITCLNTLYKILTGCISEKISRHSESNNLMTEEQKGCQKGTLGCKEQLTIDSVILEQARKQKRKLNTAYIDYKKAFDSVPHSWLLEILSIYKVHPSIIRFLQSSMKQWRTRLQLNTPDSKIETAEIPIRRGIFQGDALSPQWFCLALNPLSRMLNTSKYGYMLKKDKRNLHKVSHLMYVDDIKLYAPTITQLRQLISITETFSKDIGMEFGLDKCKIQKNSKEDLPGIELEDGRLLKTLDEGETYKYLGIMQKRQQEHKKVKVQLTQAFQERLRSIVKTKLSGKNTTQAINAYAVPVLTYSFGIIKWSNTELEQLQRKMRTIQRRAGQLHPATAIERQTLPREEGGRGQADLKDLHDKQIQSMRQYFQLKSPRSPLIQAIIQADANYTPLNLCSTEERVLETANEQKLRTWAGKPLHGRHYNDLQQPHVDKKASNSWLAKGTLQPETEGFMLAIQDQVIATRNNQKFIQRKDIESDKCRHCHAASETIQHVMAGCKILAQSDYKHRHDQVAKIVHQKLAANAGFLTEKCPYYKYEPETVHENETHKLYWDRAIITDKTVPHNRPDITLVDKSNKTTYLIDIAVPNTNNIQTTYTTKITKYQDLRHEVRDIWGMEKILIIPLVISATGIVPKTLATNLEILNIDPNTYIEIQKATILNTCHIVRKFLDMAH

SEQ ID NO: 22100 - protein, 1186 aa, Dysdera silvatica
MNHNENMNGASVVSLLNQNRVRVLSRGASSKNMQQSLLGGVGGCSGASNCTATRTNTAQSALQPSIGATTRAERPRQRMSWTIDMNTYIMRTYYTITKLETDMTNYRPTLHAKFAQQYPHLDISIERITTQRRNIITRNLLAEPILQRLRDEVANDLANTSTSVANPEAPASSAREPLQPSIEEEERRDVEKMEEGFQCALAEYEGSDAATRPRIPRQPASWKLCKATKILNEHTLPLHLQNHNSLQEIHTAIYCAAVAASRANGYEVRNEGRSNRGNKAQPPWQVRLEKRIEELRSSIGRITQYMQGNRGKKLVRKVKMALKRNRIHTRHEEPNKHISEYLDTLKQKLGVYARRLRRYKDYTNKKQQNMQFQANQKAFYRKLRETPANKDKYEAPKPAEIETFWKTLWSNEVQHKSAPWIQQEMEATRGIEEMEYTGITIEELQQVIQRTHNWKAPGIDGIHNFWYKKFTSAHGPLAKELTAIIEDPSKMPEFLCKGITYLLPKDQDTSNPAKYRPITCLNTLYKILTGCISEKISRHSESNNLMTEEQKGCQKGTLGCKEQLTIDSVILEQARKQKRKLNTAYIDYKKAFDSVPHSWLLEILSIYKVHPSIIRFLQSSMKQWRTRLQLNTPDSKIETAEIPIRRGIFQGDALSPQWFCLALNPLSRMLNTSKYGYMLKKDKRNLHKVSHLMYVDDIKLYAPTITQLRQLISITETFSKDIGMEFGLDKCKIQKNSKEDLPGIELEDGRLLKTLDEGETYKYLGIMQKRQQEHKKVKVQLTQAFQERLRSIVKTKLSGKNTTQAINAYAVPVLTYSFGIIKWSNTELEQLQRKMRTIQRRAGQLHPATAIERQTLPREEGGRGQADLKDLHDKQIQSMRQYFQLKSPRSPLIQAIIQADANYTPLNLCSTEERVLETANEQKLRTWAGKPLHGRHYNDLQQPHVDKKASNSWLAKGTLQPETEGFMLAIQDQVIATRNNQKFIQRKDIESDKCRHCHAASETIQHVMAGCKILAQSDYKHRHDQVAKIVHQKLAANAGFLTEKCPYYKYEPETVHENETHKLYWDRAIITDKTVPHNRPDITLVDKSNKTTYLIDIAVPNTNNIQTTYTTKITKYQDLRHEVRDIWGMEKILIIPLVISATGIVPKTLATNLEILNIDPNTYIEIQKATILNTCHIVRKFLDMAH

SEQ ID NO: 22101 - protein, 1175 aa, Dysdera silvatica
MNHNENMNGASVVSLLNQNRVRTLSRGASSKNMQQSLLGGVGGCSGASNCTATRTNTAQSALQPSIGATTRAERPRQRMSWTIDMNTYIMRTYYTITKLETDMTNYRPTLHAKFAQQYPHLDISIERITTQRRNIITRNLLAEPILQRLRDEVANDLANTSTSVANPEAPVSSPREPLQPSIEEGFQCALAEYEGSDAATRPRIPRQPASWKLCKATKILNEHTLPLHLQNHNSLQEIHTAIYCAAVAASRANGYEVRNEGRSNRGNKAQPPWQVRLEKRIEELRSSIGRITQYMQGNRGKKLVRKVKMALKRNRIHTRHEEPNKHISEYLDTLKQKLGVYARRLRRYKDYTNKKQQNMQFQANQKAFYRKLRETPANKDKYEAPKPAEIETFWKTLWSNEVQHKSAPWIQQEMEATRGIEEMEYTGITIEELQQVIQRTHNWKAPGIDGIHNFWYKKFTSAHGPLAKELTAIIEDPSKMPEFLCKGITYLLPKDQDTSNPAKYRPITCLNTLYKILTGCISEKISRHSESNNLMTEEQKGCQKGTLGCKEQLTIDSVILEQARKQKRKLNTAYIDYKKAFDSVPHSWLLEILSIYKVHPSIIRFLQSSMKQWRTRLQLNTPDSKIETAEIPIRRGIFQGDALSPQWFCLALNPLSRMLNTSKYGYMLKKDKRNLHKVSHLMYVDDIKLYAPTITQLRQLISITETFSKDIGMEFGLDKCKIQKNSKEDLPGIELEDGRLLKTLDEGETYKYLGIMQKRQQEHKKVKVQLTQAFQERLRSIVKTKLSGKNTTQAINAYAVPVLTYSFGIIKWSNTELEQLQRKMRTIQRRAGQLHPATAIERQTLPREEGGRGQADLKDLHDKQIQSMRQYFQLKSPRSPLIQAIIQADANYTPLNLCSTEERVLETANEQKLRTWAGKPLHGRHYNDLQQPHVDKKASNSWLAKGTLQPETEGFMLAIQDQVIATRNNQKFIQRKDIESDKCRHCHAASETIQHVMAGCKILAQSDYKHRHDQVAKIVHQKLAANAGFLTEKCPYYKYEPETVHENETHKLYWDRAIITDKTVPHNRPDITLVDKSNKTTYLIDIAVPNTNNIQTTYTTKITKYQDLRHEVRDIWGMEKILIIPLVISATGIVPKTLATNLEILNIDPNTYIEIQKATILNTCHIVRKFLDMAH

SEQ ID NO: 22102 - protein, 945 aa, Dysdera silvatica
MEIFYIYIYTAIYCAATAASRANGYEVRNEGRNNRGNKAQPPWQVRLQKRIEELRRSIGRITQYMQGNRSRKLVRKVKMALKRNRMHTRHEEPNKHISEYLDTLKQKLGVYARRLRRYKDCTNKKQQNMQFQANQKAFYRKLQETPANKDKYEAPKPAVIETFWKTLWSNEVQHKSAPWIQQEMEATRGIEEMEYTGITIEELQQVIQRTHNWKAPGIDGIHNFWYKKFTSIHGPLAKELTAIIEDPSEMPEFLCKGITYLLPKDQDKSNPAKYRPITCLNTLYKILTGCISEKISRHSESNNLMTEEQKGCQKGTLGCKEQLTIDSVILEQARKQKRKLNTAYIDYKKAFDSVPHSWLLEILSIYKVHPSIIRFLQSSMKQWRTRLQLNTPDSKIKTAEIPIRRGIFQGDALSPQWFCLALNPLSRMLNTSKYGYMLKKDKRNLHKVSHLMYVDDIKLYAPTITQLRQLISITETFSKDIGMEFGLDKCKIQKNSKEDLPGIEFEDGRLLKILDEGETYKYLGIMQKRQQEHKKVKVQLTQAFQERLRSIVKTKLSGKNTTQAINAYAVPVLTYSFGIIKWSNTELEQLQRKMRTIQRRAGQLHPATAIERQTLPREEGGRGQADLKDLHDKQIQSMRQYFQLKSPRSPLIQAIIQADANYTPLNLCSTEERVLETANEQKLRTWAGKPLHGRHYNDLQQPHVDKKASNSWLAKGTLQPETEGFMLAIQDQVIATRNNQKFIQRKDIESDKCRHCHAASETIQHVMAGCKILAQSDYKHRHDQVAKIVHQKLAANAGFLTEKCPYYKYEPETVHENETHKLYWDRAIITDKTVPHNRPDITLVDKSNKTTYLIDIAVPNTNNIQTTYTTKITKYQDLRHEVRDIWGMEKIFIIPLVISATGIVPKTLATNLEILNIDPNTYIEIQKATILNTCHIVRKFLDMAH

SEQ ID NO: 22103 - protein, 1186 aa, Dysdera silvatica
MNHNENMNGASVVSLLNQNRVRALSRGASSKNMQQSLLGGVGGCSGASNCTATRTNTAQSALQPSIGATTRAERPRQRMSWTIDMNTYIMRTYYTITKLETDMTNYRPTLHAKFAQQYPHLDISIERITTQRRNIITRNLLAEPILQRLRDEVANDLANTSTSVANPETPAIGAREPLQTSIEEEERRDVEKMEEGFQCALAEYEGSDAATRPRIPRQPASWKLCKATKILNEHTLPLHLQKHNSLHEIHTAIYCAAVAASRANGYEVRNEGRSNRGNKAQPPWQVRLQKRIEELRSSIGRITQYMQGNRSKKLVRKVKMALKRNRIHTRHEEPNKHISEYLDTLKQKLGVYARRLRRYKDYTNKKQQNMQFQANQKAFYRKLRETPANKDKYEAPKPAEIETFWKTLWSNEVQHKSAPWIQQEMEATRGIEEMEYTGITIEELQQVIQRTHNWKAPGIDGIHNFWYKKFTSAHGPLAKELTAIIEDPSKMPEFLCKGITYLLPKDQDTSNPAKYRPITCLNTLYKILTGCISEKISRHSESNNLMTEEQKGCQKGTLGCKEQLTIDSVILEQARKQKRKLNTAYIDYKKAFDSVPHSWLLEILSIYKVHPSIIRFLQSSMKQWRTRLQLNTPDSKIETAEIPIRRGIFQGDALSPQWFCLALNPLSRMLNTSKYGYMLKKDKRNLHKVSHLMYVDDIKLYAPTITQLRQLISITETFSKDIGMEFGLDKCKIQKNSKEDLPGIELEDGRLLKTLDEGETYKYLGIMQKRQQEHKKVKVQLTQAFQERLRSIVKTKLSGKNTTQAINAYAVPVLTYSFGIIKWSNTELEQLQRKMRTIQRRAGQLHPATAIERQTLPREEGGRGQADLKDLHDKQIQSMRQYFQLKSPRSPLIQAIIQADANYTPLNLCSTEERVLETANEQKLRTWAGKPLHGRHYNDLQQPHVDKKASNSWLAKGTLQPETEGFMLAIQDQVIATRNNQKFIQRKDIESDKCRHCHAASETIQHVMAGCKILAQSDYKHRHDQVAKIVHQKLAANAGFLTEKCPYYKYEPETVHENETHKLYWDRAIITDKTVPHNRPDITLVDKSNKTTYLIDIAVPNTNNIQTTYTTKITKYQDLRHEVRDIWGMEKIFIIPLVISATGIVPKTLATNLEILNIDPNTYIEIQKATILNTCHIVRKFLDMAH

SEQ ID NO: 22104 - protein, 881 aa, Dysdera silvatica
MQGNRGKKLVRKVKMALKRNRIHTRHEEPNKHISEYLDTLKQKLGVYARRLRRYKDCTNKKQQNKEFRTNKKAVYRKLRETPANKDKYEAPKPAEIETFWKTLWSNEVQHKSAPWIQQEMEATRGIEEMEYTGITIEELQQVIQRTHNWKAPGIDGIHNFWYKKFTSAHGPLAKELTAIIEDPSKMPEFLCKGITYLLPKDQDTSDPAKYRPITCLNTLYKILTGCISEKISRHSESNNLMTEEQKGCQKGTLGCKEQLTIDSVILEQARKQKRKLNTAYIDYKKAFDSVPHSWLLEILSIYKVHPSIIRFLQSSMKQWRTRLQLNTPDSKIETAEIPIRRGIFQGDALSPQWFCLALNPLSRMLNTSKYGYMLKKDKRNLHKVSHLMYVDDIKLYAPTITQLRQLISITETFSKDIGMEFGLDKCKIQKNSKEDLPGIELEDGRLLKTLDEGETYKYLGIMQKRQQEHKKVKVQLTQAFQERLRSIVKTKLSGKNTTQAINAYAVPVLTYSFGIIKWSNTELEQLQRKMRTIQRRAGQLHPATAIERQTLPREEGGRGQADLKDLHDKQIQSMRQYFQLKSPRSPLIQAIIQADANYTPLNLCSTEERVLETANEQKLRTWAGKPLHGRHYNDLQQPHVDKKASNSWLAKGTLQPETEGFMLAIQDQVIATRNNQKFIQRKDIESDKCRHCHAASETIQHVMAGCKILAQSDYKHRHDQVAKIVHQKLAANAGFLTEKCPYYKYEPETVHENETHKLYWDRAIITDKTVPHNRPDITLVDKSNKTTYLIDIAVPNTNNIQTTYTTKITKYQDLRHEVRDIWGMEKILIIPLVISATGIVPKTLATNLEILNIDPNTYIEIQKATILNTCHIVRKFLDMAH

SEQ ID NO: 22105 - protein, 881 aa, Dysdera silvatica
MQGNRSKKLVRKVKMALKRNRIHTRHEEPNKHISEYLDTLKQKLGVYARRLRRYKDYTNKKQQNMQFQANQKAFYRKLRETPANKDKYEAPKPAEIETFWKTLWSNEVQHKSAPWIQQEMEATRGIEEMEYTGITIEELQQVIQRTHNWKAPGIDGIHNFWYKKFTSAHGPLAKELTAIIEDPSKMPEFLCKGITYLLPKDQDTSNPAKYRPITCLNTLYKILTGCISEKISRHSESNNLMTEEQKGCQKGTLGCKEQLTIDSVILEQARKQKRKLNTAYIDYKKAFDSVPHSWLLEILSIYKVHPSIIRFLQSSMKQWRTRLQLNTPDSKIETAEIPIRRGIFQGDALSPQWFCLALNPLSRMLNTSKYGYMLKKDKRNLHKVSHLMYVDDIKLYAPTITQLRQLISITETFSKDIGMEFGLDKCKIQKNSKEDLPGIELEDGRLLKTLDEGETYKYLGIMQKRQQEHKKVKVQLTQAFQERLRSIVKTKLSGKNTTQAINAYAVPVLTYSFGIIKWSNTELEQLQRKMRTIQRRAGQLHPATAIERQTLPREEGGRGQADLKDLHDKQIQSMRQYFQLKSPRSPLIQAIIQADANYTPLNLCSTEERVLETANEQKLRTWAGKPLHGRHYNDLQQPHVDKKASNSWLAKGTLQPETEGFMLAIQDQVIATRNNQKFIQRKDIESDKCRHCHAASETIQHVMAGCKILAQSDYKHRHDQVAKIVHQKLAANAGFLTEKCPYYKYEPETVHENETHKLYWDRAIITDKTVPHNRPDITLVDKSNKTTYLIDIAVPNTNNIQTTYTTKITKYQDLRHEVRDIWGMEKILIIPLVISATGIVPKTLATNLEILNIDPNTYIEIQKATILNTCHIVRKFLDMAH

SEQ ID NO: 22106 - protein, 1005 aa, Dysdera silvatica
MEEEERRDVEKMEEGFQCALAEYEGSCSATRTKIPRQPASWKLCKATKILNEHTLPLHLQNHNSLQEIHTAIYCAAVAASRANGYEVRNEGRSNRGNKAQPPWQVRLEKRIKELRSSIGRITQYMQGNRGKKLVRKVKMALKRNRIHTRHEEPNKHISEYLDTLKQKLGVYARRLRRYKDYTNKKQQNMQFQANQKAFYRKLRETPANKDKYEAPKPAEIETFWKTLWSNEVQHKSAPWIQQEMEATRGIEEMEYTGITIEELQQVIQRTHNWKAPGIDGIHNFWYKKFTSAHGPLAKELTAIIEDPSKMPEFLCKGITYLLPKDQDTSNPAKYRPITCLNTLYKILTGCISEKISRHSESNNLMTEEQKGCQKGTLGCKEQLTIDSVILEQARKQKRKLNTAYIDYKKAFDSVPHSWLLEILSIYKVHPSIIRFLQSSMKQWRTRLQLNTPDSKIETAEIPIRRGIFQGDALSPQWFCLALNPLSRMLNTSKYGYMLKKDKRNLHKVSHLMYVDDIKLYAPTITQLRQLISITETFSKDIGMEFGLDKCKIQKNSKEDLPGIELEDGRLLKTLDEGETYKYLGIMQKRQQEHKKVKVQLTQAFQERLRSIVKTKLSGKNTTQAINAYAVPVLTYSFGIIKWSNTELEQLQRKMRTIQRRAGQLHPATAIERQTLPREEGGRGQADLKDLHDKQIQSMRQYFQLKSPRSPLIQAIIQADANYTPLNLCSTEERVLETANEQKLRTWAGKPLHGRHYNDLQQPHVDKKASNSWLAKGTLQPETEGFMLAIQDQVIATRNNQKFIQRKDIESDKCRHCHAASETIQHVMAGCKILAQSDYKHRHDQVAKIVHQKLAANAGFLTEKCPYYKYEPETVHENETHKLYWDRAIITDKTVPHNRPDITLVDKSNKTTYLIDIAVPNTNNIQTTYTTKITKYQDLRHEVRDIWGMEKILIIPLVISATGIVPKTLATNLEILNIDPNTYIEIQKATILNTCHIVRKFLDMAH

SEQ ID NO: 22107 - protein, 1185 aa, Dysdera silvatica
MNHNENMNGASVVALLNQNRVRVLSRGASSKNMQQSLLGGVGGCSGASNCTATRTNTAQSALQPSIGATTRAERPRQRMSWTIDMNTYIMRTYYTITKLETDMTNYRPTLHAKFAQQYPHLDISIERITTQRRNIITRNLLAEPILQRLRDEVANDLANTSTSVANPEPPVSSPREPLQPSIEEERRDVEKMEEGFQCALAEYEGSDAATRPRIPRQPASWKLCKATKILNEHTLPLHLQNHNSLQEIHTAIYCAAVAASRANGYEVRNEGRSNRGNKAQPPWQVRLEKRIEELRSSIGRITQYMQGNRGKKLVRKVKMALKRNRIHTRHEEPNKHISEYLDTLKQKLGVYARRLRRYKDYTNKKQQNMQFQANQKAFYRKLRETPANKDKYEAPKPAEIETFWKTLWSNEVQHKSAPWIQQEMEATRGIEEMEYTGITIEELQQVIQRTHNWKAPGIDGIHNFWYKKFTSAHGPLAKELTAIIEDPSKMPEFLCKGITYLLPKDQDTSNPAKYRPITCLNTLYKILTGCISEKISRHSESNNLMTEEQKGCQKGTLGCKEQLTIDSVILEQARKQKRKLNTAYIDYKKAFDSVPHSWLLEILSIYKVHPSIIRFLQSSMKQWRTRLQLNTPDSKIETAEIPIRRGIFQGDALSPQWFCLALNPLSRMLNTSKYGYMLKKDKRNLHKVSHLMYVDDIKLYAPTITQLRQLISITETFSKDIGMEFGLDKCKIQKNSKEDLPGIELEDGRLLKTLDEGETYKYLGIMQKRQQEHKKVKVQLTQAFQERLRSIVKTKLSGKNTTQAINAYAVPVLTYSFGIIKWSNTELEQLQRKMRTIQRRAGQLHPATAIERQTLPREEGGRGQADLKDLHDKQIQSMRQYFQLKSPRSPLIQAIIQADANYTPLNLCSTEERVLETANEQKLRTWAGKPLHGRHYNDLQQPHVDKKASNSWLAKGTLQPETEGFMLAIQDQVIATRNNQKFIQRKDIESDKCRHCHAASETIQHVMAGCKILAQSDYKHRHDQVAKIVHQKLAANAGFLTEKCPYYKYEPETVHENETHKLYWDRAIITDKTVPHNRPDITLVDKSNKTTYLIDIAVPNTNNIQTTYTTKITKYQDLRHEVRDIWGMEKIFIIPLVISATGIVPKTLATNLEILNIDPNTYIEIQKATILNTCHIVRKFLDMAH

SEQ ID NO: 22108 - protein, 1186 aa, Dysdera silvatica
MNHNENMNGASVVSLLNQNRVRTLSRGASSKNMQQSLLGGVGGCSGASNCTATRTNTAQSALQPSIGATTRAERPRQRMSWTIDMNTYIMRTYYTITKLETDMTNYRPTLHAKFAQQYPHLDISIERITTQRRNIITRNLLAEPILQRLRDEVANDLANTSTSVANPEAPASSAREPLQPSIEEEERRDVEKMEEGFQCALAEYEGSDAATRPRIPRQPASWKLCKATKILNEHTLPLHLQNHNSLQEIHTAIYCAAVAASRANGYEVRNEGRSNRGNKAQPPWQVRLQKRIEELRSSIGRITQYMQGNRGKKLVRKVKMALKRNRIHTRHEEPNKHISEYLDTLKQKLGVYARRLRRYKDCTNKKQQNMQFQANQKAFYRKLRETPANKDKYEAPKPAEIETFWKTLWSNEVQHKSAPWIQQEMEATRGIEEMEYTGITIEELQQVIQRTHNWKAPGIDGIHNFWYKKFTSAHGPLAKELTAIIEDPSKMPEFLCKGITYLLPKDQDTSNPAKYRPITCLNTLYKILTGCISEKISRHSESNNLMTEEQKGCQKGTLGCKEQLTIDSVILEQARKQKRKLNTAYIDYKKAFDSVPHSWLLEILSIYKVHPSIIRFLQSSMKQWRTRLQLNTPDSKIETAEIPIRRGIFQGDALSPQWFCLALNPLSRMLNTSKYGYMLKKDKRNLHKVSHLIYVDDIKLYAPTITQLRQLISITETFSKDIGMEFGLDKCKIQKNSKEDLPGIELEDGRLLKTLDEGETYKYLGIMQKRQQEHKKVKVQLTQAFQERLRSIVKTKLSGKNTTQAINAYAVPVLTYSFGIIKWTNTELEQLQRKMRTIQRRAGQLHPATAIERQTLPREEGGRGQADLKDLHDKQIQSMRQYFQLKSPRSPLIQAIIQADANYTPLNLCSTEERVLETANEQKLRTWAGKPLHGRHYNDLQQPHVDKKASNSWLAKGTLQPETEGFMLAIQDQVIATRNNQKFIQRKDIESDKCRHCHAASETIQHVMAGCKILAQSDYKHRHDQVAKIVHQKLAANAGFLTEKCPYYKYEPETVHENETHKLYWDRAIITDKTVPHNRPDITLVDKSNKTTYLIDIAVPNTNNIQTTYTTKITKYQDLRHEVRDIWGMEKILIIPLVISATGIVPKTLATNLEILNIDPNTYIEIQKATILNTCHIVRKFLDMAH

SEQ ID NO: 22109 - protein, 1186 aa, Dysdera silvatica
MNHNENMNGASVVALLNQNRVRTLSRGASSKNMQQSLLGGVGGCSGASNCTATRTNTAQSALQPSIGATTRAERPRQRMSWTIDMNTYIMRTYYTITKLETDMTNYRPTLHAKFAQQYPHLDISIERITTQRRNIITRNLLAEPILQRLRDEVANDLANTSTSVANPEAPASSAREPLQPSIEEEERRDVEKMEEGFQCALAEYEGSDAATRPRIPRQPASWKLCKATKILNEHTLPLHLQNHNSLQEIHTAIYCAAVAASRANGYEVRNEGRSNRGNKAQPPWQVRLEKRIEELRSSIGRITQYMQGNRGKKLVRKVKMALKRNRIHTRHEEPNKHISEYLDTLKQKLGVYARRLRRYKDYTNKKQQNMQFQANQKAFYRKLRETPANKDKYEAPKPAEIETFWKTLWSNEVQHKSAPWIQQEMEATRGIEEMEYTGITIEELQQVIQRTHNWKAPGIDGIHNFWYKKFTSAHGPLAKELTAIIEDPSKMPEFLCKGITYLLPKDQDTSNPAKYRPITCLNTLYKILTGCISEKISRHSESNNLMTEEQKGCQKGTLGCKEQLTIDSVILEQARKQKRKLNTAYIDYKKAFDSVPHSWLLEILSIYKVHPSIIRFLQSSMKQWRTRLQLNTPDSKIETAEIPIRRGIFQGDALSPQWFCLALNPLSRMLNASKYGYMLKKDKRNLHKVSHLMYVDDIKLYAPTITQLRQLISITETFSKDIGMEFGLDKCKIQKNSKEDLPGIELEDGRLLKTLDEGETYKYLGIMQKRQQEHKKVKVQLTQAFQERLRSIVKTKLSGKNTTQAINAYAVPVLTYSFGIIKWSNTELEQLQRKMRTIQRRAGQLHPATVIERKTLPREEGGRGQADLKDLHDKQIQSMRQYFQLKSPRSPLIQAIIQADANYTPLNLCSTEERVLETANEQKLRTWAGKPLHGRHYNDLQQPHVDKKASNSWLAKGTLQPETEGFMLAIQDQVIATRNNQKFIQRKDIESDKCRHCHAASETIQHVMAGCKILAQSDYKHRHDQVAKIVHQKLAANAGFLTEKCPYYKYEPETVHENETHKLYWDRAIITDKTVPHNRPDITLVDKSNKTTYLIDIAVPNTNNIQTTYTTKITKYQDLRHEVRDIWGMEKILIIPLVISATGIVPKTLATNLEILNIDPNTYIEIQKATILNTSHIVRKFLDMAH

SEQ ID NO: 22110 - protein, 1108 aa, Dysdera silvatica
MSWTIDMNTYIMRTYYTITKLETDMTNYRPTLHAKFAQQYPHLDISIERITTQRRNIITRNLLAEPILQRLRDEVANDLANTSTSVANPEAPASSAREPLQPSIEEEERRDVEKMEEGFQCALAEYEGSDAATRPRIPRQPASWKLCKATKILNEHTLPLHLQNHNSLQEIHTAIYCAAVAASRANGYEVRNEGRSNRGNKAQPPWQVRLQKRIEELRSSIGRITQYMQGNRSKKLVRKVKMALKRNRIHTRHEEPNKHISEYLDTLKQKLGVYARRLRRYKDYTNRKQQNMQFQANQKAFYRKLRETPANKDKYEAPKPAEIETFWKTLWSNEVQHKSAPWIQQEMEATRGIEEMEYTGITIEELQQVIQRTHNWKAPGIDGIHNFWYKKFTSAHGPLAKELTAIIEDPSKMPEFLCKGITYLLPKDQDTSNPAKYRPITCLNTLYKILTGCISEKISRHSESNNLMTEEQKGCQKGTLGCKEQLTIDSVILEQARKQKRKLNTAYIDYKKAFDSVPHSWLLEILSIYKVHPSIIRFLQSSMKQWRTRLQLNTPDSKIETAEIPIRRGIFQGDALSPQWFCLALNPLSRMLNTSKYGYMLKKDKRNLHKVSHLMYVDDIKLYAPTITQLRQLISITETFSKDIGMEFGLDKCKIQKNSKEDLPGIELEDGRLLKTLDEGETYKYLGIMQKRQQEHKKVKVQLTQAFQERLRSIVKTKLSGKNTTQAINAYAVPVLTYSFGIIKWSNTELEQLQRKMRTIQRRAGQLHPATAIERQTLPREEGGRGQADLKDLHDKQIQSMRQYFQLKSPRSPLIQAIIQADANYTPLNLCSTEERVLETANEQKLRTWAGKPLHGRHYNDLQQPHVDKKASNSWLAKGTLQPETEGFMLAIQDQVIATRNNQKFIQRKDIESDKCRHCHAASETIQHVMAGCKILAQSDYKHRHDQVAKIVHQKLAANAGFLTEKCPYYKYEPETVHENETHKLYWDRAIITDKTVPHNRPDITLVDKSNKTTYLIDIAVPNTNNIQTTYTTKITKYQDLRHEVRDIWGMEKIFIIPLVISATGIVPKTLATNLEILNIDPNTYIEIQKATILNTCHIVRKFLDMAH

SEQ ID NO: 22111 - protein, 1186 aa, Dysdera silvatica
MNHNENMNGASVVALLNQNRVRVLSRGASSKNMQQSLLGGVGGCSGASNCTATRTNTAQSALQPSIGATTRAERPRQRMSWTIDMNTYIMRTYYTITKLETDMTNYRPTLHAKFAQQYPHLDISIERITTQRRNIITRNLLAEPILQRLRDEVANDLANTSTSVANPEAPASSAREPLQPSIEEEERRDVEKMEEGFQCALAEYEGSDAATRPRIPRQPASWKLCKATKILNEHTLPLHLQNHNSLQEIHTAIYCAAVAASRANGYEVRNEGRSNRGNKAQPPWQVRLEKRIEELRSSIGRITQYMQGNRSKKLVRKVKMALKRNRIHTRHEEPNKHISEYLDTLKQKLGVYARRLRRYKDYTNRKQQNMQFQANQKAFYRKLRETPANKDKYEAPKPAEIETFWKTLWSNEVQHKSAPWIQQEMEATRGIEEMEYTGITIEELQQVIQRTHNWKAPGIDGIHNFWYKKFTSAHGPLAKELTAIIEDPSKMPEFLCKGITYLLPKDQDTSNPAKYRPITCLNTLYKILTGCISEKISRHSESNNLMTEEQKGCQKGTLGCKEQLTIDSVILEQARKQKRKLNTAYIDYKKAFDSVPHSWLLEILSIYKVHPSIIRFLQSSMKQWRTRLQLNTPDSKIETAEIPIRRGIFQGDALSPQWFCLALNPLSRMLNTSKYGYMLKKDKRNLHKVSHLMYVDDIKLYAPTITQLRQLISITETFSKDIGMEFGLDKCKIQKNSKEDLPGIELEDGRLLKTLDEGETYKYLGIMQKRQQEHKKVKVQLTQAFQERLRSIVKTKLSGKNTTQAINAYAVPVLTYSFGIIKWSNTELEQLQRKMRTIQRRAGQLHPATAIERQTLPREEGGRGQADLKDLHDKQIQSMRQYFQLKSPRSPLIQAIIQADANYTPLNLCSTEERVLETANEQKLRTWAGKPLHGRHYNDLQQPHVDKKASNSWLAKGTLQPETEGFMLAIQDQVIATRNNQKFIQRKDIESDKCRHCHAASETIQHVMAGCKILAQSDYKHRHDQVAKIVHQKLAANAGFLTEKCPYYKYEPETVHENETHKLYWDRAIITDKTVPHNRPDITLVDKSNKTTYLIDIAVPNTNNIQTTYTTKITKYQDLRHEVRDIWGMEKILIIPLVISATGIVPKTLATNLEILNIDPNTYIEIQKATILNTCHIVRKFLDMAH

SEQ ID NO: 22112 - protein, 1084 aa, Dysdera silvatica
MTNYRPTLHAKFAQQYPHLDISIERITTQRRNIITRNLLAEPILQRLRDEVANDLANTSTSVANPETPAIGAREPLQTSIEEEERRDVEKMEEGFQCALAEYEGSNAATRPRIPRQPASWKLCKATKILNEHTLPLHLQNHNSLHEIHTAIYCAAIAASRANGYEVRNEGRNNRGNKAQPPWQVRLEKRIKELRSSIGRITQYMQGNRGKKLVRKVKMALKRNRIHTRHEEPNKHISEYLDTLKQKLGVYARRLRRYKDCTNKKQQNMQFQANQKAFYRKLRETPANKDKYEAPKPAEIETFWKTLWSNEVQHKSAPWIQQEMEATRGIEEMEYTGITIEELQQVIQRTHNWKAPGIDGIHNFWYKKFTSAHGPLAKELTAIIEDPSKMPEFLCKGITYLLPKDQDTSNPAKYRPITCLNTLYKILTGCISEKISRHSESNNLMTEEQKGCQKGTLGCKEQLTIDSVILEQARKQKRKLNTAYIDYKKAFDSVPHSWLLEILSIYKVHPSIIRFLQSSMKQWRTRLQLNTPDSKIETAEIPIRRGIFQGDALSPQWFCLALNPLSRMLNTSKYGYMLKKDKRNLHKVSHLMYVDDIKLYAPTITQLRQLISITETFSKDIGMEFGLDKCKIQKNSKEDLPGIELEDGRLLKTLDEGETYKYLGIMQKRQQEHKKVKVQLTQAFQERLRSIVKTKLSGKNTTQAINAYAVPVLTYSFGIIKWSNTELEQLQRKMRTIQRRAGQLHPATAIERQTLPREEGGRGQADLKDLHDKQIQSMRQYFQLKSPRSPLIQAIIQADANYTPLNLCSTEERVLETANEQKLRTWAGKPLHGRHYNDLQQPHVDKKASNSWLAKGTLQPETEGFMLAIQDQVIATRNNQKFIQRKDIESDKCRHCHAASETIQHVMAGCKILAQSDYKHRHDQVAKIVHQKLAANAGFLTEKCPYYKYEPETVHENETHKLYWDRAIITDKTVPHNRPDITLVDKSNKTTYLIDIAVPNTNNIQTTYTTKITKYQDLRHEVRDIWGMEKILIIPLVISATGIVPKTLATNLEILNIDPNTYIEIQKATILNTCHIVRKFLDMAH

SEQ ID NO: 22113 - protein, 1186 aa, Dysdera silvatica
MNHNENMNGASVVALLNQNRVRTLSRGVCSKNMQQSLLGGAGSCSGASNCTATRTNTAQSALQPNTGTTTRAERPRQRMSWTIDMNTYIMRTYYTITKLETDMTNYRPTLHAKFAQQYPHLDISIERITTQRRNIITRNLLAEPILQRLRDEVANDLANTSTSVANPEAPASSAREPLQTSIEQEERRDVEKMEEGFQCALAEYEGSDAATRPRIPRQPASWKLCAATNILNEHTLPLHLQKHNSLQEIHTAIYCAAVAASRANGYEVRNEGRSNRGNKAQPPWQVRLEKRIEELRSSIGRITQYMQGNRSKKLVRKVKMALKRNRIHTRHEEPNKHISEYLDTLKQKLGVYARRLRRYKDYTNRKQQNMQFQANQKAFYRKLRETPANKDKYEAPKPAEIETFWKTLWSNEVQHKSAPWIQQEMEATRGIEEMEYTGITIEELQQVIQRTHNWKAPGIDGIHNFWYKKFTSAHGPLAKELTAIIEDPSKMPEFLCKGITYLLPKDQDTSNPAKYRPITCLNTLYKILTGCISEKISRHSESNNLMAEEQKGCQKGTLGCKEQLTIDSVILEQARKQKRKLNTAYIDYKKAFDSVPHSWLLEILSIYKVHPSIIRFLQSSMKQWRTRLQLNTPDSKIETAEIPIRRGIFQGDALSPQWFCLALNPLSRMLNTSKYGYMLKKDKRNLHKVSHLMYVDDIKLYAPTITQLRQLISITETFSKDIGMEFGLDKCKIQKNSKEDLPGIELEDGRLLKTLDEGETYKYLGIMQKRQQEHKKVKVQLTQAFQERLRSIVKTKLSGKNTTQAINAYAVPVLTYSFGIIKWSNTELEQLQRKMRTIQRRAGQLHPATAIERQTLPREEGGRGQADLKDLHDKQIQSMRQYFQLKSPRSPLIQAIIQADANYTPLNLCSTEERVLETANEQKLRTWAGKPLHGRHYNDLQQPHVDKKASNSWLAKGTLQPETEGFMLAIQDQVIATRNNQKFIQRKDIESDKCRHCHAASETIQHVMAGCKILAQSDYKHRHDQVAKIVHQKLAANAGFLTEKCPYYKYEPETVHENETHKLYWDRAIITDKTVPHNRPDITLVDKSNKTTYLIDIAVPNTNNIQTTYTTKITKYQDLRHEVRDIWGMEKILIIPLVISATGIVPKTLATNLEILNIDPNTYIEIQKATILNTCHIVRKFLDMAH

SEQ ID NO: 22114 - protein, 994 aa, Dysdera silvatica
MEEGFQCALAEYEGSDAATRPRIPRQPASWKLCKATKILNEHTLPLHLQNHNSLQEIHTAIYCAAVAASRANGYEVRNEGRSNRGNKAQPPWQVRLQKRIEELRSSIGRITQYMQGNRGKKLVRKVKMALKRNRIHTRHEEPNKHISEYLDTLKQKLGVYARRLRRYKDYTNKKQQNMQFQANQKAFYRKLRETPANKDKYEAPKPAEIETFWKTLWSNEVQHKSAPWIQQEMEATRGIEEMEYTGITIEELQQVIQRTHNWKAPGIDGIHNFWYKKFTSAHGPLAKELTAIIEDPSKMPEFLCKGITYLLPKDQDTSNPAKYRPITCLNTLYKILTGCISEKISRHSESNNLMTEEQKGCQKGTLGCKEQLTIDSVILEQARKQKRKLNTAYIDYKKAFDSVPHSWLLEILSIYKVHPSIIRFLQSSMKQWRTRLQLNTPDSKIETAEIPIRRGIFQGDALSPQWFCLALNPLSRMLNTSKYGYMLKKDKRNLHKVSHLMYVDDIKLYAPTITQLRQLISITETFSKDIGMEFGLDKCKIQKNSKEDLPGIELEDGRLLKTLDEGETYKYLGIMQKRQQEHKKVKVQLTQAFQERLRSIVKTKLSGKNTTQAINAYAVPVLTYSFGIIKWSNTELEQLQRKMRTIQRRAGQLHPATAIERQTLPREEGGRGQADLKDLHDKQIQSMRQYFQLKSPRSPLIQAIIQADANYTPLNLCSTEERVLETANEQKLRTWAGKPLHGRHYNDLQQPHVDKKASNSWLAKGTLQPETEGFMLAIQDQVIATRNNQKFIQRKDIESDKCRHCHAASETIQHVMAGCKILAQSDYKHRHDQVAKIVHQKLAANAGFLTEKCPYYKYEPETVHENETHKLYWDRAIITDKTVPHNRPDITLVDKSNKTTYLIDIAVPNTNNIQTTYTTKITKYQDLRHEVRDIWGMEKILIIPLVISATGIVPKTLATNLEILNIDPNTYIEIQKATILNTCHIVRKFLDMAH

SEQ ID NO: 22115 - protein, 1090 aa, Dysdera silvatica
MGCREHQMKHIGQWHVQKGSGNPHLDISIERITTQRRNIITRNLLAEPILQRLRDEVANDLANTSTSVANPEAPAIGAREPLQTSIEEEERRDVEKMEEGFQCALAEYEGSDAATRPRIPRQPASWKLCKATKILNEHTLPLHLQNHNSLQEIHTAIYCAAVAASRANGYEVRNEGRSNRGNKAQPPWQVRLQKRIEELRSSIGRITQYMQGNRGKKLVRKVKMALKRNRIHTRHEEPNKHISEYLDTLKQKLGVYARRLRRYKDYTNKKQQNMQFQANQKAFYRKLRETPANKDKYEAPKPAEIETFWKTLWSNEVQHKSAPWIQQEMEATRGIEEMEYTGITIEELQQVIQRTHNWKAPGIDGIHNFWYKKFTSAHGPLAKELTAIIEDPSKMPEFLCKGITYLLPKDQDTSNPAKYRPITCLNTLYKILTGCISEKISRHSESNNLMTEEQKGCQKGTLGCKEQLTIDSVILEQARKQKRKLNTAYIDYKKAFDSVPHSWLLEILSIYKVHPSIIRFLQSSMKQWRTRLQLNTPDSKIETAEIPIRRGIFQGDALSPQWFCLALNPLSRMLNTSKYGYMLKKDKRNLHKVSHLMYVDDIKLYAPTITQLRQLISITETFSKDIGMEFGLDKCKIQKNSKEDLPGIELEDGRLLKTLDEGETYKYLGIMQKRQQEHKKVKVQLTQAFQERLRSIVKTKLSGKNTTQAINAYAVPVLTYSFGIIKWSNTELEQLQRKMRTIQRRAGQLHPATAIERQTLPREEGGRGQADLKDLHDKQIQSMRQYFQLKSPRSPLIQAIIQADANYTPLNLCSTEERVLETANEQKLRTWAGKPLHGRHYNDLQQPHVDKKASNSWLAKGTLQPETEGFMLAIQDQVIATRNNQKFIQRKDIESDKCRHCHAASETIQHVMAGCKILAQSDYKHRHDQVAKIVHQKLAANAGFLTEKCPYYKYEPETVHENETHKLYWDRAIITDKTVPHNRPDITLVDKSNKTTYLIDIAVPNTNNIQTTYTTKITKYQDLRHEVRDIWGMEKIFIIPLVISATGIVPKTLATNLEILNIDPNTYIEIQKATILNTCHIVRKFLDMAH

SEQ ID NO: 22116 - protein, 888 aa, Dysdera silvatica
MKPLHNPPPPNRSKKLVRKVKMALKRNRIHTRHEEPNKHISEYLDTLKQKLGVYARRLRRYKDYTNRKQQNMQFQANQKAFYRKLRETPANKDKYEAPKPAEIETFWKTLWSNEVQHKSAPWIQQEMEATRGIEEMEYTGITIEELQQVIQRTHNWKAPGIDGIHNFWYKKFTSAHGPLAKELTAIIEDPSKMPEFLCKGITYLLPKDQDTSNPAKYRPITCLNTLYKILTGCISEKISRHSESNNLMTEEQKGCQKGTLGCKEQLTIDSVILEQARKQKRKLNTAYIDYKKAFDSVPHSWLLEILSIYKVHPSIIRFLQSSMKQWRTRLQLNTPDSKIETAEIPIRRGIFQGDALSPQWFCLALNPLSRMLNTSKYGYMLKKDKRNLHKVSHLMYVDDIKLYAPTITQLRQLISITETFSKDIGMEFGLDKCKIQKNSKEDLPGIELEDGRLLKTLDEGETYKYLGIMQKRQQEHKKVKVQLTQAFQERLRSIVKTKLSGKNTTQAINAYAVPVLTYSFGIIKWSNTELEQLQRKMRTIQRRAGQLHPATAIERQTLPREEGGRGQADLKDLHDKQIQSMRQYFQLKSPRSPLIQAIIQADANYTPLNLCSTEERVLETANEQKLRTWAGKPLHGRHYNDLQQPHVDKKASNSWLAKGTLQPETEGFMLAIQDQVIATRNNQKFIQRKDIESDKCRHCHAASETIQHVMAGCKILAQSDYKHRHDQVAKIVHQKLAANAGFLTEKCPYYKYEPETVHENETHKLYWDRAIITDKTVPHNRPDITLVDKSNKTTYLIDIAVPNTNNIQTTYTTKITKYQDLRHEVRDIWGMEKILIIPLVISATGIVPKTLATNLEILNIDPNTYIEIQKATILNTCHIVRKFLDMAH

SEQ ID NO: 22117 - protein, 989 aa, Dysdera silvatica
MEDEERGGRGGFPMCSGAIPRQPASWKLCKATKILNEHTLPLHLQNHNSLQEIHTAIYCAAVAASRANGYEVRNEGRNNRGNKAQPPWQVRLQKRIEELRSSIGRITQYMQGNRGKKLVRKVKMALKRNRIHTRHEEPNKHISEYLDTLKQKLGVYARRLRRYKDYTNKKQQNMQFQANQKAFYRKLRETPANKDKYEAPKPAEIETFWKTLWSNEVQHKSAPWIQQEMEATRGIEEMEYTGITIEELQQVIQRTHNWKAPGIDGIHNFWYKKFTSAHGPLAKELTAIIEDPSKMPEFLCKGITYLLPKDQDTSNPAKYRPITCLNTLYKILTGCISEKISRHSESNLMTEEQKGCQKRTLGCKEQLTIDSVILEQARKQKRKLNTAYIDYKKAFDSVPHSWLLEILSIYKVHPSIIRFLQSSMKQWRTRLQLNTPDSKIETAEIPIRRGIFQGDALSPQWFCLALNPLSRMLNTSKYGYMLKKDKRNLHKVSHLMYVDDIKLYAPTITQLRQLISITETFSKDIGMEFGLDKCKIQKNSKEDLPGIELEDGRLLKTLDEGETYKYLGIMQKRQQEHKKVKVQLTQAFQERLRSIVKTKLSGKNTTQAINAYAVPVLTYSFGIIKWSNTELEQLQRKMRTIQRRAGQLHPATAIERQTLPREEGGRGQADLKDLHDKQIQSMRQYFQLKSPRSPLIQAIIQADANYTPLNLCSTEERVLETANEQKLRTWAGKPLHGRHYNDLQQPHVDKKASNSWLAKGTLQPETEGFMLAIQDQVIATRNNQKFIQRKDIESDKCRHCHAASETIQHVMAGCKILAQSDYKHRHDQVAKIVHQKLAANAGFLTEKCPYYKYEPETVHENETHKLYWDRAIITDKTVPHNRPDITLVDKSNKTTYLIDIAVPNTNNIQTTYTTKITKYQDLRHEVRDIWGMEKILIIPLVISATGIVPKTLATNLEILNIDPNTYIEIQKATILNTCHIVRKFLDMAH

SEQ ID NO: 22118 - protein, 1186 aa, Dysdera silvatica
MNHNENMNGASVVSLLNQNRVRTLSRGASSKNMQQSLLGGVGGCSGASNCTATRTNTAQSALQPSIGATTRAERPRQRMSWTIDMNTYIMRTYYTITKLETDMTNYRPTLHAKFAQQYPHLDISIERITTQRRNIITRNLLAEPILQRLRDEVANDLANTSTSVANPEAPVSSPREPLQPSIEEEERRDVEKMEEGFQCALAEYEGSDAATRPRIPRQPASWKLCKATKILNEHTLPLHLQKHNSLQEIHTAIYCAAVAASRANGYEVRNEGRSNRGNKAQPPWQVRLEKRIEELRSSIGRITQYMQGNRGKKLVRKVKMALKRNRIHTRHEEPNKHISEYLDTLKQKLGVYARRLRRYKDYTNKKQQNMQFQANQKAFYRKLRETSANKDKYEAPKPAEIETFWKTLWSNEVQHKSAPWIQQEMEATRGIEEMEYTGITIEELQQVIQRTHNWKAPGIDGIHNFWYKKFTSAHGPLAKELTAIIEDPSKMPEFLCKGITYLLPKDQDTSNPAKYRPITCLNTLYKILTGCISEKISRHSESNNLMTEEQKGCQKGTLGCKEQLTIDSVILEQARKQKRKLNTAYIDYKKAFDSVPHSWLLEILSIYKVHPSIIRFLQSSMKQWRTRLQLNTPDSKIETAEIPIRRGIFQGDALSPQWFCLALNPLSRMLNTSKYGYMLKKDKRNLHKVSHLMYVDDIKLYAPTITQLRQLISITETFSKDIGMEFGLDKCKIQKNSKEDLPGIELEDGRLLKTLDEGETYKYLGIMQKRQQEHKKVKVQLTQAFQERLRSIVKTKLSGKNTTQAINAYAVPVLTYSFGIIKWSNTELEQLQRKMRTIQRRAGQLHPATAIERQTLPREEGGRGQADLKDLHDKQIQSMRQYFQLKSPRSPLIQAIIQADANYTPLNLCSTEERVLETANEQKLRTWAGKPLHGRHYNDLQQPHVDKKASNSWLAKGTLQPETEGFMLAIQDQVIATRNNQKFIQRKDIESDKCRHCHAASETIQHVMAGCKILAQSDYKHRHDQVAKIVHQKLAANAGFLTEKCPYYKYEPETVHENETHKLYWDRAIITDKTVPHNRPDITLVDKSNKTTYLIDIAVPNTNNIQTTYTTKITKYQDLRHEVRDIWGMEKILIIPLVISATGIVPKTLATNLEILNIDPNTYIEIQKATILNTCHIVRKFLDMAH

SEQ ID NO: 22119 - protein, 1108 aa, Dysdera silvatica
MSWTIDMNTYIMRTYYTITKLETDMTNYRPTLHAKFAQQYPHLDISIERITTQRRNIITRNLLAEPILQRLRDEVANDLANTSTSVANPEAPASSAREPLQPSIEEEERRDVEKMEEGFQCALAEYEGSDAATRPRIPRQPASWKLCKATKILNEHTLPLHLQNHNSLQEIHTAIYCAAVAASRANGYEVRNEGRSNRGNKAQPPWQVRLEKRIEELRSSIGRITQYMQGNRSKKLVRKVKMALKRNRIHTRHEEPNKHISEYLDTLKQKLGVYARRLRRYKDYTNKKQQNMQFQANQKAFYRKLRETPANKDKYEAPKPAEIETFWKTLWSNEVQHKSAPWIQQEMEATRGIEEMEYTGITIEELQQVIQRTHNWKAPGIDGIHNFWYKKFTSAHGPLAKELTAIIEDPSKMPEFLCKGITYLLPKDQDTSNPAKYRPITCLNTLYKILTGCISEKISRHSESNNLMTEEQKGCQKGTLGCKEQLTIDSVILEQARKQKRKLNTAYIDYKKAFDSVPHSWLLEILSIYKVHPSIIRFLQSSMKQWRTRLQLNTPDSKIETAEIPIRRGIFQGDALSPQWFCLALNPLSRMLNTSKYGYMLKKDKRNLHKVSHLMYVDDIKLYAPTITQLRQLISITETFSKDIGMEFGLDKCKIQKNSKEDLPGIELEDGRLLKTLDEGETYKYLGIMQKRQQEHKKVKVQLTQAFQERLRSIVKTKLSGKNTTQAINAYAVPVLTYSFGIIKWSNTELEQLQRKMRTIQRRAGQLHPATAIERQTLPREEGGRGQADLKDLHDKQIQSMRQYFQLKSPRSPLIQAIIQADANYTPLNLCSTEERVLETANEQKLRTWAGKPLHGRHYNDLQQPHVDKKASNSWLAKGTLQPETEGFMLAIQDQVIATRNNQKFIQRKDIESDKCRHCHAASETIQHVMAGCKILAQSDYKHRHDQVAKIVHQKLAANAGFLTEKCPYYKYEPETVHENETHKLYWDRAIITDKTVPHNRPDITLVDKSNKTTYLIDIAVPNTNNIQTTYTTKITKYQDLRHEVRDIWGMEKILIIPLVISATGIVPKTLATNLEILNIDPNTYIEIQKATILNTCHIVRKFLDMAH

SEQ ID NO: 22120 - protein, 881 aa, Dysdera silvatica
MQGNRSKKLVRKVKMALKRNRIHTRHEEPNKHISEYLDTLKQKLGVYARRLRRYKDYTNRKQQNMQFQANQKAFYRKLRETPANKDKYEAPKPAEIETFWKTLWSNEVQHKSAPWIQQEMEATRGIEEMEYTGITIEELQQVIQRTHNWKAPGIDGIHNFWYKKFTSAHGPLAKELTAIIEDPSKMPEFLCKGITYLLPKDQDTSNPAKYRPITCLNTLYKILTGCISEKISRHSESNNLMTEEQKGCQKGTLGCKEQLTIDSVILEQARKQKRKLNTAYIDYKKAFDSVPHSWLLEILSIYKVHPSIIRFLQSSMKQWRTRLQLNTPDSKIETAEIPIRRGIFQGDALSPQWFCLALNPLSRMLNTSKYGYMLKKDKRNLHKVSHLMYVDDIKLYAPTITQLRQLISITETFSKDIGMEFGLDKCKIQKNSKEDLPGIELEDGRLLKTLDEGETYKYLGIMQKRQQEHKKVKVQLTQAFQERLRSIVKTKLSGKNTTQAINAYAVPVLTYSFGIIKWSNTELEQLQRKMRTIQRRAGQLHPATAIERQTLPREEGGRGQADLKDLHDKQIQSMRQYFQLKSPRSPLIQAIIQADANYTPLNLCSTEERVLETANEQKLRTWAGKPLHGRHYNDLQQPHVDKKASNSWLAKGTLQPETEGFMLAIQDQVIATRNNQKFIQRKDIESDKCRHCHAASETIQHVMAGCKILAQSDYKHRHDQVAKIVHQKLAANAGFLTEKCPYYKYEPETVHENETHKLYWDRAIITDKTVPHNRPDITLVDKSNKTTYLIDIAVPNTNNIQTTYTTKITKYQDLRHEVRDIWGMEKILIIPLVISATGIVPKTLATNLEILNIDPNTYIEIQKATILNTCHIVRKFLDMAH

SEQ ID NO: 22121 - protein, 1052 aa, Dysdera silvatica
MQGNRGKKLVRKVKMALKRNRIHTRHEEPNKHISEYLDTLKQKLGVKAPTSIRKRPQLSVEEEERRDVEKMEEGFQCALAEYEGSDAATRPRIPRQPASWKLCKATKILNEHTLPLHLQNHNSLQEIHTAIYCAAVAASRANGYEVRNEGRSNRGNKAQPPWQVRLQKRIEELRSSIGRITQYMQGNRSKKLVRKVKMALKRNRIHTRHEEPNKHISEYLDTLKQKLGVYARRLRRYKDYTNKKQQNMQFQANQKAFYRKLRETPANKDKYEAPKPAEIETFWKTLWSNEVQHKSAPWIQQEMEATRGIEEMEYTGITIEELQQVIQRTHNWKAPGIDGIHNFWYKKFTSAHGPLAKELTAIIEDPSKMPEFLCKGITYLLPKDQDTSNPAKYRPITCLNTLYKILTGCISEKISRHSESNNLMTEEQKGCQKGTLGCKEQLTIDSVILEQARKQKRKLNTAYIDYKKAFDSVPHSWLLEILSIYKVHPSIIRFLQSSMKQWRTRLQLNTPDSKIETAEIPIRRGIFQGDALSPQWFCLALNPLSRMLNTSKYGYMLKKDKRNLHKVSHLMYVDDIKLYAPTITQLRQLISITETFSKDIGMEFGLDKCKIQKNSKEDLPGIELEDGRLLKTLDEGETYKYLGIMQKRQQEHKKVKVQLTQAFQERLRSIVKTKLSGKNTTQAINAYAVPVLTYSFGIIKWSNTELEQLQRKMRTIQRRAGQLHPATAIERQTLPREEGGRGQADLKDLHDKQIQSMRQYFQLKSPRSPLIQAIIQADANYTPLNLCSTEERVLETANEQKLRTWAGKPLHGRHYNDLQQPHVDKKASNSWLAKGTLQPETEGFMLAIQDQVIATRNNQKFIQRKDIESDKCRHCHAASETIQHVMAGCKILAQSDYKHRHDQVAKIVHQKLAANAGFLTEKCPYYKYEPETVHENETHKLYWDRAIITDKTVPHNRPDITLVDKSNKTTYLIDIAVPNTNNIQTTYTTKITKYQDLRHEVRDIWGMEKILIIPLVISATGIVPKTLATNLEILNIDLNTCHIVRKFLDMAH

SEQ ID NO: 22122 - protein, 1085 aa, Dysdera silvatica
MYIYIRPTLHAKFAQQYPHLDISIERITTQRRNIITRNLLAEPILQRLRDEVANDLANTSTSVANPEAPAIGAREPLQPSIEEEERRDVEKMEEGFQCALAEYEGSDAATRPRIPRQPASWKLCKATKILNEHTLPLHLQNHNSLQEIHTAIYCAAVAASRANGYEVRNEGRSNRGNKAQPPWQVRLQKRIEELRSSIGRITQYMQGNRGKKLVRKVKMALKRNRIHTRHEEPNKHISEYLDTLKQKLGVYARRLRRYKDYTNKKQQNMQFQANQKAFYRKLRETPANKDKYEAPKPAEIETFWKTLWSNEVQHKSAPWIQQEMEATRGIEEMEYTGITIEELQQVIQRTHNWKAPGIDGIHNFWYKKFTSAHGPLAKELTAIIEDPSKMPEFLCKGITYLLPKDQDTSNPAKYRPITCLNTLYKILTGCISEKISRHSESNNLMTEEQKGCQKGTLGCKEQLTIDSVILEQARKQKRKLNTAYIDYKKAFDSVPHSWLLEILSIYKVHPSIIRFLQSSMKQWRTRLQLNTPDSKIETAEIPIRRGIFQGDALSPQWFCLALNPLSRMLNTSKYGYMLKKDKRNLHKVSHLMYVDDIKLYAPTITQLRQLISITETFSKDIGMEFGLDKCKIQKNSKEDLPGIELEDGRLLKTLDEGETYKYLGIMQKRQQEHKKVKVQLTQAFQERLRSIVKTKLSGKNTTQAINAYAVPVLTYSFGIIKWSNTELEQLQRKMRTIQRRAGQLHPATAIERQTLPREEGGRGQADLKDLHDKQIQSMRQYFQLKSPRSPLIQAIIQADANYTPLNLCSTEERVLETANEQKLRTWAGKPLHGRHYNDLQQPHVDKKASNSWLAKGTLQPETEGFMLAIQDQVIATRNNQKFIQRKDIESDKCRHCHAASETIQHVMAGCKILAQSDYKHRHDQVAKIVHQKLAANAGFLTEKCPYYKYEPETVHENETHKLYWDRAIITDKTVPHNRPDITLVDKSNKTTYLIDIAVPNTNNIQTTYTTKITKYQDLRHEVRDIWGMEKIFIIPLVISATGIVPKTLATNLEILNIDPNTYIEIQKATILNTCHIVRKFLDMAH

SEQ ID NO: 22123 - protein, 1092 aa, Dysdera silvatica
MNHNENMNGASVVVLLNQNRVRTLSRGASSKNMQQSLLGGVGGCSGASNCTATRTNTAQSALQPSIGATTRAERPRQRMSWTIDMNTYIMRTYYTITKLETDMTNYRPTLHAKFAQQYPHLDISIERITTQRRNIITRNLLAEPILQRLRDEVANDLANTSTSVANPEAPASSAREPLQPSIEEEERRDVEKMEEGFQCALAEYEGSDAATRPRIPRQPASWKLCKATKILNEHTLPLHLQNHNSLQEIHTAIYCAAVAASRANGYEVRNESRSNRGNKAQPPWQVRLQKRIEELRSSIGRITQYMQGNRGKKLVRKVKMALKRNRIHTRHEEPNKHISEYLDTLTIEELQQVIQRTHNWKAPGIDGIHNFWYKKFTSAHGPLAKELTAIIEDPSKMPEFLCKGITYLLPKDQDTSNPAKYRPITCLNTLYKILTGCISEKISRHSESNNLMTEEQKGCQKGTLGCKEQLTIDSVILEQARKQKRKLNTAYIDYKKAFDSVPHSWLLEILSIYKVHPSIIRFLQSSMKQWRTRLQLNTPDSKIETAEIPIRRGIFQGDALSPQWFCLALNPLSRMLNTSKYGYMLKKDKRNLHKVSHLMYVDDIKLYAPTITQLRQLISITETFSKDIGMEFGLDKCKIQKNSKEDLPGIELEDGRLLKTLDEGETYKYLGIMQKRQQEHKKVKVQLTQAFQERLRSIVKTKLSGKNTTQAINAYAVPVLTYSFGIIKWTNTELEQLQRKMRTIQRRAGQLHPATAIERQTLPREEGGRGQADLKDLHDKQIQSMRQYFQLKSPRSPLIQAIIQADANYTPLNLCSTEERVLETANEQKLRTWAGKPLHGRHYNDLQQPHVDKTASNSWLAKGTLQPETEGFMLAIQDQVIATRNNQKFIQKKDIESDKCRHCHAASETIQHVMAGCKILAQSDYKHRHDQVAKIVHQKLAANAGFLTEKCPYYKYEPETVLENETHKLYWDRAIITDKTVPHNRPDITLVDKSNKTTYLIDIAVPNTNNIQTTYTTKITKYQDLRHEVRDIWGMEKIFIIPLVISATGIVPKTLATNLGILNIDPNTYIEIQKATILNTCHIVRKFLDMAH

SEQ ID NO: 22124 - protein, 1084 aa, Dysdera silvatica
MTNYRPTLHAKFAQQYPHLDISIERITTQRRNIITRNLLAEPILQRLRDEVANDLANTSTSVANPEAPASSAREPLQPSIEEEERRDVEKMEEGFQCALAEYEGSDAATRPRIPRQPASWKLCKATKILNEHTLPLHLQNHNSLQEIHTAIYCAAVAASRANGYEVRNEGRSNRGNKAQPPWQVRLQKRIEELRSSIGRITQYMQGNRGKKLVRKVKMALKRNRIHTRHEEPNKHISEYLDTLKQKLGVYARRLRRYKDYTNKKQQNMQFQANQKAFYRKLRETPANKDKYEAPKPAEIETFWKTLWSNEVQHKSAPWIQQEMEATRGIEEMEYTGITIEELQQVIQRTHNWKAPGIDGIHNFWYKKFTSAHGPLAKELTAIIEDPSKMPEFLCKGITYLLPKDQDTSNPAKYRPITCLNTLYKILTGCISEKISRHSESNNLMTEEQKGCQKGTLGCKEQLTIDSVILEQARKQKRKLNTAYIDYKKAFDSVPHSWLLEILSIYKVHPSIIRFLQSSMKQWRTRLQLNTPDSKIETAEIPIRRGIFQGDALSPQWFCLALNPLSRMLNTSKYGYMLKKDKRNLHKVSHLMYVDDIKLYAPTITQLRQLISITETFSKDIGMEFGLDKCKIQKNSKEDLPGIELEDGRLLKTLDEGETYKYLGIMQKRQQEHKKVKVQLTQAFQERLRSIVKTKLSGKNTTQAINAYAVPVLTYSFGIIKWSNTELEQLQRKMRTIQRRAGQLHPATAIERQTLPREEGGRGQADLKDLHDKQIQSMRQYFQLKSPRSPLIQAIIQADANYTPLNLCSTEERVLETANEQKLRTWAGKPLHGRHYNDLQQPHVDKKASNSWLAKGTLQPETEGFMLAIQDQVIATRNNQKFIQRKDIESDKCRHCHAASETIQHVMAGCKILAQSDYKHRHDQVAKIVHQKLAANAGFLTEKCPYYKYEPETVHENETHKLYWDRAIITDKTVPHNRPDITLVDKSNKTTYLIDIAVPNTNNIQTTYTTKITKYQDLRHEVRDIWGMEKILIIPLVISATGIVPKTLATNLEILNIDPNTYIEIQKATILNTCHIVRKFLDMAH

SEQ ID NO: 22125 - protein, 994 aa, Dysdera silvatica
MEEGFQCALAEYEGSDAATRPRIPRQPASWKLCKATKILNEHILPLHLQNHNSLQEIHTAIYCAAIAASRANGYEVRNEGRSNRGNKAQPPWQVRLEKRIEELRRSIGRITQYMQGNRGKKLVRKVKMALKRNRMHTRHEEPNKHISEYLDTLKQKLGVYARRLRRYKDCTNKKQQNMQFQANQKAFYRKLQETPANKDKYEAPKPAVIETFWKTLWSNEVQHKSAPWIQQEMEATRGIEEMEYTGITIEELQQVIQRTHNWKAPGIDGIHNFWYKKFTSAHGPLAKELTAIIEDPSEMPEFLCKGITYLLPKDQDKSNPAKYRPITCLNTLYKILTGCISEKISRHSESNNLMTEEQKGCQKGTLGCKEQLTIDSVILEQARKQKRKLNTAYIDYKKAFDSVPHSWLLEILSIYKVHPSIIRFLQSSMKQWRTRLQLNTPDSKIKTAEIPIRRGIFQGDALSPQWFCLALNPLSRMLNTSKYGYMLKKDKRNLHKVSHLMYVDDIKLYAPTITQLRQLISITETFSKDIGMEFGLDKCKIQKNSKEDLPGIELEDGRLLKTLDEGETYKYLGIMQKRQQEHKKVKVQLTQAFQERLRSIVKTKLSGKNTTQAINAYAVPVLTYSFGIIKWSNTELEQLQRKMRTIQRRAGQLHPATAIERQTLPREEGGRGQADLKDLHDKQIQSMRQYFQLKSPRSPLIQAIIQADANYTPLNLCSTEERVLETANEQKLRTWAGKPLHGRHYNDLQQPHVDKKASNSWLAKGTLQPETEGFMLAIQDQVIATRNNQKFIQRKDIESDKCRHCHAASETIQHVMAGCKILAQSDYKHRHDQVAKIVHQKLAANAGFLTEKCPYYKYEPETVHENETHKLYWDRAIITDKTVPHNRPDITLVDKSNKTTYLIDIAVPNTNNIQTTYTTKITKYQDLRHEVRDIWGMEKILIIPLVISATGIVPKTLATNLEILNIDPNTYIEIQKATILNTCHIVRKFLDMAH

SEQ ID NO: 22126 - protein, 1186 aa, Dysdera silvatica
MNHNENMNGASVVSLLNQNRVRTLSRGASSKNMQQSLLGGVGGCSGASNCTATRTNTAQSALQPSIGATTRAERPRQRMSWTIDMNTYIMRTYYTITKLETDMTNYRPTLHAKFAQQYPHLDISIERITTQRRNIITRNLLAEPILQRLRDEVANDLANTSTSVANPEAPASSAREPLQPSIEEEERRDVEKMEEGFQCALAEYEGSDAATRPRIPRQPASWKLCKATKILNEHTLPLHLQNHNSLQEIHTAIYCAAVAASRANGYEVRNEGRSNRGNKAQPPWQVRLEKRIEELRSSIGRITQYMQGNRGKKLVRKVKMALKRNRIHTRHEEPNKHISEYLDTLKQKLGVYARRLRRYKDYTNKKQQNMQFQANQKAFYRKLRETPANKDKYEAPKPAEIETFWKTLWSNEVQHKSAPWIQQEMEATRGIEEMEYTGITIEELQQVIQRTHNWKAPGIDGIHNFWYKKFTSAHGPLAKELTAIIEDPSKMPEFLCKGITYLLPKDQDTSNPAKYRPITCLNTLYKILTGCISEKISRHSESNNLMTEEQKGCQKGTLGCKEQLTIDSVILEQARKQKRKLNTAYIDYKKAFDSVPHSWLLEILSIYKVHPSIIRFLQSSMKQWRTRLQLNTPDSKIETAEIPIRRGIFQGDALSPQWFCLALNPLSRMLNTSKYGYMLKKDKRNLHKVSHLMYVDDIKLYAPTITQLRQLISITETFSKDIGMEFGLDKCKIQKNSKEDLPGIELEDGRLLKTLDEGETYKYLGIMQKRQQEHKKVKVQLTQAFQERLRSIVKTKLSGKNTTQAINAYAVPVLTYSFGIIKWSNTELEQLQRKMRTIQRRAGQLHPATAIERQTLPREEGGRGQADLKDLHDKQIQSMRQYFQLKSPRSPLIQAIIQADANYTPLNLCSTEERVLETANEQKLRTWAGKPLHGRHYNDLQQPHVDKKASNSWLAKGTLQPETEGFMLAIQDQVIATRNNQKFIQRKDIESDKCRHCHAASETIQHVMAGCKILAQSDYKHRHDQVAKIVHQKLAANAGFLTEKCPYYKYEPETVHENETHKLYWDRAIITDKTVPHNRPDITLVDKSNKTTYLIDIAVPNTNNIQTTYTTKITKYQDLRHEVRDIWGMEKIFIIPLVISATGIVPKTLATNLEILNIDPNTYIEIQKATILNTCHIVRKFLDMAH

SEQ ID NO: 22127 - protein, 1107 aa, Dysdera silvatica
MPGKSSLLFFCILHLSRPNSIPMSLENVSDILMSCRSWVIVGAYSLMLLRPSFLTSYPLARDAATAAQYMAVCISCRELWFCRCSGRVCSLRILVALQSFQDAGWRGILGLVAASEPSYSARAHWKPSSIFSTSLLSSSSMLGWSGSLAPIAGASGLATLVEVFARSLATSSLNIYIERENAAIYCAAAASHVGLTPMKTIQPPWQVRLEKRIEELRSSIGRITQYMQGNRSKKLVRKVKMALKRNRIHTRHEEPNKHISEYLDTLKQKLGVYARRLRRYKDYTNRKQQNMQFQANQKAFYRKLRETPANKDKYEAPKPAEIETFWKTLWSNEVQHKSAPWIQQEMEATRGIEEMEYTGITIEELQQVIQRTHNWKAPGIDGIHNFWYKKFTSAHGPLAKELTAIIEDPSKMPEFLCKGITYLLPKDQDTSNPAKYRPITCLNTLYKILTGCISEKISRHSESNNLMTEEQKGCQKGTLGCKEQLTIDSVILEQARKQKRKLNTAYIDYKKAFDSVPHSWLLEILSIYKVHPSIIRFLQSSMKQWRTRLQLNTPDSKIETAEIPIRRGIFQGDALSPQWFCLALNPLSRMLNTSKYGYMLKKDKRNLHKVSHLMYVDDIKLYAPTITQLRQLISITETFSKDIGMEFGLDKCKIQKNSKEDLPGIELEDGRLLKTLDEGETYKYLGIMQKRQQEHKKVKVQLTQAFQERLRSIVKTKLSGKNTTQAINAYAVPVLTYSFGIIKWSNTELEQLQRKMRTIQRRAGQLHPATAIERQTLPREEGGRGQADLKDLHDKQIQSMRQYFQLKSPRSPLIQAIIQADANYTPLNLCSTEERVLETANEQKLRTWAGKPLHGRHYNDLQQPHVDKKASNSWLAKGTLQPETEGFMLAIQDQVIATRNNQKFIQRKDIESDKCRHCHAASETIQHVMAGCKILAQSDYKHRHDQVAKIVHQKLAANAGFLTEKCPYYKYEPETVHENETHKLYWDRAIITDKTVPHNRPDITLVDKSNKTTYLIDIAVPNTNNIQTTYTTKITKYQDLRHEVRDIWGMEKILIIPLVISATGIVPKTLATNLEILNIDPNTYIEIQKATILNTCHIVRKFLDMAH

SEQ ID NO: 22128 - protein, 1108 aa, Dysdera silvatica
MSWTIDMNTYIMRTYYTITKLETDMTNYRPTLHAKFAQQYPHLDISIERITTQRRNIITRNLLAEPILQRLRDEVANDLANTSTSVANPEAPASSAREPLQPSIEEEERRDVEKMEEGFQCALAEYEGSDAATRPRIPRQPASWKLCKATKILNEHTLPLHLQNHNSLQEIHTAIYCAAVAASRANGYEVRNEGRSNRGNKAQPPWQVRLQKRIEELRSSIGRITQYMQGNRGKKLVRKVKMALKRNRIHTRHEEPNKHISEYLDTLKQKLGVYARRLRRYKDYTNKKQQNMQFQANQKAFYRKLRETPANKDKYEAPKPAEIETFWKTLWSNEVQHKSAPWIQQEMEATRGIEEMEYTGITIEELQQVIQRTHNWKAPGIDGIHNFWYKKFTSAHGPLAKELTAIIEDPSKMPEFLCKGITYLLPKDQDTSNPAKYRPITCLNTLYKILTGCISEKISRHSESNNLMTEEQKGCQKGTLGCKEQLTIDSVILEQARKQKRKLNTAYIDYKKAFDSVPHSWLLEILSIYKVHPSIIRFLQSSMKQWRTRLQLNTPDSKIETAEIPIRRGIFQGDALSPQWFCLALNPLSRMLNTSKYGYMLKKDKRNLHKVSHLMYVDDIKLYAPTITQLRQLISITETFSKDIGMEFGLDKCKIQKNSKEDLPGIELEDGRLLKTLDEGETYKYLGIMQKRQQEHKKVKVQLTQAFQERLRSIVKTKLSGKNTTQAINAYAVPVLTYSFGIIKWSNTELEQLQRKMRTIQRRAGQLHPATAIERQTLPREEGGRGQADLKDLHDKQIQSMRQYFQLKSPRSPLIQAIIQADANYTPLNLCSTEERVLETANEQKLRTWAGKPLHGRHYNDLQQPHVDKKASNSWLAKGTLQPETEGFMLAIQDQVIATRNNQKFIQRKDIESDKCRHCHAASETIQHVMAGCKILAQSDYKHRHDQVAKIVHQKLAANAGFLTEKCPYYKYEPETVHENETHKLYWDRAIITDKTVPHNRPDITLVDKSNKTTYLIDIAVPNTNNIQTTYTTKITKYQDLRHEVRDIWGMEKILIIPLVISATGIVPKTLATNLEILNIDPNTYIEIQKATILNTCHIVRKFLDMAH

SEQ ID NO: 22129 - protein, 1108 aa, Dysdera silvatica
MSWTIDMNTYIMRTYYTITKLETDMTNYRPTLHAKFAQQYPHLDISIERITTQRRNIITRNLLAEPILQRLRDEVANDLANTSTSVANPEAPASSAREPLQPSIEEEERRDVEKMEEGFQCALAEYEGSDAATRPRIPRQPASWKLCKATKILNEHTLPLHLQNHNSLQEIHTAIYCAAVAASRANGYEVRNEGRSNRGNKAQPPWQVRLEKRIEELRSSIGRITQYMQGNRSKKLVRKVKMALKRNRIHTRHEEPNKHISEYLDTLKQKLGVYARRLRRYKDYTNRKQQNMQFQANQKAFYRKLRETPANKDKYEAPKPAEIETFWKTLWSNEVQHKSAPWIQQEMEATRGIEEMEYTGITIEELQQVIQRTHNWKAPGIDGIHNFWYKKFTSAHGPLAKELTAIIEDPSKMPEFLCKGITYLLPKDQDTSNPAKYRPITCLNTLYKILTGCISEKISRHSESNNLMTEEQKGCQKGTLGCKEQLTIDSVILEQARKQKRKLNTAYIDYKKAFDSVPHSWLLEILSIYKVHPSIIRFLQSSMKQWRTRLQLNTPDSKIETAEIPIRRGIFQGDALSPQWFCLALNPLSRMLNTSKYGYMLKKDKRNLHKVSHLMYVDDIKLYAPTITQLRQLISITETFSKDIGMEFGLDKCKIQKNSKEDLPGIELEDGRLLKTLDEGETYKYLGIMQKRQQEHKKVKVQLTQAFQERLRSIVKTKLSGKNTTQAINAYAVPVLTYSFGIIKWSNTELEQLQRKMRTIQRRAGQLHPATAIERQTLPREEGGRGQADLKDLHDKQIQSMRQYFQLKSPRSPLIQAIIQADANYTPLNLCSTEERVLETANEQKLRTWAGKPLHGRHYNDLQQPHVDKKASNSWLAKGTLQPETEGFMLAIQDQVIATRNNQKFIQRKDIESDKCRHCHAASETIQHVMAGCKILAQSDYKHRHDQVAKIVHQKLAANAGFLTEKCPYYKYEPETVHENETHKLYWDRAIITDKTVPHNRPDITLVDKSNKTTYLIDIAVPNTNNIQTTYTTKITKYQDLRHEVRDIWGMEKILIIPLVISATGIVPKTLATNLEILNIDPNTYIEIQKATILNTCHIVRKFLDMAH

SEQ ID NO: 22130 - protein, 895 aa, Dysdera silvatica
MLLPINGNIYIYIRGQGNRSKKLVRKVKMALKRNRIHTRHEEPNKHISEYLDTLKQKLGVYARRLRRYKDYTNKKQQNMQFQANQKAFYRKLRETPANKDKYEAPKPAEIETFWKTLWSNEVQHKSAPWIQQEMEATRGIEEMEYTGITIEELQQVIQRTHNWKAPGIDGIHNFWYKKFTSAHGPLAKELTAIIEDPSKMPEFLCKGITYLLPKDQDTSNPAKYRPITCLNTLYKILTGCISEKISRHSESNNLMTEEQKGCQKGTLGCKEQLTIDSVILEQARKQKRKLNTAYIDYKKAFDSVPHSWLLEILSIYKVHPSIIRFLQSSMKQWRTRLQLNTPDSKIETAEIPIRRGIFQGDALSPQWFCLALNPLSRMLNTSKYGYMLKKDKRNLHKVSHLMYVDDIKLYAPTITQLRQLISITETFSKDIGMEFGLDKCKIQKNSKEDLPGIELEDGRLLKTLDEGETYKYLGIMQKRQQEHKKVKVQLTQAFQERLRSIVKTKLSGKNTTQAINAYAVPVLTYSFGIIKWSNTELEQLQRKMRTIQRRAGQLHPATAIERQTLPREEGGRGQADLKDLHDKQIQSMRQYFQLKSPRSPLIQAIIQADANYTPLNLCSTEERVLETANEQKLRTWAGKPLHGRHYNDLQQPHVDKKASNSWLAKGTLQPETEGFMLAIQDQVIATRNNQKFIQRKDIESDKCRHCHAASETIQHVMAGCKILAQSDYKHRHDQVAKIVHQKLAANAGFLTEKCPYYKYEPETVHENETHKLYWDRAIITDKTVPHNRPDITLVDKSNKTTYLIDIAVPNTNNIQTTYTTKITKYQDLRHEVRDIWGMEKILIIPLVISATGIVPKTLATNLEILNIDPNTYIEIQKATILNTCHIVRKFLDMAH

SEQ ID NO: 22131 - protein, 945 aa, Dysdera silvatica
MNHNENMNGASVVSLLNQNRVRTLSRGASSKNMQQSLLGGVGGCSGASNCTATRTNTAQSALQPSIGATTRAERPRQRMSWTIDMNTYIMRTYYTITKLETDMTNYRPTLHAKFAQQYPHLDISIERITTQRRNIITRNLLAEPILQRLRDEVANDLANTSTSVANPEAPASSAREPLQPSIEEEERRDVEKMEEGFQCALAEYEGSDAATRPRIPRQPASWKLCKATKILNEHTLPLHLQNHNSLQEIHTAIYCAAVAASRANGYEVRNEGRSNRGNKAQPPWQVRLEKRIEELRSSIGRITQYMQGNRSKKLVRKVKMALKRNRIHTRHEEPNKHISEYLDTLKQKLAFDSVPHSWLLEILSIYKVHPSIIRFLQSSMKQWRTRLQLNTPDSKIETAEIPIRRGIFQGDALSPQWFCLALNPLSRMLNTSKYGYMLKKDKRNLHKVSHLMYVDDIKLYAPTITQLRQLISITETFSKDIGMEFGLDKCKIQKNSKEDLPGIELEDGRLLKTLDEGETYKYLGIMQKRQQEHKKVKVQLTQAFQERLRSIVKTKLSGKNTTQAINAYAVPVLTYSFGIIKWSNTELEQLQRKMRTIQRRAGQLHPATAIERQTLPREEGGRGQADLKDLHDKQIQSMRQYFQLKSPRSPLIQAIIQADANYTPLNLCSTEERVLETANEQKLRTWAGKPLHGRHYNDLQQPHVDKKASNSWLAKGTLQPETEGFMLAIQDQVIATRNNQKFIQRKDIESDKCRHCHAASETIQHVMAGCKILAQSDYKHRHDQVAKIVHQKLAANAGFLTEKCPYYKYEPETVHENETHKLYWDRAIITDKTVPHNRPDITLVDKSNKTTYLIDIAVPNTNNIQTTYTTKITKYQDLRHEVRDIWGMEKILIIPLVISATGIVPKTLATNLEILNIDPNTYIEIQKATILNTCHIVRKFLDMAH

SEQ ID NO: 22132 - protein, 1187 aa, Dysdera silvatica
MNHNENMNGASVVSLLNQNRVRTLSRGASSKNMQQSLLGGVGGCSGASNCTATRTNTAQSALQPSIGATTRAERPRQRMSWTIDMNTYIMRTYYTITKLETDMTNYRPTLHAKFAQQYPHLDISIERITTQRRNIITRNLLAEPILQRLRDEVANDLVNTSTSVANPEAPVSSPREPLQPSIEEEEERRDVEKMEEGFQCALAEYEGSDAATRPRIPRQPASWKLCAATKILNEHTLPLHLQNHNSLHEIHTAIYCAAIAASRANGYEVRNEGRNNRGNKAQPPWQVRLEKRIEELRSSIGRITQYMQGNRGKKLVRKVKMALKRNRIHTRHEEPNKHISEYLDTLKQKLGVYARRLRRYKDCTNKKQQNMQFQANQKAFYRKLRETPANKDKYEAPKPAEIETFWKTLWSNEVQHKSAPWIQQEMEATRGIEEMEYTGITIEELQQVIQRTHNWKAPGIDGIHNFWYKKFTSAHGPLAKELTAIIEDPSKMPEFLCKGITYLLPKDQDTSNPAKYRPITCLNTLYKILTGCISEKISRHSESNNLMAEEQKGCQKRTLGCKEQLTIDSVILEQARKQKRKLNTAYIDYKKAFDSVPHSWLLEILSIYKVHPSIIRFLQSSMKQWRTRLQLNTPDSKIETAEIPIRRGIFQGDALSPQWFCLALNPLSRMLNTSKYGYMLKKDKRNLHKVSHLMYVDDIKLYAPTITQLRQLISITETFSKDIGMEFGLDKCKIQKNSKEDLPGIELEDGRLLKTLDEGETYKYLGIMQKRQQEHKKVKVQLTQAFQERLRSIVKTKLSGKNTTQAINAYAVPVLTYSFGIIKWSNTELEQLQRKMRTIQRRAGQLHPATAIERQTLPREEGGRGQADLKDLHDKQIQSMRQYFQLKSPRSPLIQAIIQADANYTPLNLCSTEERVLETANEQKLRTWAGKPLHGRHYNDLQQPHVDKKASNSWLAKGTLQPETEGFMLAIQDQVIATRNNQKFIQRKDIESDKCRHCHAASETIQHVMAGCKILAQSDYKHRHDQVAKIVHQKLAANAGFLTEKCPYYKYEPETVHENETHKLYWDRAIITDKTVPHNRPDITLVDKSNKTTYLIDIAVPNTNNIQTTYTTKITKYQDLRHEVRDIWGMEKIFIIPLVISATGIVPKTLATNLGILNIDPNTYIEIQKATILNTCHIVRKFLDMAH

SEQ ID NO: 22133 - protein, 1186 aa, Dysdera silvatica
MNHNENMNGASVVSLLNQNRVRVLSRGASSKNMQQSLLGGVGGCSGASNCTATRTNTAQSALQPSIGATTRAERPRQRMSWTIDMNTYIMRTYYTITKLETDMTNYRPTLHAKFAQQYPHLDISIERITTQRRNIITRNLLAEPILQRLRDEVANDLANTSTSVANPEAPAIGAREPLQTSIEEEERRDVEKMEEGFQCALAEYEGSDAATRPRIPRQPASWKLCKATKILNEHTLPLHLQNHNSLQEIHTAIYCAAVAASRANGYEVRNEGRSNRGNKAQPPWQVRLEKRIEELRSSIGRITQYMQGNRSKKLVRKVKMALKRNRIHTRHEEPNKHISEYLDTLKQKLGVYARRLRRYKDYTNKKQQNMQFQANQKAFYRKLRETPANKDKYEAPKPAEIETFWKTLWSNEVQHKSAPWIQQEMEATRGIEEMEYTGITIEELQQVIQRTHNWKAPGIDGIHNFWYKKFTSAHGPLAKELTAIIEDPSKMPEFLCKGITYLLPKDQDTSNPAKYRPITCLNTLYKILTGCISEKISRHSESNNLMTEEQKGCQKGTLGCKEQLTIDSVILEQARKQKRKLNTAYIDYKKAFDSVPHSWLLEILSIYKVHPSIIRFLQSSMKQWRTRLQLNTPDSKIETAEIPIRRGIFQGDALSPQWFCLALNPLSRMLNTSKYGYMLKKDKRNLHKVSHLMYVDDIKLYAPTITQLRQLISITETFSKDIGMEFGLDKCKIQKNSKEDLPGIELEDGRLLKTLDEGETYKYLGIMQKRQQEHKKVKVQLTQAFQERLRSIVKTKLSGKNTTQAINAYAVPVLTYSFGIIKWSNTELEQLQRKMRTIQRRAGQLHPATAIERQTLPREEGGRGQADLKDLHDKQIQSMRQYFQLKSPRSPLIQAIIQADANYTPLNLCSTEERVLETANEQKLRTWAGKPLHGRHYNDLQQPHVDKKASNSWLAKGTLQPETEGFMLAIQDQVIATRNNQKFIQRKDIESDKCRHCHAASETIQHVMAGCKILAQSDYKHRHDQVAKIVHQKLAANAGFLTEKCPYYKYEPETVHENETHKLYWDRAIITDKTVPHNRPDITLVDKSNKTTYLIDIAVPNTNNIQTTYTTKITKYQDLRHEVRDIWGMEKIFIIPLVISATGIVPKTLATNLGILNIDPNTYIEIQKATILNTCHIVRKFLDMAH

SEQ ID NO: 22134 - protein, 1186 aa, Dysdera silvatica
MNHNENMNGASVVTLLNQNRVRALSRGASSKNMQQSLLGGVGGCSGASNCTATRTNTAQSALQPSIGATTRAERPRQRMSWTIDMNTYIMRTYYTITKLETDMTNYRPTLHAKFAQQYPHLDISIERITTQRRNIITRNLLAEPILQRLRDEVANDLANTSTSVANPEAPVSSPREPLQTSIEQEERRDVEKMEEGFQCALAEYEGSDAATRPRIPRQPASWKLCKATKILNEHTLPLHLQNHNSLQEIHTAIYCAAVAASRANGYEVRNEGRSNRGNKAQPPWQVRLEKRIEELRSSIGRITQYMQGNRSKKLVRKVKMALKRNRIHTRHEEPNKHISEYLDTLKQKLGVYARRLRRYKDYTNRKQQNMQFQANQKAFYRKLRETPANKDKYEAPKPAEIETFWKTLWSNEVQHKSAPWIQQEMEATRGIEEMEYTGITIEELQQVIQRTHNWKAPGIDGIHNFWYKKFTSAHGPLAKELTAIIEDPSKMPEFLCKGITYLLPKDQDTSNPAKYRPITCLNTLYKILTGCISEKISRHSESNNLMTEEQKGCQKGTLGCKEQLTIDSVILEQARKQKRKLNTAYIDYKKAFDSVPHSWLLEILSIYKVHPSIIRFLQSSMKQWRTRLQLNTPDSKIETAEIPIRRGIFQGDALSPQWFCLALNPLSRMLNTSKYGYMLKKDKRNLHKVSHLMYVDDIKLYAPTITQLRQLISITETFSKDIGMEFGLDKCKIQKNSKEDLPGIELEDGRLLKTLDEGETYKYLGIMQKRQQEHKKVKVQLTQAFQERLRSIVKTKLSGKNTTQAINAYAVPVLTYSFGIIKWSNTELEQLQRKMRTIQRRAGQLHPATAIERQTLPREEGGRGQADLKDLHDKQIQSMRQYFQLKSPRSPLIQAIIQADANYTPLNLCSTEERVLETANEQKLRTWAGKPLHGRHYNDLQQPHVDKKASNSWLAKGTLQPETEGFMLAIQDQVIATRNNQKFIQRKDIESDKCRHCHAASETIQHVMAGCKILAQSDYKHRHDQVAKIVHQKLAANAGFLTEKCPYYKYEPETVHENETHKLYWDRAIITDKTVPHNRPDITLVDKSNKTTYLIDIAVPNTNNIQTTYTTKITKYQDLRHEVRDIWGMEKILIIPLVISATGIVPKTLATNLEILNIDPNTYIEIQKATILNTCHIVRKFLDMAH

SEQ ID NO: 22135 - protein, 867 aa, Dysdera silvatica
MALKRNRIHTRHEEPNKHISEYLDTLKQKLGVYARRLRRYKDCTNKKQQNMQFQANQKAFYRKLRETPANKDKYEAPKPAVIETFWKTLWSNEVQHKSAPWIQQEMEATRGIEEMEYTGITIEELQQVIQRTHNWKAPGIDGIHNFWYKKFTSAHGPLAKELTAIIEDPSKMPEFLCKGITYLLPKDQDTSNPAKYRPITCLNTLYKILTGCISEKISRHSESNNLMTEEQKGCQKGTLGCKEQLTIDSVILEQARKQKRKLNTAYIDYKKAFDSVPHSWLLEILSIYKVHPSIIRFLQSSMKQWRTRLQLNTPDSKIESAEIPIRRGIFQGDALSPQWFCLALNPLSRMLNTSKYGYMLKKDKRNLHKVSHLMYVDDIKLYAPTITQLRQLISITETFSKDIGMEFGLDKCKIQKNSKEDLPGIELEDGRLLKTLDEGETYKYLGIMQKRQQEHKKVKVQLTQAFQERLRSIVKTKLSGKNTTQAINAYAVPVLTYSFGIIKWSNTELEQLQRKMRTIQRRAGQLHPATAIERQTLPREEGGRGQADLKDLHDKQIQSMRQYFQLKSPRSPLIQAIIQADANYTPLNLCSTEERVLETANEQKLRTWAGKPLHGRHYNDLQQPHVDKKASNSWLAKGTLQPETEGFMLAIQDQVIATRNNQKFIQRKDIESDKCRHCHAASETIQHVTAGCKILAQSDYKHRHDQVAKIVHQKLAANAGFLTEKCPYYKYEPETVHENETHKLYWDRAIITDKTVPHNRPDITLVDKSNKTTYLIDIAVPNTNNIQTTYTTKITKYQDLRHEVRDIWGMEKIFIIPLVISATGIVPKTLATNLEILNIDPNTYIEIQKATILNTCHIVRKFLDMAH

SEQ ID NO: 22136 - protein, 1014 aa, Dysdera silvatica
MAQEPFQSSIEEEERRDVEKMEEGFQCALAEYEGSDAATRPRIPRQPASWKLCKATKILNEHTLPLHLQNHNSLQEIHTAIYCAAVAASRANGYEVRNEGRSNRGNKAQPPWQVRLEKRIEELRSSIGRITQYMQGNRGKKLVRKVKMALKRNRIHTRHEEPNKHISEYLDTLKQKLGVYARRLRRYKDYTNKKQQNMQFQANQKAFYRKLRETPANKDKYEAPKPAEIETFWKTLWSNEVQHKSAPWIQQEMEATRGIEEMEYTGITIEELQQVIQRTHNWKAPGIDGIHNFWYKKFTSAHGPLAKELTAIIEDPSKMPEFLCKGITYLLPKDQDTSNPAKYRPITCLNTLYKILTGCISEKISRHSESNNLMAEEQKGCQKGTLGCKEQLTIDSVILEQARKQKRKLNTAYIDYKKAFDSVPHSWLLEILSIYKVHPSIIRFLQSSMKQWRTRLQLNTPDSKIETAEIPIRRGIFQGDALSPQWFCLALNPLSRMLNTSKYGYMLKKDKRNLHKVSHLMYVDDIKLYAPTITQLRQLISITETFSKDIGMEFGLDKCKIQKNSKEDLPGIELEDGRLLKTLDEGETYKYLGIMQKRQQEHKKVKVQLTQAFQERLRSIVKTKLSGKNTTQAINAYAVPVLTYSFGIIKWSNTELEQLQRKMRTIQRRAGQLHPATAIERQTLPREEGGRGQADLKDLHDKQIQSMRQYFQLKSPRSPLIQAIIQADANYTPLNLCSTEERVLETANEQKLRTWAGKPLHGRHYNDLQQPHVDKKASNSWLAKGTLQPETEGFMLAIQDQVIATRNNQKFIQRKDIESDKCRHCHAASETIQHVMAGCKILAQSDYKHRHDQVAKIVHQKLAANAGFLTEKCPYYKYEPETVHENETHKLYWDRAIITDKTVPHNRPDITLVDKSNKTTYLIDIAVPNTNNIQTTYTTKITKYQDLRHEVRDIWGMEKILIIPLVISATGIVPKTLATNLEILNIDPNTYIEIQKATILNTCHIVRKFLDMAH

SEQ ID NO: 22137 - protein, 1135 aa, Dysdera silvatica
MNHNENMNGASVVSLLNQNRVRTLSRGASSKNMQQSLLGGVGGCSGASNCTATRTNTAQSALQPSIGATTRAERPRQRMSWTIDMNTYIMRTYYTITKLETDMTNYRPTLHAKFAQQYPHLDISIERITTQRRNIITRNLLAEPILQRLRDEVANDLANTSTSVANPEAPASSAREPLQPSIEEEERRDVEKMEEGFQCALAEYEGSDAATRPRIPRQPASWKLCKATKILNEHTLPLHLQNHNSLQEIHTAIYCAAVAASRANGYEVRNEGRSNRGNKAQPPWQVRLQKRIEELRSSIGRITQYMQGNRGKKLVRKVKMALKRNRIHNRKLRETPANKDKYEAPKPAEIETFWKTLWSNEVQHKSAPWIQQEMEATRGIEEMEYTGITIEELQQVIQRTHNWKAPGIDGIHNFWYKKFTSAHGPLAKELTAIIEDPSKMPEFLCKGITYLLPKDQDTSNPAKYRPITCLNTLYKILTGCISEKISRHSESNNLMTEEQKGCQKGTLGCKEQLTIDSVILEQARKQKRKLNTAYIDYKKAFDSVPHSWLLEILSIYKVHPSIIRFLQSSMKQWRTRLQLNTPDSKIETAEIPIRRGIFQGDALSPQWFCLALNPLSRMLNTSKYGYMLKKDKRNLHKVSHLMYVDDIKLYAPTITQLRQLISITETFSKDIGMEFGLDKCKIQKNSKEDLPGIELEDGRLLKTLDEGETYKYLGIMQKRQQEHKKVKVQLTQAFQERLRSIVKTKLSGKNTTQAINAYAVPVLTYSFGIIKWSNTELEQLQRKMRTIQRRAGQLHPATAIERQTLPREEGGRGQADLKDLHDKQIQSMRQYFQLKSPRSPLIQAIIQADANYTPLNLCSTEERVLETANEQKLRTWAGKPLHGRHYNDLQQPHVDKKASNSWLAKGTLQPETEGFMLAIQDQVIATRNNQKFIQRKDIESDKCRHCHAASETIQHVMAGCKILAQSDYKHRHDQVAKIVHQKLAANAGFLTEKCPYYKYEPETVHENETHKLYWDRAIITDKTVPHNRPDITLVDKSNKTTYLIDIAVPNTNNIQTTYTTKITKYQDLRHEVRDIWGMEKIFIIPLVISATGIVPKTLATNLEILNIDPNTYIEIQKATILNTCHIVRKFLDMAH

SEQ ID NO: 22138 - protein, 881 aa, Dysdera silvatica
MQGNRGKKLVRKVKMALKRNRIHTRHEEPNKHISEYLDTLKQKLGVYARRLRRYKDYTNKKQQNMQFQANQKAFYRKLRETPANKDKYEAPKPAEIETFWKTLWSNEVQHKSAPWIQQEMEATRGIEEMEYTGITIEELQQVIQRTHNWKAPGIDGIHNFWYKKFTSAHGPLAKELTAIIEDPSKMPEFLCKGITYLLPKDQDTSNPAKYRPITCLNTLYKILTGCISEKISRHSESNNLMTEEQKGCQKGTLGCKEQLTIDSVILEQARKQKRKLNTAYIDYKKAFDSVPHSWLLEILSIYKVHPSIIRFLQSSMKQWRTRLQLNTPDSKIETAEIPIRRGIFQGDALSPQWFCLALNPLSRMLNASKYGYMLKKDKRNLHKVSHLMYVDDIKLYAPTITQLRQLISITETFSKDIGMEFGLDKCKIQKNSKEDLPGIELEDGRLLKTLDEGETYKYLGIMQKRQQEHKKVKVQLTQAFQERLRSIVKTKLSGKNTTQAINAYAVPVLTYSFGIIKWSNTELEQLQRKMRTIQRRAGQLHPATAIERQTLPREEGGRGQADLKDLHDKQIQSMRQYFQLKSPRSPLIQAIIQADANYTPLNLCSTEERVLETANEQKLRTWAGKPLHGRHYNDLQQPHVDKKASNSWLAKGTLQPETEGFMLAIQDQVIATRNNQKFIQRKDIESDKCRHCHAASETIQHVMAGCKILRQSDYKHRHDQVAKIVHQKLAANAGFLTEKCPYYKYEPETVHENETHKLYWDRAIITDKTVPHNRPDITLVDKSNKTTYLIDIAVPNTNNIQTTYTTKITKYQDLRHEVRDIWGMEKILIIPLVISATGIVPKTLATNLEILNIDPNTYIEIQKATILNTCHIVRKFLDMAH

SEQ ID NO: 22139 - protein, 1042 aa, Dysdera silvatica
MSWTIDMNTYIMRTYYTITKLETDMTNYRPTLHAKFAQQYPHLDISIERITTQRRNIITRNLLAEPILQRLRDEVANDLANTSTSVANPEAPANSAREPLQPSMEDEERRDVEKMEEGFQCALAEYEGSDAATRPRIPRQPASWKLCKATKILNEHTLPLHLQNHNSLQEIHTAIYCAAVAASRANGYEVRNEGRSNRGNKAQPPWQVRLQKRIEELRSSIGRITQYMQGNRSKKLVRKVKMALKRNRIHTRHEEPNKHISEYLDTLKQKLGVYARRLRRYKDYTNRKQQNMQFQANQKAFYRKLRETPANKDKYEAPKPAEIETFWKTLWSNEVQHKSAPWIQQEMEATRGIEEMEYTGITIEELQQVIQRTHNWKAPGIDGIHNFWYKKFTSAHGPLAKELTAIIEDPSKMPEFLCKGITYLLPKDQDTSNPAKYRPITCLNTLYKILTGCISEKISRHSESNNLMTEEQKGCQKGTLGCKEQLTIDSVILEQARKQKRKLNTAYIDYKKAFDSVPHSWLLEILSIYKVHPSIIRFLQSSMKQWRTRLQLNTPDSKIETAEIPIRRGIFQGDALSPQWFCLALNPLSRMLNTSKYGYMLKKDKRNLHKVSHLMYVDDIKLYAPTITQLRQLISITETFSKDIGMEFGLDKCKIQKNSKEDLPGIELEDGRLLKTLDEGETYKYLGIMQKRQQEHKKVKVQLTQAFQERLRSIVKTKLSGKNTTQAINAYAVPVLTYSFGIIKWSNTELEQLQRKMRTIQRRAGQLHPATAIERQTLPREEGGRGQADLKDLHDKQIQSMRQYFQLKSPRSPLIQAIIQADANYTPLNLCSTEERVLETANEQKLRTWAGKPLHGRHYNDLQQPHVDKKASNSWLAKGTLQPETEGFMLAIQDQVIATRNNQKFIQRKDIESDKCRHCHAASETIQHVMAGCKILAQSDYKHRHDQVAKIVHQKLAANAGFLTEKCPYYKYEPETVHENETHKLYWDRAIITDKTVPHNRPDITLVDKSNKTTYLIDIAVPNTNNIQTTYTTSYSITYCSA

SEQ ID NO: 22140 - protein, 1186 aa, Dysdera silvatica
MNHNENMNGASVVSLLNQNRVRVLSRGASSKNMQQSLLGGVGGCSGASNCTATRTNTAQSALQPSIGATTRAERPRQRMSWTIDMNTYIMRTYYTITKLETDMTNYRPTLHAKFAQQYPHLDISIERITTQRRNIITRNLLAEPILQRLRDEVANDLANTSTSVANPEAPAIGAREPLQTSIEQEERRDVEKMEEGFQCALAEYEGSDAATRPRIPRQPASWKLCKATKILNEHTLPLHLQNHNSLHEIHTAIYCAAIAASRANGYEVRNEGRNNRGNKAQPPWQVRLEKRIEELRSSIGRITQYMQGNRGKKLVRKVKMALKRNRIHTRHEEPNKHISEYLDTLKQKLGVYARRLRRYKDCTNKKQQNMQFQANQKAFYRKLRETPANKDKYEAPKPAEIETFWKTLWSNEVQHKSAPWIQQEMEATRGIEEMEYTGITIEELQQVIQRTHNWKAPGIDGIHNFWYKKFTSAHGPLAKELTAIIEDPSKMPEFLCKGITYLLPKDQDTSNPAKYRPITCLNTLYKILTGCISEKISRHSESNNLMTEEQKGCQKGTLGCKEQLTIDSVILEQARKQKRKLNTAYIDYKKAFDSVPHSWLLEILSIYKVHPSIIRFLQSSMKQWRTRLQLNTPDSKIETAEIPIRRGIFQGDALSPQWFCLALNPLSRMLNTSKYGYMLKKDKRNLHKVSHLMYVDDIKLYAPTITQLRQLISITETFSKDIGMEFGLDKCKIQKNSKEDLPGIELEDGRLLKTLDEGETYKYLGIMQKRQQEHKKVKVQLTQAFQERLRSIVKTKLSGKNTTQAINAYAVPVLTYSFGIIKWSNTELEQLQRKMRTIQRRAGQLHPATAIERQTLPREEGGRGQADLKDLHDKQIQSMRQYFQLKSPRSPLIQAIIQADANYTPLNLCSTEERVLETANEQKLRTWAGKPLHGRHYNDLQQPHVDKKASNSWLAKGTLQPETEGFMLAIQDQVIATRNNQKFIQRKDIESDKCRHCHAASETIQHVMAGCKILAQSDYKHRHDQVAKIVHQKLAANAGFLTEKCPYYKYEPETVHENETHKLYWDRAIITDKTVPHNRPDITLVDKSNKTTYLIDIAVPNTNNIQTTYTTKITKYQDLRHEVRDIWGMEKILIIPLVISATGIVPKTLATNLEILNIDPNTYIEIQKATILNTCHIVRKFLDMAH

SEQ ID NO: 22141 - protein, 1097 aa, Dysdera silvatica
MRTYYTITKLETDMTNYRPTLHAKFAQQYPHLDISIERITTQRRNIITRNLLAEPILQRLRDEVANDLANTSTSVANPEAPASSAREPLQPSIEEEERRDVEKMEEGFQCALAEYEGSDAATRPRIPRQPASWKLCKATKILNEHTLPLHLQNHNSLQEIHTAIYCAAVAASRANGYEVRNEGRSNRGNKAQPPWQVRLQKRIEELRSSIGRITQYMQGNRSKKLVRKVKMALKRNRIHTRHEEPNKHISEYLDTLKQKLGVYARRLRRYKDYTNRKQQNMQFQANQKAFYRKLRETPANKDKYEAPKPAEIETFWKTLWSNEVQHKSAPWIQQEMEATRGIEEMEYTGITIEELQQVIQRTHNWKAPGIDGIHNFWYKKFTSAHGPLAKELTAIIEDPSKMPEFLCKGITYLLPKDQDTSNPAKYRPITCLNTLYKILTGCISEKISRHSESNNLMTEEQKGCQKGTLGCKEQLTIDSVILEQARKQKRKLNTAYIDYKKAFDSVPHSWLLEILSIYKVHPSIIRFLQSSMKQWRTRLQLNTPDSKIETAEIPIRRGIFQGDALSPQWFCLALNPLSRMLNTSKYGYMLKKDKRNLHKVSHLMYVDDIKLYAPTITQLRQLISITETFSKDIGMEFGLDKCKIQKNSKEDLPGIELEDGRLLKTLDEGETYKYLGIMQKRQQEHKKVKVQLTQAFQERLRSIVKTKLSGKNTTQAINAYAVPVLTYSFGIIKWSNTELEQLQRKMRTIQRRAGQLHPATAIERQTLPREEGGRGQADLKDLHDKQIQSMRQYFQLKSPRSPLIQAIIQADANYTPLNLCSTEERVLETANEQKLRTWAGKPLHGRHYNDLQQPHVDKKASNSWLAKGTLQPETEGFMLAIQDQVIATRNNQKFIQRKDIESDKCRHCHAASETIQHVMAGCKILAQSDYKHRHDQVAKIVHQKLAANAGFLTEKCPYYKYEPETVHENETHKLYWDRAIITDKTVPHNRPDITLVDKSNKTTYLIDIAVPNTNNIQTTYTTKITKYQDLRHEVRDIWGMEKIFIIPLVISATGIVPKTLATNLEILNIDPNTYIEIQKATILNTCHIVRKFLDMAH

SEQ ID NO: 22142 - protein, 1108 aa, Dysdera silvatica
MSWTIDMNTYIMRTYYTITKLETDMTNYRPTLHAKFAQQYPHLDISIERITTQRRNIITRNLLAEPILQRLRDEVANDLANTSTSVANPEAPASSAREPLQPSIEEEERRDVEKMEEGFQCALAEYEGSDAATRPRIPRQPASWKLCKATKILNEHTLPLHLQNHNSLQEIHTAIYCAAVAASRANGYEVRNEGRSNRGNKAQPPWQVRLQKRIEELRSSIGRITQYMQGNRSKKLVRKVKMALKRNRIHTRHEEPNKHISEYLDTLKQKLGVYARRLRRYKDYTNKKQQNMQFQANQKAFYRKLRETPANKDKYEAPKPAEIETFWKTLWSNEVQHKSAPWIQQEMEATRGIEEMEYTGITIEELQQVIQRTHNWKAPGIDGIHNFWYKKFTSAHGPLAKELTAIIEDPSKMPEFLCKGITYLLPKDQDTSNPAKYRPITCLNTLYKILTGCISEKISRHSESNNLMTEEQKGCQKGTLGCKEQLTIDSVILEQARKQKRKLNTAYIDYKKAFDSVPHSWLLEILSIYKVHPSIIRFLQSSMKQWRTRLQLNTPDSKIETAEIPIRRGIFQGDALSPQWFCLALNPLSRMLNASKYGYMLKKDKRNLHKVSHLMYVDDIKLYAPTITQLRQLISITETFSKDIGMEFGLDKCKIQKNSKEDLPGIELEDGRLLKTLDEGETYKYLGIMQKRQQEHKKVKVQLTQAFQERLRSIVKTKLSGKNTTQAINAYAVPVLTYSFGIIKWSNTELEQLQRKMRTIQRRAGQLHPATAIERQTLPREEGGRGQADLKDLHDKQIQSMRQYFQLKSPRSPLIQAITQADANYTPLNLCSTEERVLETANEQKLRTWAGKPLHGRHYNDLQQPHVDKKASNSWLAKGTLQPETEGFMLAIQDQVIATRNNQKFIQRKDIESDKCRHCHAASETIQHVMAGCKILAQSDYKHRHDQVAKIVHQKLAANAGFLTEKCPYYKYEPETVHENETHKLYWDRAIITDKTVPHNRPDITLVDKSNKTTYLIDIAVPNTNNIQTTYTTKITKYQDLRHEVRDIWGMEKIFIIPLVISATGIVPKTLATNLGILNIDPNTYIEIQKATILNTCHIVRKFLDMAH

SEQ ID NO: 22143 - protein, 978 aa, Dysdera silvatica
MKARCQQSQYHVSRHLRNLQQPRSSLHLPLHLQKHNSLQEIHTAIYCAAVAASRANGYEVRNEGRSNRGNKAQPPWQVRLEKRIEELRSSIGRITQYMQGNRGKKLVRKVKMALKRNRIHTRHEEPNKHISEYLDTLKQKLGVYARRLRRYKDYTNKKQQNMQFQANQKAFYRKLRETPANKDKYEAPKPAEIETFWKTLWSNEVQHKSAPWIQQEMEATRGIEEMEYTGITIEELQQVIQRTHNWKAPGIDGIHNFWYKKFTSAHGPLAKELTAIIEDPSKMPEFLCKGITYLLPKDQDTSNPAKYRPITCLNTLYKILTGCISEKISRHSESNNLMTEEQKGCQKGTLGCKEQLTIDSVILEQARKQKRKLNTAYIDYKKAFDSVPHSWLLEILSIYKVHPSIIRFLQSSMKQWRTRLQLNTPDSKIETAEIPIRRGIFQGDALSPQWFCLALNPLSRMLNTSKYGYMLKKDKRNLHKVSHLMYVDDIKLYAPTITQLRQLISITETFSKDIGMEFGLDKCKIQKNSKEDLPGIELEDGRLLKTLDEGETYKYLGIMQKRQQEHKKVKVQLTQAFQERLRSIVKTKLSGKNTTQAINAYAVPVLTYSFGIIKWSNTELEQLQRKMRTIQRRAGQLHPATAIERQTLPREEGGRGQADLKDLHDKQIQSMRQYFQLKSPRSPLIQAIIQADANYTPLNLCSTEERVLETANEQKLRTWAGKPLHGRHYNDLQQPHVDKKASNSWLAKGTLQPETEGFMLAIQDQVIATRNNQKFIQRKDIESDKCRHCHAASETIQHVMAGCKILAQSDYKHRHDQVAKIVHQKLAANAGFLTEKCPYYKYEPETVHENETHKLYWDRAIITDKTVPHNRPDITLVDKSNKTTYLIDIAVPNTNNIQTTYTTKITKYQDLRHEVRDIWGMEKIFIIPLVISATGIVPKTLATNLEILNIDPNTYIEIQKATILNTCHIVRKFLDMAH

SEQ ID NO: 22144 - protein, 1186 aa, Dysdera silvatica
MNHNENMNGASVVSLLNQNRVRVLSRGASSKNMQQSLLGGVGGCSGASNCTATRTNTAQSALQPSIGATTRAERPRQRMSWTIDMNTYIMRTYYTITKLETDMTNYRPTLHAKFAQQYPHLDISIERITTQRRNIITRNLLAEPILQRLRDEVANDLVNTSTSVANPETPAIGAREPLQTSIEQEERRDVEKMEEGFQCALAEYEGSDAATRPRIPRQPASWKLCKATKILNEHTLPLHLQKHNSLQEIHTAIYCAAVAASRANGYEVRNEGRSNRGNKAQPPWQVRLQKRIEELRSSIGRITQYMQGNRSKKLVRKVKMALKRNRIHTRHEEPNKHISEYLDTLKQKLGVYARRLRRYKDCTNKKQQNMQFQANQKAFYRKLRETPANKDKYEAPKPAEIETFWKTLWSNEVQHKSAPWIQQEMEATRGIEEMEYTGITIEELQQVIQRTHNWKAPGIDGIHNFWYKKFTSAHGPLAKELTAIIEDPSKMPEFLCKGITYLLPKDQDTSNPAKYRPITCLNTLYKILTGCISEKISRHSESNNLMTEEQKGCQKGTLGCKEQLTIDSVILEQARKQKRKLNTAYIDYKKAFDSVPHSWLLEILSIYKVHPSIIRFLQSSMKQWRTRLQLNTPDSKIETAEIPIRRGIFQGDALSPQWFCLALNPLSRMLNASKYGYMLKKDKRNLHKVSHLMYVDDIKLYAPTITQLRQLISITETFSKDIGMEFGLDKCKIQKNSKEDLPGIELEDGRLLKTLDEGETYKYLGIMQKRQQEHKKVKVQLTQAFQERLRSIVKTKLSGKNTTQAINAYAVPVLTYSFGIIKWTNTELEQLQRKMRTIQRRAGQLHPATAIERQTLPREEGGRGQADLKDLHDKQIQSMRQYFQLKSPRSPLIQAIIQADANYTPLNLCSTEERVLETANEQKLRTWAGKPLHGRHYNDLQQPHVDKKASNSWLAKGTLQPETEGFMLAIQDQVIATRNNQKFIQRKDIESDKCRHCHAASETIQHVMAGCKILAQSDYKHRHDQVAKIVHQKLAANAGFLTEKCPYYKYEPETVHENETHKLYWDRAIITDKTVPHNRPDITLVDKSNKTTYLIDIAVPNTNNIQTTYTTKITKYQDLRHEVRDIWGMEKILIIPLVISATGIVPKTLATNLEILNIDPNTYIEIQKATILNTCHIVRKFLDMAH

SEQ ID NO: 22145 - protein, 1186 aa, Dysdera silvatica
MNHNENMNGASVVSLLNQNRVRTLSRGASSKNMQQSLLGGVGGCSGASNCTATRTNTAQSALQPSIGATTRAERPRQRMSWTIDMNTYIMRTYYTITKLETDMTNYRPTLHAKFAQQYPHLDISIERITTQRRNIITRNLLAEPILQRLRDEVANDLANTSTSVANPEAPASSAREPLQPSIEEEERRDVEKMEEGFQCALAEYEGSDAATRPRIPRQPASWKLCKATKILNEHTLPLHLQNHNSLHEIHTAIYCAAVAASRANGCEVRNEGRSNRGNKAQPPWQVRLEKRIEELRSSIGRITQYMQGNRGKKLVRKVKMALKRNRIHTRHEEPNKHISEYLDTLKQKLGVYARRLRRYKDCTNKKQQNMQFQANQKAFYRKLRETPANKDKYEAPKPAEIETFWKTLWSNEVQHKSAPWIQQEMEATRGIEEMEYTGITIEELQQVIQRTHNWKAPGIDGIHNFWYKKFTSAHGPLAKELTAIIEDPSKMPEFLCKGITYLLPKDQDTSNPAKYRPITCLNTLYKILTGCISEKISRHSESNNLMAEEQKGCQKGTLGCKEQLTIDSVILEQARKQKRKLNTAYIDYKKAFDSVPHSWLLEILSIYKVHPSIIRFLQSSMKQWRTRLQLNTPDSKIETAEIPIRRGIFQGDALSPQWFCLALNPLSRMLNASKYGYMLKKDKRNLHKVSHLMYVDDIKLYAPTITQLRQLISITETFSKDIGMEFGLDKCKIQKNSKEDLPGIELEDGRLLKTLDEGETYKYLGIMQKRQQEHKKVKVQLTQAFQERLRSIVKTKLSGKNTTQAINAYAVPVLTYSFGIIKWSNTELEQLQRKMRTIQRRAGQLHPATAIERQTLPREEGGRGQADLKDLHDKQIQSMRQYFQLKSPRSPLIQAIIQADANYTPLNLCSTEERVLETANEQKLRTWAGKPLHGRHYNDLQQPHVDKKASNSWLAKGTLQPETEGFMLAIQDQVIATRNNQKFIQRKDIESDKCRHCHAASETIQHVMAGCKILAQSDYKHRHDQVAKIVHQKLAANAGFLTEKCPYYKYEPETVHENETHKLYWDRAIITDKTVPHNRPDITLVDKSNKTTYLIDIAVPNTNNIQTTYTTKITKYQDLRHEVRDIWGMEKILIIPLVISATGIVPKTLATNLEILNIDPNTYIEIQKATILNTCHIVRKFLDMAH

SEQ ID NO: 22146 - protein, 994 aa, Dysdera silvatica
MEEGFQCALAEYEGSDAATRPRIPRQPASWKLCKATKILNEHTLPLHLQNHNSLQEIHTAIYCAAVAASRANGYEVRNEGRSNRGNKAQPPWQVRLQKRIEELRSSIGRITQYMQGNRSKKLVRKVKMALKRNRIHTRHEEPNKHISEYLDTLKQKLGVYARRLRRYKDYTNRKQQNMQFQANQKAFYRKLRETPANKDKYEAPKPAEIETFWKTLWSNEVQHKSAPWIQQEMEATRGIEEMEYTGITIEELQQVIQRTHNWKAPGIDGIHNFWYKKFTSAHGPLAKELTAIIEDPSKMPEFLCKGITYLLPKDQDTSNPAKYRPITCLNTLYKILTGCISEKISRHSESNNLMTEEQKGCQKGTLGCKEQLTIDSVILEQARKQKRKLNTAYIDYKKAFDSVPHSWLLEILSIYKVHPSIIRFLQSSMKQWRTRLQLNTPDSKIETAEIPIRRGIFQGDALSPQWFCLALNPLSRMLNTSKYGYMLKKDKRNLHKVSHLMYVDDIKLYAPTITQLRQLISITETFSKDIGMEFGLDKCKIQKNSKEDLPGIELEDGRLLKTLDEGETYKYLGIMQKRQQEHKKVKVQLTQAFQERLRSIVKTKLSGKNTTQAINAYAVPVLTYSFGIIKWSNTELEQLQRKMRTIQRRAGQLHPATAIERQTLPREEGGRGQADLKDLHDKQIQSMRQYFQLKSPRSPLIQAIIQADANYTPLNLCSTEERVLETANEQKLRTWAGKPLHGRHYNDLQQPHVDKKASNSWLAKGTLQPETEGFMLAIQDQVIATRNNQKFIQRKDIESDKCRHCHAASETIQHVMAGCKILAQSDYKHKHDQVAKIVHQKLAANAGFLTEKCPYYKYEPETVHENETHKLYWDRAIITDKTVPHNRPDITLVDKSNKTTYLIDIAVPNTNNIQTTYTTKITKYQDLRHEVRDIWGMEKILIIPLVISATGIVPKTLATNLEILNIDPNTYIEIQKATILNTCHIVRKFLDMAH

SEQ ID NO: 22147 - protein, 881 aa, Dysdera silvatica
MQGNRGKKLVRKVKMALKRNRTHTRHEEPNKHISEYLDTLKQKLGVYTRRLRRYKDCTNKKQQNMQFQANQKAFYRKLRETPANKDKYEAPKPAVIETFWKTLWSNEVQHKSAPWIQQEMEATRGIEEMEYTGITIEELQQVIQRTHNWKASGIDGIHNFWYKKFTSTHGPLAKELTAIIEDPSKMPEFLCKGITYLLPKDQDTSNPAKYRPITCLNTLYKILTGCISEKISRHSESNNLMTEEQKGCQKGTLGCKEQLTIDSVILEQARKQKRKLNTAYIDYKKAFDSVPHSWLLEILSIYKVHPSIIRFLQSSMKQWRTRLQLNTPDSKIETAEIPIRRGIFQGDALSPQWFCLALNPLSRMLNTSKYGYMLKKDKRNLHKVSHLMYVDDIKLYAPTITQLRQLISITETFSKDIGMEFGLDKCKIQENRKEDLPGIEFEDGRLLKTLGEGETYKYLGIMQKRQQEHKKVKVQLTQAFQERLRSIVKTKLSGKNTTQAINAYAVPVLTYSFGIIKWSNTELEQLQRKMRTIQRRAGQLHPATAIERQTLPREEGGRGQADLKDLHDKQIQSMRQYFQLKSPRSPLIQAIIQADANYTPLNLCSTEERVLETANEQKLRTWAGKPLHGRHYNDLQQPHVDKKASNSWLAKGTLQPETEGFMLAIQDQVIATRNNQKFIQRKDIESDKCRHCHAASETIQHVMAGCKILAQSDYKHRHDQVAKIVHQKLAANAGFLTEKCPYYKYEPETVHENETHKLYWDRAIITDKTVPHNRPDITLVDKSNKTTYLIDIAVPNTNNIQTTYTTKITKYQDLRHEVRDIWGMEKIFIIPLVISATGIVPKTLATNLEILNIDPNTYIEIQKATILNTCHIVRKFLDMAH

SEQ ID NO: 22148 - protein, 957 aa, Dysdera silvatica
MYNEHTLPLHLQKHNSLQEIHTAIYCAAVAASRANGYEVRNEGRSNRGNKAQPPWQVRLEKRIEELRSSIGRITQYMQGNRGKKLVRKVKMALKRNRIHTRHEEPNKHISEYLDTLKQKLGVYARRLRRYKDYTNKKQQNMQFQANQKAFYRKLRETPANKDKYEAPKPAEIETFWKTLWSNEVQHKSAPWIQQEMEATRGIEEMEYTGITIEELQQVIQRTHNWKAPGIDGIHNFWYKKFTSAHGPLAKELTAIIEDPSKMPEFLCKGITYLLPKDQDTSNPAKYRPITCLNTLYKILTGCISEKISRHSESNNLMTEEQKGCQKGTLGCKEQLTIDSVILEQARKQKRKLNTAYIDYKKAFDSVPHSWLLEILSIYKVHPSIIRFLQSSMKQWRTRLQLNTPDSKIETAEIPIRRGIFQGDALSPQWFCLALNPLSRMLNTSKYGYMLKKDKRNLHKVSHLMYVDDIKLYAPTITQLRQLISITETFSKDIGMEFGLDKCKIQKNSKEDLPGIELEDGRLLKTLDEGETYKYLGIMQKRQQEHKKVKVQLTQAFQERLRSIVKTKLSGKNTTQAINAYAVPVLTYSFGIIKWSNTELEQLQRKMRTIQRRAGQLHPATAIERQTLPREEGGRGQADLKDLHDKQIQSMRQYFQLKSPRSPLIQAIIQADANYTPLNLCSTEERVLETANEQKLRTWAGKPLHGRHYNDLQQPHVDKKASNSWLAKGTLQPETEGFMLAIQDQVIATRNNQKFIQRKDIESDKCRHCHAASETIQHVMAGCKILAQSDYKHRHDQVAKIVHQKLAANAGFLTEKCPYYKYEPETVHENETHKLYWDRAIITDKTVPHNRPDITLVDKSNKTTYLIDIAVPNTNNIQTTYTTKITKYQDLRHEVRDIWGMEKILIIPLVISATGIVPKTLATNLEILNIDPNTYIEIQKATILNTCHIVRKFLDMAH

SEQ ID NO: 22149 - protein, 1083 aa, Dysdera silvatica
MTNYRPTLHAKFAQQYPHLDISIERITPQGRNIITRNLLPEPILQRLRDEVANDLANTSTSVANLEAPAVSAREPLQPSIEEEDRRDVEKMEGFQFALAEYEGSDAATRPRIPRQPASWKLCKATKILNEHTLPLHLQNHNSLHEIHTAVYCAAVAASRANGYEVRNAGRNNRGNKAQPPWQVRLEKRIKELRSSIGRITQYMQGNRGKKLVRKVKMALKRNRIHTRHEEPNKHISEYLDTLKQKLSVYARRLRRYKDYTNRKQQNIQFQANQKAFYRKLQETPANKDKYEAPKPAEIETFWKTLWSNEVQHKSAPWIQQEMEATRGIEEMEYTGITIEELQQVIQRTHNWKAPGIDGIHNFWYKKFTSAHGPLAKELTAIIEDPSKMPEFLCKGITYLLPKDQDTSNPAKYRPITCLNTLYKILTGCISEKISRHSESNNLMTEEQKGCQKGTLGCKEQLTIDSVILEQARKQKRKLNTAYIDYKKAFDSVPHSWLLEILSIYKVHPSIIRFLQSSMKQWRTRLQLNTPDSKIETAEIPIRRGIFQGDALSPQWFCLALNPLSRMLNTSKYGYMLKKDKRNLHKVSHLMYVDDIKLYAPTITQLRQLISITETFSKDIGMEFGLDKCKIQKNSKEDLPGIELEDGRLLKTLDEGETYKYLGIMQKRQQEHKKVKVQLTQAFQERLRSIVKTKLSGKNTTQAINAYAVPVLTYSFGIIKWSNTELEQLQRKMRTIQRRAGQLHPATAIERQTLPREEGGRGQADLKDLHDKQIQSMRQYFQLKSPRSPLIQAIIQADANYTPLNLCSTEERVLETANEQKLRTWAGKPLHGRHYNDLQQPHVDKKASNSWLAKGTLQPETEGFMLAIQDQVIATRNNQKFIQRKDIESDKCRHCHAASETIQHVMAGCKILAQSDYKHRHDQVAKIVHQKLAANAGFLTEKCPYYKYEPETVHENETHKLYWDRAIITDKTVPHNRPDITLVDKSNKTTYLIDIAVPNTNNIQTTYTTKITKYQDLRHEVRDIWGMEKILIIPLVISATGIVPKTLATNLEILNIDPNTYIEIQKATILNTCHIVRKFLDMAH

SEQ ID NO: 22150 - protein, 1186 aa, Dysdera silvatica
MNHNENMNGASVVSLLNQNRVRVLSRGASSKNMQQSLLGGVGGCSGASNCTATRTNTAQSALQPSIGATTRAERPRQRMSWTIDMNTYIMRTYYTITKLETDMTNYRPTLHAKFAQQYPHLDISIERITTQRRNIITRNLLAEPILQRLRDEVANDLANTSTSVANPEAPAIGAREPLQPSIEEEERRDVEKMEEGFQCALAEYEGSDAATRPRIPRQPASWKLCKATKILNEHTLPLHLQNHNSLQEIHTAIYCAAVAASRANGYEVRNEGRSNRGNKAQPPWQVRLEKRIEELRSSIGRITQYMQGNRSKKLVRKVKMALKRNRIHTRHEEPNKHISEYLDTLKQKLGVYARRLRRYKDYTNRKQQNMQFQANQKAFYRKLRETPANKDKYEAPKPAEIETFWKTLWSNEVQHKSAPWIQQEMEATRGIEEMEYTGITIEELQQVIQRTHNWKAPGIDGIHNFWYKKFTSAHGPLAKELTAIIEDPSKMPEFLCKGITYLLPKDQDTSNPAKYRPITCLNTLYKILTGCISEKISRHSESNNLMTEEQKGCQKGTLGCKEQLTIDSVILEQARKQKRKLNTAYIDYKKAFDSVPHSWLLEILSIYKVHPSIIRFLQSSMKQWRTRLQLNTPDSKIETAEIPIRRGIFQGDALSPQWFCLALNPLSRMLNTSKYGYMLKKDKRNLHKVSHLMYVDDIKLYAPTITQLRQLISITETFSKDIGMEFGLDKCKIQKNSKEDLPGIELEDGRLLKTLDEGETYKYLGIMQKRQQEHKKVKVQLTQAFQERLRSIVKTKLSGKNTTQAINAYAVPVLTYSFGIIKWSNTELEQLQRKMRTIQRRAGQLHPATAIERQTLPREEGGRGQADLKDLHDKQIQSMRQYFQLKSPRSPLIQAIIQADANYTPLNLCSTEERVLETANEQKLRTWAGKPLHGRHYNDLQQPHVDKKASNSWLAKGTLQPETEGFMLAIQDQVIATRNNQKFIQRKDIESDKCRHCHAASETIQHVMAGCKILAQSDYKHRHDQVAKIVHQKLAANAGFLTEKCPYYKYEPETVHENETHKLYWDRAIITDKTVPHNRPDITLVDKSNKTTYLIDIAVPNTNNIQTTYTTKITKYQDLRHEVRDIWGMEKILIIPLVISATGIVPKTLATNLEILNIDPNTYIEIQKATILNTCHIVRKFLDMAH

SEQ ID NO: 22151 - protein, 1204 aa, Dysdera silvatica
MYIYIYIYKKKAISDSDDMNHNENMNGASVVALLNQNRVRVLSRGASSKNMQQSLLGGVGGCSGASNCTATRTNTAQSALQPSIGATTRAERPRQRMSWTIDMNTYIMRTYYTITKLETDMTNYRPTLHAKFAQQYPHLDISIERITTQRRNIITRNLLAEPILQRLRDEVANDLANTSTSVANPEAPASSAREPLQPSIEEEERRDVEKMEEGFQCALAEYEGSDAATRPRIPRQPASWKLCKATKILNEHTLPLHLQNHNSLQEIHTAIYCAAVAASRANGYEVRNEGRSNRGNKAQPPWQVRLEKRIEELRSSIGRITQYMQGNRSKKLVRKVKMALKRNRIHTRHEEPNKHISEYLDTLKQKLGVYARRLRRYKDYTNRKQQNMQFQANQKAFYRKLRETPANKDKYEAPKPAEIETFWKTLWSNEVQHKSAPWIQQEMEATRGIEEMEYTGITIEELQQVIQRTHNWKAPGIDGIHNFWYKKFTSAHGPLAKELTAIIEDPSKMPEFLCKGITYLLPKDQDTSNPAKYRPITCLNTLYKILTGCISEKISRHSESNNLMTEEQKGCQKGTLGCKEQLTIDSVILEQARKQKRKLNTAYIDYKKAFDSVPHSWLLEILSIYKVHPSIIRFLQSSMKQWRTRLQLNTPDSKIETAEIPIRRGIFQGDALSPQWFCLALNPLSRMLNTSKYGYMLKKDKRNLHKVSHLMYVDDIKLYAPTITQLRQLISITETFSKDIGMEFGLDKCKIQKNSKEDLPGIELEDGRLLKTLDEGETYKYLGIMQKRQQEHKKVKVQLTQAFQERLRSIVKTKLSGKNTTQAINAYAVPVLTYSFGIIKWSNTELEQLQRKMRTIQRRAGQLHPATAIERQTLPREEGGRGQADLKDLHDKQIQSMRQYFQLKSPRSPLIQAIIQADANYTPLNLCSTEERVLETANEQKLRTWAGKPLHGRHYNDLQQPHVDKKASNSWLAKGTLQPETEGFMLAIQDQVIATRNNQKFIQRKDIESDKCRHCHAASETIQHVMAGCKILAQSDYKHRHDQVAKIVHQKLAANAGFLTEKCPYYKYEPETVHENETHKLYWDRAIITDKTVPHNRPDITLVDKSSKTTYLIDIAVPNTNNIQTTYTTKITKYQDLRHEVRDIWGMEKILIIPLVISATGIVPKTLATNLEILNIDPNTYIEIQKATILNTCHIVRKFLDMAH

SEQ ID NO: 22152 - protein, 994 aa, Dysdera silvatica
MEEGFQCALAEYEGSDAATRPRIPRQPASWKLCKATKILNEHTLPLHLQNHNSLQEIHTAIYCAAVAASRANGYEVRNEGRSNRGNKAQPPWQVRLQKRIEELRSSIGRITQYMQGNRGKKLVRKVKMALKRNRIHTRHEEPNKHISEYLDTLKQKLGVYARRLRRYKDYTNKKQQNMQFQANQKAFYRKLRETPANKDKYEAPKPAEIETFWKTLWSNEVQHKSAPWIQQEMEATRGIEEMEYTGITIEELQQVIQRTHNWKAPGIDGIHNFWYKKFTSAHGPLAKELTAIIEDPSKMPEFLCKGITYLLPKDQDTSNPAKYRPITCLNTLYKILTGCISEKISRHSESNNLMTEEQKGCQKGTLGCKEQLTIDSVILEQARKQKRKLNTAYIDYKKAFDSVPHSWLLEILSIYKVHPSIIRFLQSSMKQWRTRLQLNTPDSKIETAEIPIRRGIFQGDALSPQWFCLALNPLSRMLNTSKYGYMLKKDKRNLHKVSHLMYVDDIKLYAPTITQLRQLISITETFSKDIGMEFGLDKCKIQKNSKEDLPGIELEDGRLLKTLDEGETYKYLGIMQKRQQEHKKVKVQLTQAFQERLRSIVKTKLSGKNTTQAINAYAVPVLTYSFGIIKWSNTELEQLQRKMRTIQRRAGQLHPATAIERQTLPREEGGRGQADLKDLHDKQIQSMRQYFQLKSPRSPLIQAIIQADANYTPLNLCSTEERVLETANEQKLRTWAGKPLHGRHYNDLQQPHVDKKASNSWLAKGTLQPETEGFMLAIQDQVIATRNNQKFIQRKDIESDKCRHCHAASETIQHVMAGCKILAQSDYKHRHDQVAKIVHQKLAANAGFLTEKCPYYKYEPETVHENETHKLYWDRAIITDKTVPHNRPDITLVDKSNKTTYLIDIAVPNTNNIQTTYTTKITKYQDLRHEVRDIWGMEKIFIIPLVISATGIVPKTLATNLEILNIDPNTYIEIQKATILNTCHIVRKFLDMAH

SEQ ID NO: 22153 - protein, 947 aa, Dysdera silvatica
MDNRYEHLHHAHLLYDYKAGNRHDKLQTHTSRQIRTTVPTPGHQYRKDNNPTQEHNNHSIGRITQYMQGNRSKKLVRKVKMALKRNRIHTRHEEPNKHISEYLDTLKQKLGVYARRLRRYKDYTNKKQQNMQFQANQKAFYRKLRETPANKDKYEAPKPAEIETFWKTLWSNEVQHKSAPWIQQEMEATRGIEEMEYTGITIEELQQVIQRTHNWKAPGIDGIHNFWYKKFTSAHGPLAKELTAIIEDPSKMPEFLCKGITYLLPKDQDTSNPAKYRPITCLNTLYKILTGCISEKISRHSESNNLMTEEQKGCQKGTLGCKEQLTIDSVILEQARKQKRKLNTAYIDYKKAFDSVPHSWLLEILSIYKVHPSIIRFLQSSMKQWRTRLQLNTPDSKIETAEIPIRRGIFQGDALSPQWFCLALNPLSRMLNTSKYGYMLKKDKRNLHKVSHLMYVDDIKLYAPTITQLRQLISITETFSKDIGMEFGLDKCKIQKNSKEDLPGIELEDGRLLKTLDEGETYKYLGIMQKRQQEHKKVKVQLTQAFQERLRSIVKTKLSGKNTTQAINAYAVPVLTYSFGIIKWSNTELEQLQRKMRTIQRRAGQLHPATAIERQTLPREEGGRGQADLKDLHDKQIQSMRQYFQLKSPRSPLIQAIIQADANYTPLNLCSTEERVLETANEQKLRTWAGKPLHGRHYNDLQQPHVDKKASNSWLAKGTLQPETEGFMLAIQDQVIATRNNQKFIQRKDIESDKCRHCHAASETIQHVMAGCKILAQSDYKHRHDQVAKIVHQKLAANAGFLTEKCPYYKYEPETVHENETHKLYWDRAIITDKTVPHNRPDITLVDKSNKTTYLIDIAVPNTNNIQTTYTTKITKYQDLRHEVRDIWGMEKILIIPLVISATGIVPKTLATNLEILNIDPNTYIEIQKATILNTCHIVRKFLDMAH

SEQ ID NO: 22154 - protein, 1186 aa, Dysdera silvatica
MNHNENMNGASVVSLLNQNRVRVLSRGASSKNMQQSLLGGVGGCSGASNCTATRTNTAQSALQPSIGATTRAERPRQRMSWTIDMNTYIMRTYYTITKLETDMTNYRPTLHAKFAQQYPHLDISIERITTQRRNIITRNLLAEPILQRLRDEVANDLANTSTSVANPEAPTIGAREPLQTSIEQEERRDVEKMEEGFQCALAEYEGSDAATRPRIPRQPASWKLCKATKILNEHTLPLHLQNHNSLQEIHTAIYCAAVAASRANGYEVRNEGRSNRGNKAQPPWQVRLQKRIEELRSSIGRITQYMQGNRGKKLVRKVKMALKRNRIHTRHEEPNKHISEYLDTLKQKLGVYARRLRRYKDCTNKKQQNKQFQTNQKAFYRKLQETSANKDKYEAPKPAEIETFWKTLWSNEVQHKSAPWIQQEMEATRGIEEMEYTGITIEELQQVIQRTHNWKAPGIDGIHNFWYKKFTSAHGPLAKELTAIIEDPSKMPEFLCKGITYLLPKDQDTSNPAKYRPITCLNTLYKILTGCISEKISRHSESNNLMTEEQKGCQKGTLGCKEQLTIDSVILEQARKQKRKLNTAYIDYKKAFDSVPHSWLLEILSIYKVHPSIIRFLQSSMKQWRTRLQLNTPDSKIETAEIPIRRGIFQGDALSPQWFCLALNPLSRMLNTSKYGYMLKKDKRNLHKVSHLMYVDDIKLYAPTITQLRQLISITETFSKDIGMEFGLDKCKIQKNSKEDLPGIELEDGRLLKTLDEGETYKYLGIMQKRQQEHKKVKVQLTQAFQERLRSIVKTKLSGKNTTQAINAYAVPVLTYSFGIIKWSNTELEQLQRKMRTIQRRAGQLHPATAIERQTLPREEGGRGQADLKDLHDKQIQSMRQYFQLKSPRSPLIQAIIQADANYTPLNLCSTEERVLETANEQKLRTWAGKPLHGRHYNDLQQPHVDKKASNSWLAKGTLQPETEGFMLAIQDQVIATRNNQKFIQRKDIESDKCRHCHAASETIQHVMAGCKILAQSDYKHRHDQVAKIVHQKLAANAGFLTEKCPYYKYEPETVHENETHKLYWDRAIITDKTVPHNRPDITLVDKSNKTTYLIDIAVPNTNNIQTTYTTKITKYQDLRHEVRDIWGMEKILIIPLVISATGIVPKTLATNLEILNIDPNTYIEIQKATILNTCHIVRKFLDMAH

SEQ ID NO: 22155 - protein, 1186 aa, Dysdera silvatica
MNHNENMNGASVVSLLNQNRVRVLSRGASSKNMQQSLLGGVGGCSGASNCTATRTNTAQSALQPSIGATTRAERPRQRMSWTIDMNTYIMRTYYTITKLETDMTNYRPTLHAKFAQQYPHLDISIERITTQRRNIITRNLLAEPILQRLRDEVANDLANTSTSVANPEAPAIGAREPLQPSIEEEERRDVEKMEEGFQCALAEYEGSDAATRPRIPRQPASWKLCKATKILNEHTLPLHLQNHNSLQEIHTAIYCAAVAASRANGYEVRNEGRSNRGNKAQPPWQVRLEKRIEELRSSIGRITQYMQGNRSKKLVRKVKMALKRNRIHTRHEEPNKHISEYLDTLKQKLGVYARRLRRYKDYTNRKQQNMQFQANQKAFYRKLRETPANKDKYEAPKPAEIETFWKTLWSNEVQHKSAPWIQQEMEATRGIEEMEYTGITIEELQQVIQRTHNWKAPGIDGIHNFWYKKFTSAHGPLAKELTAIIEDPSKMPEFLCKGITYLLPKDQDTSNPAKYRPITCLNTLYKILTGCISEKISRHSESNNLMTEEQKGCQKGTLGCKEQLTIDSVILEQARKQKRKLNTAYIDYKKAFDSVPHSWLLEILSIYKVHPSIIRFLQSSMKQWRTRLQLNTPDSKIETAEIPIRRGIFQGDALSPQWFCLALNPLSRMLNTSKYGYMLKKDKRNLHKVSHLMYVDDIKLYAPTITQLRQLISITETFSKDIGMEFGLDKCKIQKNSKEDLPGIELEDGRLLKTLDEGETYKYLGIMQKRQQEHKKVKVQLTQAFQERLRSIVKTKLSGKNTTQAINAYAVPVLTYSFGIIKWTNTELEQLQRKMRTIQRRAGQLHPATAIERQTLPREEGGRGQADLKDLHDKQIQSMRQYFQLKSPRSPLIQAIIQADANYTPLNLCSTEERVLETANEQKLRTWAGKPLHGRHYNDLQQPHVDKKASNSWLAKGTLQPETEGFMLAIQDQVIATRNNQKFIQRKDIESDKCRHCHAASETIQHVMAGCKILAQSDYKHRHDQVAKIVHQKLAANAGFLTEKCPYYKYEPETVHENETHKLYWDRAIITDKTVPHNRPDITLVDKSNKTTYLIDIAVPNTNNIQTTYTTKITKYQDLRHEVRDIWGMEKIFIIPLVISATGIVPKTLATNLEILNIDPNTYIEIQKATILNTCHIVRKFLDMAH

SEQ ID NO: 22156 - protein, 1186 aa, Dysdera silvatica
MNHNENMNGASVVSLLNQNRVRTLSRGASSKNMQQSLLGGVGGCSGASNCTATRTNTAQSALQPSIGATTRAERPRQRMSWTIDMNTYIMRTYYTITKLETDMTNYRPTLHAKFAQQYPHLDISIERITTQRRNIITRNLLAEPILQRLRDEVANDLANTSTSVANPEAPASSAREPLQPSIEEEERRDVEKMEEGFQCALAEYEGSDAATRPRIPRQPASWKLCKATKILNEHTLPLHLQNHNSLQEIHTAIYCAAVAASRANGYEVRNEGRSNRGNKAQPPWQVRLEKRIEELRSSIGRITQYMQGNRGKKLVRKVKMALKRNRIHTRHEEPNKHISEYLDTLKQKLGVYARRLRRYKDYTNKKQQNMQFQANQKAFYRKLRETPANKDKYEAPKPAEIETFWKTLWSNEVQHKSAPWIQQEMEATRGIEEMEYTGITIEELQQVIQRTHNWKAPGIDGIHNFWYKKFTSAHGPLAKELTAIIEDPSKMPEFLCKGITYLLPKDQDTSNPAKYRPITCLNTLYKILTGCISEKISRHSESNNLMAEEQKGCQKGTLGCKEQLTIDSVILEQARKQKRKLNTAYIDYKKAFDSVPHSWLLEILSIYKVHPSIIRFLQSSMKQWRTRLQLNTPDSKIETAEIPIRRGIFQGDALSPQWFCLALNPLSRMLNASKYGYMLKKDKRNLHKVSHLIYVDDIKLYAPTITQLRQLISITETFSKDIGMEFGLDKCKIQKNSKEDLPGIELEDGRLLKTLDEGETYKYLGIMQKRQQEHKKVKVQLTQAFQERLRSIVKTKLSGKNTTQAINAYAVPVLTYSFGIIKWTNTELEQLQRKMRTIQRRAGQLHPATAIERQTLPREEGGRGQADLKDLHDKQIQSMRQYFQLKSPRSPLIQAIIQADANYTPLNLCSTEERVLETANEQKLRTWAGKPLHGRHYNDLQQPHVDKKASNSWLAKGTLQPETEGFMLAIQDQVIATRNNQKFIQRKDIESDKCRHCHAASETIQHVMAGCKILAQSDYKHRHDQVAKIVHQKLAANAGFLTEKCPYYKYEPETVHENETHKLYWDRAIITDKTVPHNRPDITLVDKSNKTTYLIDIAVPNTNNIQTTYTTKITKYQDLRHEVRDIWGMEKILIIPLVISATGIVPKTLATNLEILNIDPNTYIEIQKATILNTCHIVRKFLDMAH

SEQ ID NO: 22157 - protein, 1108 aa, Dysdera silvatica
MSWTIDMNTYIRRTYYTITKLETDMTNYRPTLYVKFAQQYPHLDISIERITTQRRNIITTNLLAEPILQRLKDEVANDLANTSTSVANPEAPANSAREPLQPSIEEEERRDVEKMEEGFQCALAEYEGSDAATRPRIPRQPASWKLCKATKILNEHTLPLHLQKHNSLQEIHTAIYCAAVAASRANGYEVRNEGRSNRGNKAQPPWQVRLQKRIEELRSSIGRITQYMQGNRSKKLVRKVKMALKRNRIHTRHEEPNKHISEYLDTLKQKLGVYARRLRRYKDYTNKKQQNMQFQANQKAFYRKLRETSANKDKYETPKPAEIETFWKTLWSNEVQHKSAPWIQQEMEATRGIEEMEYTGITIEELQQVIQRTHNWKAPGIDGIHNFWYKKFTSAHGPLAKELTAIIEDPSKMPEFLCKGITYLLPKDQDTSNPAKYRPITCLNTLYKILTGCISEKISRHSESNNLMAEEQKGCQKGTLGCKEQLTIDSVILEQARKQKRKLNTAYIDYKKAFDSVPHSWLLEILSIYKVHPSIIRFLQSSMKQWRTRLQLNTPDSKIETAEIPIRRGIFQGDALSPQWFCLALNPLSRMLNASKYGYMLKKDKRNLHKVSHLMYVDDIKLYAPTITQLRQLISITETFSKDIGMEFGLDKCKIQKNSKEDLPGIELEDGRLLKTLDEGETYKYLGIMQKRQQEHKKVKVQLTQAFQERLRSIVKTKLSGKNTTQAINAYAVPVLTYSFGIIKWSNTELEQLQRKMRTIQRRAGQLHPATAIERQTLPREEGGRGQADLKDLHDKQIQSMRQYFQLKSPRSPLIQAIIQADANYTPLNLCSTEERVLETANEQKLRTWAGKPLHGRHYNDLQQPHVDKKASNSWLAKGTLQPETEGFMLAIQDQVIATRNNQKFIQRKDIESDKCRHCHAASETIQHVMAGCKILAQSDYKHRHDQVAKIVHQKLAANAGFLTEKCPYYKYEPETVHENETHKLYWDRAIITDKTVPHNRPDITLVDKSNKTTYLIDIAVPNTNNIQTTYTTKITKYQDLRHEVRDIWGMEKILIIPLVISATGIVPKTLATNLEILNIDPNTYIEIQKATILNTCHIVRKFLDMAH

SEQ ID NO: 22158 - protein, 1022 aa, Dysdera silvatica
MVEYDDDDIYIYIYIYIEEEEERRDVEKMEEGFQCALAEYEGSDAATRPRIPRQPASWKLCKATKILNEHTLPLHLQNHNSLQEIHTAIYCAAVAASRANGYEVRNEGRSNRGNKAQPPWQVRLQKRIEELRSSIGRITQYMQGNRGKKLVRKVKMALKRNRIHTRHEEPNKHISEYLDTLKQKLGVYARRLRRYKDYTNKKQQNMQFQANQKAFYRKLRETPANKDKYEAPKPAEIETFWKTLWSNEVQHKSAPWIQQEMEATRGIEEMEYTGITIEELQQVIQRTHNWKAPGIDGIHNFWYKKFTSAHGPLAKELTAIIEDPSKMPEFLCKGITYLLPKDQDTSNPAKYRPITCLNTLYKILTGCISEKISRHSESNNLMTEEQKGCQKGTLGCKEQLTIDSVILEQARKQKRKLNTAYIDYKKAFDSVPHSWLLEILSIYKVHPSIIRFLQSSMKQWRTRLQLNTPDSKIETAEIPIRRGIFQGDALSPQWFCLALNPLSRMLNTSKYGYMLKKDKRNLHKVSHLMYVDDIKLYAPTITQLRQLISITETFSKDIGMEFGLDKCKIQKNSKEDLPGIELEDGRLLKTLDEGETYKYLGIMQKRQQEHKKVKVQLTQAFQERLRSIVKTKLSGKNTTQAINAYAVPVLTYSFGIIKWSNTELEQLQRKMRTIQRRAGQLHPATAIERQTLPREEGGRGQADLKDLHDKQIQSMRQYFQLKSPRSPLIQAIIQADANYTPLNLCSTEERVLETANEQKLRTWAGKPLHGRHYNDLQQPHVDKKASNSWLAKGTLQPETEGFMLAIQDQVIATRNNQKFIQRKDIESDKCRHCHAASETIQHVMAGCKILAQSDYKHRHDQVAKIVHQKLAANAGFLTEKCPYYKYEPETVHENETHKLYWDRAIITDKTVPHNRPDITLVDKSNKTTYLIDIAVPNTNNIQTTYTTKITKYQDLRHEVRDIWGMEKIFIIPLVISATGIVPKTLATNLEILNIDPNTYIEIQKATILNTCHIVRKFLDMAH

SEQ ID NO: 22159 - protein, 1186 aa, Dysdera silvatica
MNHNENMNGASVVSLLNQNRVRTLSRGASSKNMQQSLLGGVGGCSGASNCTATRTNTAQSALQPSIGATTRAERPRQRMSWTIDMNTYIMRTYYTITKLETDMTNYRPTLHAKFAQQYPHLDISIERITTQRRNIITRNLLAEPILQRLRDEVANDLANTSTSVANPEAPASSAREPLQPSIEEEERRDVEKMEEGFQCALAEYEGSDAATRPRIPRQPASWKLCKATKILNEHTLPLHLQNHNSLQEIHTAIYCAAVAASRANGYEVRNEGRSNRGNKAQPPWQVRLEKRIEELRSSIGRITQYMQGNRGKKLVRKVKMALKRNRIHTRHEEPNKHISEYLDTLKQKLGVYARRLRRYKDYTNKKQQNMQFQANQKAFYRKLRETPANKDKYEAPKPAEIETFWKTLWSNEVQHKSAPWIQQEMEATRGIEEMEYTGITIEELQQVIQRTHNWKAPGIDGIHNFWYKKFTSAHGPLAKELTAIIEDPSKMPEFLCKGITYLLPKDQDTSNPAKYRPITCLNTLYKILTGCISEKISRHSESNNLMAEEQKGCQKGTLGCKEQLTIDSVILEQARKQKRKLNTAYIDYKKAFDSVPHSWLLEILSIYKVHPSIIRFLQSSMKQWRTRLQLNTPDSKIETAEIPIRRGIFQGDALSPQWFCLALNPLSRMLNASKYGYMLKKDKRNLHKVSHLMYVDDIKLYAPTITQLRQLISITETFSKDIGMEFGLDKCKIQKNSKEDLPGIELEDGRLLKTLDEGETYKYLGIMQKRQQEHKKVKVQLTQAFQERLRSIVKTKLSGKNTTQAINAYAVPVLTYSFGIIKWSNTELEQLQRKMRTIQRRAGQLHPATAIERQTLPREEGGRGQADLKDLHDKQIQSMRQYFQLKSPRSPLIQAIIQADANYTPLNLCSTEERVLETANEQKLRTWAGKPLHGRHYNDLQQPHVDKKASNSWLAKGTLQPETEGFMLAIQDQVIATRNNQKFIQRKDIESDKCRHCHAASETIQHVMAGCKILAQSDYKHRHDQVAKIVHQKLAANAGFLTEKCPYYKYEPETVLENETHKLYWDRAIITDKTVPHNRPDITLVDKSNKTTYLIDIAVPNTNNIQTTYTTKITKYQDLRHEVRDIWGMEKIFIIPLVISATGIVPKTLATNLGILNIDPNTYIEIQKATILNTCHIVRKFLDMAH

SEQ ID NO: 22160 - protein, 1108 aa, Dysdera silvatica
MSWTIDMNTYIMRTYYTITKLETDMTNYRPTLHAKFAQQYPHLDISIERITTQRRNIITRNLLAEPILQRLRDEVANDLANTSTSVANPEAPAIGAREPLQPSIEEEERRDVEKMEEGFQCALAEYEGSDAATRPRIPRQPASWKLCKATKILNEHTLPLHLQNHNSLQEIHTAIYCAAVAASRANGYEVRNEGRSNRGNKAQPPWQVRLQKRIEELRSSIGRITQYMQGNRGKKLVRKVKMALKRNRIHTRHEEPNKHISEYLDTLKQKLGVYARRLRRYKDYTNKKQQNMQFQANQKAFYRKLRETPANKDKYEAPKPAEIETFWKTLWSNEVQHKSAPWIQQEMEATRGIEEMEYTGITIEELQQVIQRTHNWKAPGIDGIHNFWYKKFTSAHGPLAKELTAIIEDPSKMPEFLCKGITYLLPKDQDTSNPAKYRPITCLNTLYKILTGCISEKISRHSESNNLMTEEQKGCQKGTLGCKEQLTIDSVILEQARKQKRKLNTAYIDYKKAFDSVPHSWLLEILSIYKVHPSIIRFLQSSMKQWRTRLQLNTPDSKIETAEIPIRRGIFQGDALSPQWFCLALNPLSRMLNTSKYGYMLKKDKRNLHKVSHLMYVDDIKLYAPTITQLRQLISITETFSKDIGMEFGLDKCKIQKNSKEDLPGIELEDGRLLKTLDEGETYKYLGIMQKRQQEHKKVKVQLTQAFQERLRSIVKTKLSGKNTTQAINAYAVPVLTYSFGIIKWSNTELEQLQRKMRTIQRRAGQLHPATAIERQTLPREEGGRGQADLKDLHDKQIQSMRQYFQLKSPRSPLIQAIIQADANYTPLNLCSTEERVLETANEQKLRTWAGKPLHGRHYNDLQQPHVDKKASNSWLAKGTLQPETEGFMLAIQDQVIATRNNQKFIQRKDIESDKCRHCHAASETIQHVMAGCKILAQSDYKHRHDQVAKIVHQKLAANAGFLTEKCPYYKYEPETVHENETHKLYWDRAIITDKTVPHNRPDITLVDKSNKTTYLIDIAVPNTNNIQTTYTTKITKYQDLRHEVRDIWGMEKILIIPLVISATGIVPKTLATNLEILNIDPNTYIEIQKATILNTCHIVRKFLDMAH

SEQ ID NO: 22161 - protein, 1129 aa, Dysdera silvatica
MNHNENMNGASVVTLLNQNRVRVLSRGASSKNMQQSLLGGVGGCSGASNCTATRTNTAQSALQPSIGATTRAERPRQRMSWTIDMNTYIMRTYYTITKLETDMTNYRPTLHAKFAQQYPHLDISIERITVQRRNIITRNLLAEPILQRLRDEVANDLVNTSTSVANPEAPVSSPREPLQTSIEQEERRDVEKMEEGFQCALAEYEGSDATTRPRIPRQPASWKLCKATKILNEHTLPLHLQNHNSLQEIHTAIYCAAVAASRANGYEVRNEGRSNRGNKAQPPWQVRLEKRIEELRSSIGRITQYMQGNRSKKLVRKVKMALKRNRIHTRHEEPNKHISEYLDTLKQKLGVYARRLRRYKDYTNRKQQNMQFQANQKAFYRKLRETPANKDKYEAPKPAEIETFWKTLWSNEVQHKSAPWIQQEMEATRGIEEMEYTGITIEELQQVIQRTHNWKAPGIDGIHNFWYKKFTSAHGPLAKELTAIIEDPSKMPEFLCKGITYLLPKDQDTSNPAKYRPITCLNTLYKILTGCISEKISRHSESNNLMTEEQKGCQKGTLGCKEQLTIDSVILEQARKQKRKLNTAYIDYKKAFDSVPHSWLLEILSIYKVHPSIIRFLQSSMKQWRTRLQLNTPDSKIETAEIPIRRGIFQGDALSPQWFCLALNPLSRMLNTSKYGYMLKKDKRNLHKVSHLMYVDDIKLYAPTITQLRQLISITETFSKDIGMEFGLDKCKIQKNSKEDLPGIELEDGRLLKTLDEGETYKYLGIMQKRQQEHKKVKVQLTQAFQERLRSIVKTKLSGKNTTQAINAYAVPVLTYSFGIIKWSNTELEQLQRKMRTIQRRAGQLHPATAIERQTLPREEGGRGQADLKDLHDKQIQSMRQYFQLKSPRSPLIQAIIQADANYTPLNLCSTEERVLETANEQKLRTWAGKPLHGRHYNDLQQPHVDKKASNSWLAKGTLQPETEGFMLAIQDQVIATRNNQKFIQRKDIESDKCRHCHAASETIQHVMAGCKILAQSDYKHRHDQVAKIVHQKLAANAGFLTEKCPYYKYEPETVHENETHKLYWDRAIITDKTVPHNRPDITLVDKSNKTTYLIDIAVPNTNNIQTTYTTKITKYEIYGVWKRSSSSR

SEQ ID NO: 22162 - protein, 1223 aa, Dysdera silvatica
MSTWGTYPGRKISRGARNCGFFLIENFCYKAISDSDDMNHNENMNGASVVALLNQNRVRVLSRGASSKNMQQSLLGGVGGCSGASNCTATRTNTAQSALQPSIGATTRAERPRQRMSWTIDMNTYIMRTYYTITKLETDMTNYRPTLHAKFAQQYPHLDISIERITTQRRNIITRNLLAEPILQRLRDEVANDLANTSTSVANPEAPASSAREPLQPSIEEEERRDVEKMEEGFQCALAEYEGSDAATRPRIPRQPASWKLCKATKILNEHTLPLHLQNHNSLQEIHTAIYCAAVAASRANGYEVRNEGRSNRGNKAQPPWQVRLEKRIEELRSSIGRITQYMQGNRGKKLVRKVKMALKRNRIHTRHEEPNKHISEYLDTLKQKLGVYARRLRRYKDYTNKKQQNMQFQANQKAFYRKLRETPANKDKYEAPKPAEIETFWKTLWSNEVQHKSAPWIQQEMEATRGIEEMEYTGITIEELQQVIQRTHNWKAPGIDGIHNFWYKKFTSAHGPLAKELTAIIEDPSKMPEFLCKGITYLLPKDQDTSNPAKYRPITCLNTLYKILTGCISEKISRHSESNNLMTEEQKGCQKGTLGCKEQLTIDSVILEQARKQKRKLNTAYIDYKKAFDSVPHSWLLEILSIYKVHPSIIRFLQSSMKQWRTRLQLNTPDSKIETAEIPIRRGIFQGDALSPQWFCLALNPLSRMLNTSKYGYMLKKDKRNLHKVSHLMYVDDIKLYAPTITQLRQLISITETFSKDIGMEFGLDKCKIQKNSKEDLPGIELEDGRLLKTLDEGETYKYLGIMQKRQQEHKKVKVQLTQAFQERLRSIVKTKLSGKNTTQAINAYAVPVLTYSFGIIKWSNTELEQLQRKMRTIQRRAGQLHPATAIERQTLPREEGGRGQADLKDLHDKQIQSMRQYFQLKSPRSPLIQAIIQADANYTPLNLCSTEERVLETANEQKLRTWAGKPLHGRHYNDLQQPHVDKKASNSWLAKGTLQPETEGFMLAIQDQVIATRNNQKFIQRKDIESDKCRHCHAASETIQHVMAGCKILAQSDYKHRHDQVAKIVHQKLAANAGFLTEKCPYYKYEPETVHENETHKLYWDRAIITDKTVPHNRPDITLVDKSNKTTYLIDIAVPNTNNIQTTYTTKITKYQDLRHEVRDIWGMEKILIIPLVISATGIVPKTLATNLEILNIDPNTYIEIQKATILNTCHIVRKFLDMAH

SEQ ID NO: 22163 - protein, 1173 aa, Dysdera silvatica
MNHNQNMNGESVVALLNQNRIRTLSRGVCSKNMQQSLLGGAGSCSGAYNCTATRTNRAHSALQPSIGATTRAERARQRMSWTIDMNTYIMRTYYTITKLETDMTNYRPTLHAKFAQQYLHLDISIERITTQRRNIITRNLLAEPILQRLRDEIANDLANTSTSVANPEAPASSAREPLQPSIEEEEERRDVEKMKEGFQCALAEYEGSDAATRPRIPRQPASWKLCKATKILNEHTLPLHLQNHNSLQEIHTAIYCAAIAASRANGYEVRNEGRSNRGNKAQPLWQVRLQKRIEELRRSIGRITQYMQGNRGKKLVRKVKMALKRNRTHTRHEEPNKHISEYLDTLKQKLGVYARRLRRYKDCTNKKQQNMQFQANQKAFYRKLQETPANKDKYEAPKPAVIETFWKTLWSNEVQHKSAPWIQQEMEATRGIEEMEYTGITIEELQQVIQRTHNWKAPGIDGIHNFWYKKFTSTHGPLAKELTAIIEDPSEMPEFLCKGITYLLPKDQDTSNPAKYRPITCLNTLYKILTGCISEKISRHSESNNLMTEEQKGCQKGTLGCKEQLTIDSVILEQARKQKRKLNTAYIDYKKAFDSVPHSWLLEILSIYKVHPSIIRFLQSSMKQWRTRLQLNTPDSKIETAEIPIRRGIFQGDALSPQWFCLALNPLSRMLNTSKYGYMLKKDKRNLHKVSHLMYVDDIKLYAPTITQLRQLISITETFSKDIGMEFGLDKCKIQENRKEDLPGIEFEDGRLLKILDEGETYKYLGIMQKRQQEHKKVKVQLTQAFQERLRSIVKTKLSGKNTTQAINAYAVPVLTYSFGIIKWTNTELEQLQRKMRTIQRRAGQLHPATAIERQTLPREEGGRGQADLKDLHDKQIQSMRQYFQLKSPRSPLIQAIIQADANYTPLNLCSTEKRVLETANEQKLRTWAGKPLHGRHYNDLQQPHVDKKASNSWLAKGTLQPETEGFMLAIQDQVIATRNNQKFIQRKDIESDKCRHCHAASETIQHVMAGCKILAQSDYKHRHDQVAKIVHQKLAANAGFLTEKCPYYKYEPETVHENETHKLYWDRAIITDKTVPHNRPDITLVDKSNKTTYLIDIAVPNTNNIQTTYTTKITKYQDLRHEVRDIWGMEKILIIPLVISATGIVPKTLATNLEILNIDPNTYIEIQKATIL

SEQ ID NO: 22164 - protein, 1102 aa, Dysdera silvatica
MNTYIMRTYYTITKLETDMTNYRPTLHAKFAQQYPHLDISIERITTQRRNIITRNLLAEPILQRLRDEVANDLANTSTSVANPEAPASSAREPLQPSIEEEERRDVEKMEEGFQCALAEYEGSDAATRPRIPRQPASWKLCKATKILNEHTLPLHLQNHNSLQEIHTAIYCAAVAASRANGYEVRNEGRSNRGNKAQPPWQVRLQKRIEELRSSIGRITQYMQGNRGKKLVRKVKMALKRNRIHTRHEEPNKHISEYLDTLKQKLGVYARRLRRYKDYTNKKQQNMQFQANQKAFYRKLRETPANKDKYEAPKPAEIETFWKTLWSNEVQHKSAPWIQQEMEATRGIEEMEYTGITIEELQQVIQRTHNWKAPGIDGIHNFWYKKFTSAHGPLAKELTAIIEDPSKMPEFLCKGITYLLPKDQDTSNPAKYRPITCLNTLYKILTGCISEKISRHSESNNLMTEEQKGCQKGTLGCKEQLTIDSVILEQARKQKRKLNTAYIDYKKAFDSVPHSWLLEILSIYKVHPSIIRFLQSSMKQWRTRLQLNTPDSKIETAEIPIRRGIFQGDALSPQWFCLALNPLSRMLNTSKYGYMLKKDKRNLHKVSHLMYVDDIKLYAPTITQLRQLISITETFSKDIGMEFGLDKCKIQKNSKEDLPGIELEDGRLLKTLDEGETYKYLGIMQKRQQEHKKVKVQLTQAFQERLRSIVKTKLSGKNTTQAINAYAVPVLTYSFGIIKWSNTELEQLQRKMRTIQRRAGQLHPATAIERQTLPREEGGRGQADLKDLHDKQIQSMRQYFQLKSPRSPLIQAIIQADANYTPLNLCSTEERVLETANEQKLRTWAGKPLHGRHYNDLQQPHVDKKASNSWLAKGTLQPETEGFMLAIQDQVIATRNNQKFIQRKDIESDKCRHCHAASETIQHVMAGCKILAQSDYKHRHDQVAKIVHQKLAANAGFLTEKCPYYKYEPETVHENETHKLYWDRAIITDKTVPHNRPDITLVDKSNKTTYLIDIAVPNTNNIQTTYTTKITKYQDLRHEVRDIWGMEKILIIPLVISATGIVPKTLATNLEILNIDPNTYIEIQKATILNTCHIVRKFLDMAH

SEQ ID NO: 22165 - protein, 1097 aa, Dysdera silvatica
MHFFYVNGKAILVKPYYSIYAYELDMFTRREHIKFIDMNHDMFTPMNMSWTIDMNTYIMRTYYTITKLETDMTNYRPTLHAKFAQQYPHLDISIERITTQRRNIITRNLLAEPILQRLRDEVANDLANTSTSVANPETPASSARYTLPLHLQKHNSLQEIHTAIYCAAVAASRANGYEVRNEGRSNRGNKAQPPWQVRLQKRIEELRSSIGRITQYMQGNRGKKLVRKVKMALKRNRIHTRHEEPNKHISEYLDTLKQKLGVYARRLRRYKDYTNKKQQNMQFQANQKAFYRKLRETPANKDKYEAPKPAEIETFWKTLWSNEVQHKSAPWIQQEMEATRGIEEMEYTGITIEELQQVIQRTHNWKAPGIDGIHNFWYKKFTSAHGPLAKELTAIIEDPSKMPEFLCKGITYLLPKDQDTSNPAKYRPITCLNTLYKILTGCISEKISRHSESNNLMTEEQKGCQKGTLGCKEQLTIDSVILEQARKQKRKLNTAYIDYKKAFDSVPHSWLLEILSIYKVHPSIIRFLQSSMKQWRTRLQLNTPDSKIETAEIPIRRGIFQGDALSPQWFCLALNPLSRMLNTSKYGYMLKKDKRNLHKVSHLMYVDDIKLYAPTITQLRQLISITETFSKDIGMEFGLDKCKIQKNSKEDLPGIELEDGRLLKTLDEGETYKYLGIMQKRQQEHKKVKVQLTQAFQERLRSIVKTKLSGKNTTQAINAYAVPVLTYSFGIIKWSNTELEQLQRKMRTIQRRAGQLHPATAIERQTLPREEGGRGQADLKDLHDKQIQSMRQYFQLKSPRSPLIQAIIQADANYTPLNLCSTEERVLETANEQKLRTWAGKPLHGRHYNDLQQPHVDKKASNSWLAKGTLQPETEGFMLAIQDQVIATRNNQKFIQRKDIESDKCRHCHAASETIQHVMAGCKILAQSDYKHRHDQVAKIVHQKLAANAGFLTEKCPYYKYEPETVHENETHKLYWDRAIITDKTVPHNRPDITLVDKSNKTTYLIDIAVPNTNNIQTTYTTKITKYQDLRHEVRDIWGMEKILIIPLVISATGIVPKTLATNLEILNIDPNTYIEIQKATILNTCHIVRKFLDMAH

SEQ ID NO: 22166 - protein, 1189 aa, Dysdera silvatica
MNHNENMNGASVVSLLNQNRVRTLSRGASSKNMQQSLLGGVGGCSGASNCTATRTNTAQSALQPSIGATTRAERPRQRMSWTIDMNTYIMRTYYTITKLETDMTNYRPTLHAKFAQQYPHLDISIERITTQRRNIITRNLLAEPILQRLRDEVANDLANTSTSVANPEAPAIGAREPLQPSIEEEERRDVEKMEEGFQCALAEYEGSDAATRPRIPRQPASWKLCKATKILNEHTLPLHLQNHNSLQEIHTAIYCAAVAASRANGYEVRNEGRSNRGNKAQPPWQVRLEKRIEELRSSIGRITQYMQGNRGKKLVRKVKMALKRNRIHTRHEEPNKHISEYLDTLKQKLGVYARRLRRYKDYTNKKQQNMQFQANQKAFYRKLRETPANKDKYEAPKPAEIETFWKTLWSNEVQHKSAPWIQQEMEATRGIEEMEYTGITIEELQQVIQRTHNWKAPGIDGIHNFWYKKFTSAHGPLAKELTAIIEDPSKMPEFLCKGITYLLPKDQDTSNPAKYRPITCLNTLYKILTGCISEKISRHSESNNLMTEEQKGCQKGTLGCKEQLTIDSVILEQARKQKRKLNTAYIDYKKAFDSVPHSWLLEILSIYKVHPSIIRFLQSSMKQWRTRLQLNTPDSKIETAEIPIRRGIFQGDALSPQWFCLALNPLSRMLNTSKYGYMLKKDKRNLHKVSHLMYVDDIKLYAPTITQLRQLISITETFSKDIGMEFGLDKCKIQKNSKEDLPGIELEDGRLLKTLDEGETYKYLGIMQKRQQEHKKVKVQLTQAFQERLRSIVKTKLSGKNTTQAINAYAVPVLTYSFGIIKWSNTELEQLQRKMRTIQRRAGQLHPATAIERQTLPREEGGRGQADLKDLHDKQIQSMRQYFQLKSPRSPLIQAIIQADANYTPLNLCSTEERVLETANEQKLRTWAGKPLHGRHYNDLQQPHVDKKASNSWLAKGTLQPETEGFMLAIQDQVIATRNNQKFIQRKDIESDKCRHCHAASETIQHVMAGCKILAQSDYKHRHDQVAKIVHQKLAANAGFLTEKCPYYKYEPETVHENETHKLYWDRAIITDKTVPHNRPDITLVDKSNKTTYLIDIAVPNTNNIQTTYTTKITKYQDLRHEVRDIWGMEKILIIPLVISATGIVPKTLATNLEILNIDPNTYIEIQKATILNTCHIVRKPDMHIAIMM

SEQ ID NO: 22167 - protein, 1108 aa, Dysdera silvatica
MSWTIDMNTYIMRTYYTITKLETDMTNYRPTLHAKFAQQYPHLDISIERITTQRRNIITRNLLAEPILQRLRDEVANDLANTSTSVANPEAPASSAREPLQPSIEEEERRDVEKMEEGFQCALAEYEGSDAATRPRIPRQPASWKLCKATKILNEHTLPLHLQNHNSLQEIHTAIYCAAVAASRANGYEVRNEGRSNRGNKAQPPWQVRLQKRIEELRSSIGRITQYMQGNRGKKLVRKVKMALKRNRIHTRHEEPNKHISEYLDTLKQKLGVYARRLRRYKDYTNKKQQNMQFQANQKAFYRKLRETPANKDKYEAPKPAEIETFWKTLWSNEVQHKSAPWIQQEMEATRGIEEMEYTGITIEELQQVIQRTHNWKAPGIDGIHNFWYKKFTSAHGPLAKELTAIIEDPSKMPEFLCKGITYLLPKDQDTSNPAKYRPITCLNTLYKILTGCISEKISRHSESNNLMTEEQKGCQKGTLGCKEQLTIDSVILEQARKQKRKLNTAYIDYKKAFDSVPHSWLLEILSIYKVHPSIIRFLQSSMKQWRTRLQLNTPDSKIETAEIPIRRGIFQGDALSPQWFCLALNPLSRMLNTSKYGYMLKKDKRNLHKVSHLMYVDDIKLYAPTITQLRQLISITETFSKDIGMEFGLDKCKIQKNSKEDLPGIELEDGRLLKTLDEGETYKYLGIMQKRQQEHKKVKVQLTQAFQERLRSIVKTKLSGKNTTQAINAYAVPVLTYSFGIIKWSNTELEQLQRKMRTIQRRAGQLHPATAIERQTLPREEGGRGQADLKDLHDKQIQSMRQYFQLKSPRSPLIQAIIQADANYTPLNLCSTEERVLETANEQKLRTWAGKPLHGRHYNDLQQPHVDKKASNSWLAKGTLQPETEGFMLAIQDQVIATRNNQKFIQRKDIESDKCRHCHAASETIQHVMAGCKILAQSDYKHRHDQVAKIVHQKLAANAGFLTEKCPYYKYEPETVHENETHKLYWDRAIITDKTVPHNRPDITLVDKSNKTTYLIDIAVPNTNNIQTTYTTKITKYQDLRHEVRDIWGMEKIFIIPLVISATGIVPKTLATNLEILNIDPNTYIEIQKATILNTCHIVRKFLDMAH

SEQ ID NO: 22168 - protein, 881 aa, Dysdera silvatica
MQGNRSKKLVRKVKMALKRNRIHTRHEEPNKHISEYLDTLKQKLGVYARRLRRYKDYTNRKQQNMQFQANQKAFYRKLRETPANQDKYEAPKPAEIETFWKTLWSNEVQHKSAPWIQQEMEATRGIEEMEYTGITIEELQQVIQRTHNWKAPGIDGIHNFWYKKFTSAHGPLAKELTAIIEDPSKMPEFLCKGITYLLPKDQDTSNPAKYRPITCLNTLYKILTGCISEKISRHSESNNLMTEEQKGCQKGTLGCKEQLTIDSVILEQARKQKRKLNTAYIDYKKAFDSVPHSWLLEILSIYKVHPSIIRFLQSSMKQWRTRLQLNTPDSKIETAEIPIRRGIFQGDALSPQWFCLALNPLSRMLNTSKYGYMLKKDKRNLHKVSHLMYVDDIKLYAPTITQLRQLISITETFSKDIGMEFGLDKCKIQKNSKEDLPGIELEDGRLLKTLDEGETYKYLGIMQKRQQEHKKVKVQLTQAFQERLRSIVKTKLSGKNTTQAINAYAVPVLTYSFGIIKWSNTELEQLQRKMRTIQRRAGQLHPATAIERQTLPREEGGRGQADLKDLHDKQIQSMRQYFQLKSPRSPLIQAIIQADANYTPLNLCSTEERVLETANEQKLRTWAGKPLHGRHYNDLQQPHVDKKASNSWLAKGTLQPETEGFMLAIQDQVIATRNNQKFIQRKDIESDKCRHCHAASETIQHVMAGCKILAQSDYKHRHDQVAKIVHQKLAANAGFLTEKCPYYKYEPETVHENETHKLYWDRAIITDKTVPHNRPDITLVDKSNKTTYLIDIAVPNTNNIQTTYTTKITKYQDLRHEVRDIWGMEKILIIPLVISATGIVPKTLATNLEILNIDPNTYIEIQKATILNTCHIVRKFLDMAH

SEQ ID NO: 22169 - protein, 1180 aa, Dysdera silvatica
MNGESVVALLNQNRIRTLSRGVCSKNMQQSLLGGAGSCSGAYNCTATRTNTAQSALQPSIGATTRAERPRQRMSWTIDMNTYIMRTYYTITKLETDMTNYRPTLHAKFAQQYPHLDISIERITTQRRNIITRNLLAQPILQRLRDEVANDLVNTPTSAANPEPPVSSPREPLKPSIEEEERRDVEKMEEGFQCALAEYEGSDAATRPRIPRQPASWKLCKATKILNEHTLPLHLQNHNSLHEIHTAIYCAAIAASRANGYEVRNEGRNNRGNKAQPPWQVRLEKRIKELRSSIGRITQYMQGNRGKKLVRKVKMALKRNRIHTRHEEPNKHISEYLDTLKQKLGVYARRLRRYKDCTNKKQQNMQFQANQKAFYRKLRETPANKDKYEAPKPAEIETFWKTLWSNEVQHKSAPWIQQEMEATRGIEEMEYTGITIEELQQVIQRTHNWKAPGIDGIHNFWYKKFTSAHGPLAKELTAIIEDPSKMPEFLCKGITYLLPKDQDTSNPAKYRPITCLNTLYKILTGCISEKISRHSESNNLMAEEQKGCQKGTLGCKEQLTIDSVILEQARKQKRKLNTAYIDYKKAFDSVPHSWLLEILSIYKVHPSIIRFLQSSMKQWRTRLQLNTPDSKIETAEIPIRRGIFQGDALSPQWFCLALNPLSRMLNASKYGYMLKKDKRNLHKVSHLMYVDDIKLYAPTITQLRQLISITETFSKDIGMEFGLDKCKIQKNSKEDLPGIELEDGRLLKTLDEGETYKYLGIMQKRQQEHKKVKVQLTQAFQERLRSIVKTKLSGKNTTQAINAYAVPVLTYSFGIIKWTNTELEQLQRKMRTIQRRAGQLHPATAIERQTLPREEGGRGQADLKDLHDKQIQSMRQYFQLKSPRSPLIQAIIQADANYTPLNLCSTEERVLETANEQKLRTWAGKPLHGRHYNDLQQPHVDKKASNSWLAKGTLQPETEGFMLAIQDQVIATRNNQKFIQRKDIESDKCRHCHAASETIQHVMAGCKILAQSDYKHRHDQVAKIVHQKLAANAGFLTEKCPYYKYEPETVHENETHKLYWDRAIITDKTVPHNRPDITLVDKSNKTTYLIDIAVPNTNNIQTTYTTKITKYQDLRHEVRDIWGMEKILIIPLVISATGIVPKTLATNLEILNIDPNTYIEIQKATILNTCHIVRKFLDMAH

SEQ ID NO: 22170 - protein, 1035 aa, Dysdera silvatica
MHFVYAEYFKDPRVWNRVESLLYIYSICIYIYIYIYVDVEKMEEGFQCALAEYEGSDAATRPRIPRQPASWKLCKATKILNEHTLPLHLQNHNSLQEIHTAIYCAAVAASRANGYEVRNEGRSNRGNKAQPPWQVRLQKRIEELRSSIGRITQYMQGNRGKKLVRKVKMALKRNRIHTRHEEPNKHISEYLDTLKQKLGVYARRLRRYKDYTNKKQQNMQFQANQKAFYRKLRETPANKDKYEAPKPAEIETFWKTLWSNEVQHKSAPWIQQEMEATRGIEEMEYTGITIEELQQVIQRTHNWKAPGIDGIHNFWYKKFTSAHGPLAKELTAIIEDPSKMPEFLCKGITYLLPKDQDTSNPAKYRPITCLNTLYKILTGCISEKISRHSESNNLMTEEQKGCQKGTLGCKEQLTIDSVILEQARKQKRKLNTAYIDYKKAFDSVPHSWLLEILSIYKVHPSIIRFLQSSMKQWRTRLQLNTPDSKIETAEIPIRRGIFQGDALSPQWFCLALNPLSRMLNTSKYGYMLKKDKRNLHKVSHLMYVDDIKLYAPTITQLRQLISITETFSKDIGMEFGLDKCKIQKNSKEDLPGIELEDGRLLKTLDEGETYKYLGIMQKRQQEHKKVKVQLTQAFQERLRSIVKTKLSGKNTTQAINAYAVPVLTYSFGIIKWSNTELEQLQRKMRTIQRRAGQLHPATAIERQTLPREEGGRGQADLKDLHDKQIQSMRQYFQLKSPRSPLIQAIIQADANYTPLNLCSTEERVLETANEQKLRTWAGKPLHGRHYNDLQQPHVDKKASNSWLAKGTLQPETEGFMLAIQDQVIATRNNQKFIQRKDIESDKCRHCHAASETIQHVMAGCKILAQSDYKHRHDQVAKIVHQKLAANAGFLTEKCPYYKYEPETVHENETHKLYWDRAIITDKTVPHNRPDITLVDKSNKTTYLIDIAVPNTNNIQTTYTTKITKYQDLRHEVRDIWGMEKILIIPLVISATGIVPKTLATNLEILNIDPNTYIEIQKATILNTCHIVRKFLDMAH

SEQ ID NO: 22171 - protein, 881 aa, Dysdera silvatica
MQGNRGKKLVRKVKMALKRNRTHTRHEEPNKHISEYLDTLKQKLGVYARRLRRYKDCTNKKQQNMQFQANQKAFYRKLQETPANKDKYEAPKPAVIETFWKTLWSNEVQHKSAPWIQQEMEATRGIEEMEYTGITIEELQQVIQRTHNWKAPGIDGIHNFWYKKFTSTHGPLAKELTAIIEDPSKMPEFLCKGITYLLPKDQDTSNPAKYRPITCLNTLYKILTGCISEKISRHSESNNLMTEEQKGCQKGTLGCKEQLTIDSVILEQARKQKRKLNTAYIDYKKAFDSVPHSWLLEILSIYKVHPSIIRFLQSSMKQWRTRLQLNTPDSKIETAEIPIRRGIFQGDALSPQWFCLALNPLSRMLNTSKYGYMLKKDKRNLHKVSHLMYVDDIKLYAPTITQLRQLISITETFSKDIGMEFGLDKCKIQENRKEDLPGIEFEDGRLLKILDEGETYKYLGIMQKRQQEHKKVKVQLTQAFQERLRSIVKTKLSGKNTTQAINAYAVPVLTYSFGIIKWTNTELEQLQRKMRTIQRRAGQLHPATAIERQTLPREEGGRGQADLKDLHDKQIQSMRQYFQLKSPRSPLIQAIIQADANYTPLNLCSTEERVLETANEQKLRTWAGKPLHGRHYNDLQQPHVDKKASNSWLAKGTLQPETEGFMLAIQDQVIATRNNQKFIQRKDIESDKCRHCHAASETIQHVMAGCKILAQSDYKHRHDQVAKIVHQKLAANAGFLTEKCPYYKYEPETVHENETHKLYWDRAIITDKTVPHNRPDITLVDKSNKTTYLIDIAVPNTNNIQTTYTTKITKYQDLRHEVRDIWGMEKILIIPLVISATGIVPKTLATNLEILNIDPNTYIEIQKATILNTCHIVRKFLDMAH

SEQ ID NO: 22172 - protein, 994 aa, Dysdera silvatica
MEEGFQCALAEYEGSDAATRPRIPRQPASWKLCKATKILNEHTLPLHLQNHNSLQEIHTAIYCATVAASRANGYEVRNEGRSNRGNKAQPPWQVRLQKRIEELRSSIGRITQYMQGNRSKKLVRKVKMALKRNRIHTRHEEPNKHISEYLDTLKQKLGVYARRLRRYKDYTNRKQQNMQFQANQKAFYRKLRETPANKDKYEAPKPAEIETFWKTLWSNEVQHKSAPWIQQEMEATRGIEEMEYTGITIEELQQVIQRTHNWKAPGIDGIHNFWYKKFTSAHGPLAKELTAIIEDPSKMPEFLCKGITYLLPKDQDTSNPAKYRPITCLNTLYKILTGCISEKISRHSESNNLMTEEQKGCQKGTLGCKEQLTIDSVILEQARKQKRKLNTAYIDYKKAFDSVPHSWLLEILSIYKVHPSIIRFLQSSMKQWRTRLQLNTPDSKIETAEIPIRRGIFQGDALSPQWFCLALNPLSRMLNTSKYGYMLKKDKRNLHKVSHLMYVDDIKLYAPTITQLRQLISITETFSKDIGMEFGLDKCKIQKNSKEDLPGIELEDGRLLKTLDEGETYKYLGIMQKRQQEHKKVKVQLTQAFQERLRSIVKTKLSGKNTTQAINAYAVPVLTYSFGIIKWSNTELEQLQRKMRTIQRRAGQLHPATAIERQTLPREEGGRGQADLKDLHDKQIQSMRQYFQLKSPRSPLIQAIIQADANYTPLNLCSTEERVLETANEQKLRTWAGKPLHGRHYNDLQQPHVDKKASNSWLAKGTLQPETEGFMLAIQDQVIATRNNQKFIQRKDIESDKCRHCHAASETIQHVMAGCKILAQSDYKHRHDQVAKIVHQKLAANAGFLTEKCPYYKYEPETVHENETHKLYWDRAIITDKTVPHNRPDITLVDKSNKTTYLIDIAVPNTNNIQTTYTTKITKYQDLRHEVRDIWGMEKILIIPLVISATGIVPKTLATNLEILNIDPNTYIEIQKATILNTCHIVRKFLDMAH

SEQ ID NO: 22173 - protein, 928 aa, Dysdera silvatica
MYVYANGYEVRNEGRSNRGNKAQPPWQVRLQKRIEELRSSIGRITQYMQGNRGKKLVRKVKMALKRNRIHTRHEEPNKHISEYLDTLKQKLGVYARRLRRYKDYTNKKQQNMQFQANQKAFYRKLRETPANKDKYEAPKPAEIETFWKTLWSNEVQHKSAPWIQQEMEATRGIEEMEYTGITIEELQQVIQRTHNWKAPGIDGIHNFWYKKFTSAHGPLAKELTAIIEDPSKMPEFLCKGITYLLPKDQDTSNPAKYRPITCLNTLYKILTGCISEKISRHSESNNLMTEEQKGCQKGTLGCKEQLTIDSVILEQARKQKRKLNTAYIDYKKAFDSVPHSWLLEILSIYKVHPSIIRFLQSSMKQWRTRLQLNTPDSKIETAEIPIRRGIFQGDALSPQWFCLALNPLSRMLNTSKYGYMLKKDKRNLHKVSHLMYVDDIKLYAPTITQLRQLISITETFSKDIGMEFGLDKCKIQKNSKEDLPGIELEDGRLLKTLDEGETYKYLGIMQKRQQEHKKVKVQLTQAFQERLRSIVKTKLSGKNTTQAINAYAVPVLTYSFGIIKWSNTELEQLQRKMRTIQRRAGQLHPATAIERQTLPREEGGRGQADLKDLHDKQIQSMRQYFQLKSPRSPLIQAIIQADANYTPLNLCSTEERVLETANEQKLRTWAGKPLHGRHYNDLQQPHVDKKASNSWLAKGTLQPETEGFMLAIQDQVIATRNNQKFIQRKDIESDKCRHCHAASETIQHVMAGCKILAQSDYKHRHDQVAKIVHQKLAANAGFLTEKCPYYKYEPETVHENETHKLYWDRAIITDKTVPHNRPDITLVDKSNKTTYLIDIAVPNTNNIQTTYTTKITKYQDLRHEVRDIWGMEKIFIIPLVISATGIVPKTLATNLEILNIDPNTYIEIQKATILNTCHIVRKFLDMAH

SEQ ID NO: 22174 - protein, 1127 aa, Dysdera silvatica
MDYTFISGFSYIYIYIIIILSWTIDMNTYIMRTYYTITKLETDMTNYRPTLHAKFAQQYPHLDISIERITTQRRNIITRNLLAEPILQRLRDEVANDLANTSTSVANPEAPASSAREPLQPSIEEEERRDVEKMEEGFQCALAEYEGSDAATRPRIPRQPASWKLCKATKILNEHTLPLHLQNHNSLQEIHTAIYCAAVAASRANGYEVRNEGRSNRGNKAQPPWQVRLQKRIEELRSSIGRITQYMQGNRGKKLVRKVKMALKRNRIHTRHEEPNKHISEYLDTLKQKLGVYARRLRRYKDYTNKKQQNMQFQANQKAFYRKLRETPANKDKYEAPKPAEIETFWKTLWSNEVQHKSAPWIQQEMEATRGIEEMEYTGITIEELQQVIQRTHNWKAPGIDGIHNFWYKKFTSAHGPLAKELTAIIEDPSKMPEFLCKGITYLLPKDQDTSNPAKYRPITCLNTLYKILTGCISEKISRHSESNNLMTEEQKGCQKGTLGCKEQLTIDSVILEQARKQKRKLNTAYIDYKKAFDSVPHSWLLEILSIYKVHPSIIRFLQSSMKQWRTRLQLNTPDSKIETAEIPIRRGIFQGDALSPQWFCLALNPLSRMLNTSKYGYMLKKDKRNLHKVSHLMYVDDIKLYAPTITQLRQLISITETFSKDIGMEFGLDKCKIQKNSKEDLPGIELEDGRLLKTLDEGETYKYLGIMQKRQQEHKKVKVQLTQAFQERLRSIVKTKLSGKNTTQAINAYAVPVLTYSFGIIKWSNTELEQLQRKMRTIQRRAGQLHPATAIERQTLPREEGGRGQADLKDLHDKQIQSMRQYFQLKSPRSPLIQAIIQADANYTPLNLCSTEERVLETANEQKLRTWAGKPLHGRHYNDLQQPHVDKKASNSWLAKGTLQPETEGFMLAIQDQVIATRNNQKFIQRKDIESDKCRHCHAASETIQHVMAGCKILAQSDYKHRHDQVAKIVHQKLAANAGFLTEKCPYYKYEPETVHENETHKLYWDRAIITDKTVPHNRPDITLVDKSNKTTYLIDIAVPNTNNIQTTYTTKITKYQDLRHEVRDIWGMEKILIIPLVISATGIVPKTLATNLEILNIDPNTYIEIQKATILNTCHIVRKFLDMAH

SEQ ID NO: 22175 - protein, 1186 aa, Dysdera silvatica
MNHNENMNGASVVALLNQNRIRTLSRGVCSKNMQQSLLGGAGSCSGAYNCTATRTNRAHSALQPSIGATTRAERARQRMSWTIDMNTYIMRTYYTITKLETDMTNYRPTLHAKFAQQYPHLDISIERITTQRRNIITRNLLAQPILQRLRDEVANDLVNTSTSVANPEAPAIGAREPLQTSIEEEERRDVEKMEEGFQCALAEYEGSDAAARPRIPRQPEYWKLCAATKILNEHTLPLHLQKHNSLQEIHTAIYCATVAASRVNGYEVRNEDRNNRGSKAQPPWQVRLEKRIEELRSSIGRITQYMQGNRSKKLVRKVKMALKRNRIHTRHEEPNKHISEYLDTLKQKLGVYARRLRRYKDCTNRKQQNMQFQANQKAFYRKLQETSASQDKYEAPKPAVIETFWKTLWSNEVQHKSAPWIQQEMEATRGIEEMEYTGITIEELQQVIQRTHNWKAPGIDGIHNFWYKKFTSAHGPLAKELTAIIEDPSKMPEFLCKGITYLLPKDQDTSNPAKYRPITCLNTLYKILTGCISEKISRHSESNNLMAEEQKGCQKGTLGCKEQLTIDSVILEQARKQKRKLNTAYIDYKKAFDSVPHSWLLEILSIYKVHPSIIRFLQSSMKQWRTRLQLNTPDSKIETAEIPIRRGIFQGDALSPQWFCLALNPLSRMLNTSKYGYMLKKDKRNLHKVSHLMYVDDIKLYAPTITQLRQLISITETFSKDIGMEFGLDKCKIQKNSKEDLPGIELEDGRLLKTLDEGETYKYLGIMQKRQQEHKKVKVQLTQAFQERLRSIVKTKLSGKNTTQAINAYAVPVLTYSFGIIKWSNTELEQLQRKMRTIQRRAGQLHPATAIERQTLPREEGGRGQADLKDLHDKQIQSMRQYFQLKSPRSPLIQAIIQADANYTPLNLCSTEERVLETANEQKLRTWAGKPLHGRHYNDLQQPHVDKKASNSWLAKGTLQPETEGFMLAIQDQVIATRNNQKFIQRKDIESDKCRHCHAASETIQHVMAGCKILAQSDYKHRHDQVAKIVHQKLAANAGFLTEKCPYYKYEPETVHENETHKLYWDRAIITDKTVPHNRPDITLVDKSNKTTYLIDIAVPNTNNIQTTYTTKITKYQDLRHEVRDIWGMEKILIIPLVISATGIVPKTLATNLEILNIDPNTYIEIQKATILNTCHIVRKFLDMAH

SEQ ID NO: 22176 - protein, 901 aa, Dysdera silvatica
MRLQKRIEELRSSIGRITQYMQGNRGKKLVRKVKMALKRNRIHTRHEEPNKHISEYLDTLKQKLGVYARRLRRYKDYTNRKQQNMQFQANQKAFYRKLRETPANKDKYEAPKPAEIETFWKTLWSNEVQHKSAPWIQQEMEATRGIEEMEYTGITIEELQQVIQRTHNWKAPGIDGIHNFWYKKFTSAHGPLAKELTAIIEDPSKMPEFLCKGITYLLPKDQDTSNPAKYRPITCLNTLYKILTGCISEKISRHSESNNLMTEEQKGCQKGTLGCKEQLTIDSVILEQARKQKRKLNTAYIDYKKAFDSVPHSWLLEILSIYKVHPSIIRFLQSSMKQWRTRLQLNTPDSKIETAEIPIRRGIFQGDALSPQWFCLALNPLSRMLNTSKYGYMLKKDKRNLHKVSHLMYVDDIKLYAPTITQLRQLISITETFSKDIGMEFGLDKCKIQKNSKEDLPGIELEDGRLLKTLDEGETYKYLGIMQKRQQEHKKVKVQLTQAFQERLRSIVKTKLSGKNTTQAINAYAVPVLTYSFGIIKWSNTELEQLQRKMRTIQRRAGQLHPATAIERQTLPREEGGRGQADLKDLHDKQIQSMRQYFQLKSPRSPLIQAIIQADANYTPLNLCSTEERVLETANEQKLRTWAGKPLHGRHYNDLQQPHVDKKASNSWLAKGTLQPETEGFMLAIQDQVIATRNNQKFIQRKDIESDKCRHCHAASETIQHVMAGCKILAQSDYKHRHDQVAKIVHQKLAANAGFLTEKCPYYKYEPETVHENETHKLYWDRAIITDKTVPHNRPDITLVDKSNKTTYLIDIAVPNTNNIQTTYTTKITKYQDLRHEVRDIWGMEKILIIPLVISATGIVPKTLATNLEILNIDPNTYIEIQKATILNTCHIVRKFLDMAH

SEQ ID NO: 22177 - protein, 1186 aa, Dysdera silvatica
MNHNENMNGASVVSLLNQNRVRVLSRGASSKNMQQSLLGGVGGCSGASNCTATRTNTAQSALQPSIGATTRAERPRQRMSWTIDMNTYIMRTYYTITKLETDMTNYRPTLHAKFAQQYPHLDISIERITTQRRNIITRNLLAEPILQRLRDEVANDLANTSTSVANPEAPAIGAREPLQTSIEEEERRDVEKMEEGFQCALAEYEGSDAATRPRIPRQPASWKLCKATKILNEHTLPLHLQNHNSLQEIHTAIYCAAVAASRANGYEVRNEGRSNRGNKAQPPWQVRLEKRIEELRSSIGRITQYMQGNRGKKLVRKVKMALKRNRIHTRHEEPNKHISEYLDTLKQKLGVYARRLRRYKDYTNKKQQNMQFQANQKAFYRKLRETPANKDKYEAPKPAEIETFWKTLWSNEVQHKSAPWIQQEMEATRGIEEMEYTGITIEELQQVIQRTHNWKAPGIDGIHNFWYKKFTSAHGPLAKELTAIIEDPSKMPEFLCKGITYLLPKDQDTSNPAKYRPITCLNTLYKILTGCISEKISRHSESNNLMTEEQKGCQKGTLGCKEQLTIDSVILEQARKQKRKLNTAYIDYKKAFDSVPHSWLLEILSIYKVHPSIIRFLQSSMKQWRTRLQLNTPDSKIETAEIPIRRGIFQGDALSPQWFCLALNPLSRMLNTSKYGYMLKKDKRNLHKVSHLMYVDDIKLYAPTITQLRQLISITETFSKDIGMEFGLDKCKIQKNSKEDLPGIELEDGRLLKTLDEGETYKYLGIMQKRQQEHKKVKVQLTQAFQERLRSIVKTKLSGKNTTQAINAYAVPVLTYSFGIIKWSNTELEQLQRKMRTIQRRAGQLHPATAIERQTLPREEGGRGQADLKDLHDKQIQSMRQYFQLKSPRSPLIQAIIQADANYTPLNLCSTEERVLETANEQKLRTWAGKPLHGRHYNDLQQPHVDKKASNSWLAKGTLQPETEGFMLAIQDQVIATRNNQKFIQRKDIESDKCRHCHAASETIQHVMAGCKILAQSDYKHRHDQVAKIVHQKLAANAGFLTEKCPYYKYEPETVHENETHKLYWDRAIITDKTVPHNRPDITLVDKSSKTTYLIDIAVPNTNNIQTTYTTKITKYQDLRHEVRDIWGMEKIFIIPLVISATGIVPKTLATNLEILNIDPNTYIEIQKATILNTCHIVRKFLDMAH

SEQ ID NO: 22178 - protein, 1186 aa, Dysdera silvatica
MNHNENMNGASVVSLLNQNRVRTLSRGASSKNMQQSLLGGVGGCSGASNCTATRTNTAQSALQPSIGATTRAERPRQRMSWTIDMNTYIMRTYYTITKLETDMTNYRPTLHAKFAQQYPHLDISIERITTQRRNIITRNLLAEPILQRLRDEVANDLANTSTSVANPEAPASSAREPLQPSIEEEERRDVEKMEEGFQCALAEYEGSDAATRPRIPRQPASWKLCKATKILNEHTLPLHLQNHNSLQEIHTAIYCAAVAASRANGYEVRNEGRSNRGNKAQPPWQVRLEKRIEELRSSIGRITQYMQGNRGKKLVRKVKMALKRNRIHTRHEEPNKHISEYLDTLKQKLGVYARRLRRYKDYTNKKQQNMQFQANQKAFYRKLRETPANKDKYEAPKPAEIETFWKTLWSNEVQHKSAPWIQQEMEATRGIEEMEYTGITIEELQQVIQRTHNWKAPGIDGIHNFWYKKFTSAHGPLAKELTAIIEDPSKMPEFLCKGITYLLPKDQDTSNPAKYRPITCLNTLYKILTGCISEKISRHSESNNLMTEEQKGCQKGTLGCKEQLTIDSVILEQARKQKRKLNTAYIDYKKAFDSVPHSWLLEILSIYKVHPSIIRFLQSSMKQWRTRLQLNTPDSKIETAEIPIRRGIFQGDALSPQWFCLALNPLSRMLNTSKYGYMLKKDKRNLHKVSHLMYVDDIKLYAPTITQLRQLISITETFSKDIGMEFGLDKCKIQKNSKEDLPGIELEDGRLLKTLDEGETYKYLGIMQKRQQEHKKVKVQLTQAFQERLRSIVKTKLSGKNTTQAINAYAVPVLTYSFGIIKWTNTELEQLQRKMRTIQRRAGQLHPATAIERQTLPREEGGRGQADLKDLHDKQIQSMRQYFQLKSPRSPLIQAIIQADANYTPLNLCSTEERVLETANEQKLRTWAGKPLHGRHYNDLQQPHVDKKASNSWLAKGTLQPETEGFMLAIQDQVIATRNNQKFIQRKDIESDKCRHCHAASETIQHVMAGCKILAQSDYKHRHDQVAKIVHQKLAANAGFLTEKCPYYKYEPETVHENETHKLYWDRAIITDKTVPHNRPDITLVDKSNKTTYLIDIAVPNTNNIQTTYTTKITKYQDLRHEVRDIWGMEKIFIIPLVISATGIVPKTLATNLEILNIDPNTYIEIQKATILNTCHIVRKFLDMAH

SEQ ID NO: 22179 - protein, 1185 aa, Dysdera silvatica
MNHNENMNGASVVTLLNQNRVRVLSRGASSKNMQQSLLGGVGGCSGASNCTATRTNTAQSALQPSIGATTRAERPRQRMSWTIDMNTYIMRTYYTITKLETDMTNYRPTLHAKFAQQYPHLDISIERITTQRRNIITRNLLAEPILQRLTDDVSNNLANTPTSEVNAEAPPIIRKPPQPSMEDEERRDVEKMEEGFQCALAEYEGSDATTRPRIPRQPASWKLCKATKILNEHTLPLHLQNHNSLQEIHTAIYCAAVAASRANGYEVRNEGRSNRGNKAQPPWQVRLEKRIEELRSSIGRITQYMQGNRSKKLVRKVKMALKRNRIHTRHEEPNKHISEYLDTLKQKLGVYARRLRRYKDYTNKKQQNMQFQANQKAFYRKLQETSASQDKYETPKPAEIETFWKTLWSNEVQHKSAPWIQQEMEATRGIEEMEYTGITIEELQQVIQRTHNWKAPGIDGIHNFWYKKFTSAHGPLAKELTAIIEDPSKMPEFLCKGITYLLPKDQDTSNPAKYRPITCLNTLYKILTGCISEKISRHSESNNLMTEEQKGCQKGTLGCKEQLTIDSVILEQARKQKRKLNTAYIDYKKAFDSVPHSWLLEILSIYKVHPSIIRFLQSSMKQWRTRLQLNTPDSKIETAEIPIRRGIFQGDALSPQWFCLALNPLSRMLNTSKYGYMLKKDKRNLHKVSHLMYVDDIKLYAPTITQLRQLISITETFSKDIGMEFGLDKCKIQKNSKEDLPGIELEDGRLLKTLDEGETYKYLGIMQKRQQEHKKVKVQLTQAFQERLRSIVKTKLSGKNTTQAINAYAVPVLTYSFGIIKWSNTELEQLQRKMRTIQRRAGQLHPATAIERQTLPREEGGRGQADLKDLHDKQIQSMRQYFQLKSPRSPLIQAIIQADANYTPLNLCSTEERVLETANEQKLRTWAGKPLHGRHYNDLQQPHVDKKASNSWLAKGTLQPETEGFMLAIQDQVIATRNNQKFIQRKDIESDKCRHCHAASETIQHVMAGCKILAQSDYKHRHDQVAKIVHQKLAANAGFLTEKCPYYKYEPETVHENETHKLYWDRAIITDKTVPHNRPDITLVDKSNKTTYLIDIAVPNTNNIQTTYTTKITKYQDLRHEVRDIWGMEKILIIPLVISATGIVPKTLATNLEILNIDPNTYIEIQKATILNTCHIVRKFLDMAH

SEQ ID NO: 22180 - protein, 1005 aa, Dysdera silvatica
MIYISPCSQIEIKNCIYIYIYIIEGSDAATRPRIPRQPASWKLCKATKILNEHTLPLHLQNHNSLQEIHTAIYCAAVAASRANGYEVRNEGRSNRGNKAQPPWQVRLQKRIEELRSSIGRITQYMQGNRSKKLVRKVKMALKRNRIHTRHEEPNKHISEYLDTLKQKLGVYARRLRRYKDYTNRKQQNMQFQANQKAFYRKLRETPANKDKYEAPKPAEIETFWKTLWSNEVQHKSAPWIQQEMEATRGIEEMEYTGITIEELQQVIQRTHNWKAPGIDGIHNFWYKKFTSAHGPLAKELTAIIEDPSKMPEFLCKGITYLLPKDQDTSNPAKYRPITCLNTLYKILTGCISEKISRHSESNNLMTEEQKGCQKGTLGCKEQLTIDSVILEQARKQKRKLNTAYIDYKKAFDSVPHSWLLEILSIYKVHPSIIRFLQSSMKQWRTRLQLNTPDSKIETAEIPIRRGIFQGDALSPQWFCLALNPLSRMLNTSKYGYMLKKDKRNLHKVSHLMYVDDIKLYAPTITQLRQLISITETFSKDIGMEFGLDKCKIQKNSKEDLPGIELEDGRLLKTLDEGETYKYLGIMQKRQQEHKKVKVQLTQAFQERLRSIVKTKLSGKNTTQAINAYAVPVLTYSFGIIKWSNTELEQLQRKMRTIQRRAGQLHPATAIERQTLPREEGGRGQADLKDLHDKQIQSMRQYFQLKSPRSPLIQAIIQADANYTPLNLCSTEERVLETANEQKLRTWAGKPLHGRHYNDLQQPHVDKKASNSWLAKGTLQPETEGFMLAIQDQVIATRNNQKFIQRKDIESDKCRHCHAASETIQHVMAGCKILAQSDYKHRHDQVAKIVHQKLAANAGFLTEKCPYYKYEPETVHENETHKLYWDRAIITDKTVPHNRPDITLVDKSNKTTYLIDIAVPNTNNIQTTYTTKITKYQDLRHEVRDIWGMEKIFIIPLVISATGIVPKTLATNLGILNIDPNTYIEIQKATILNTCHIVRKFLDMAH

SEQ ID NO: 22181 - protein, 1265 aa, Dysdera silvatica
MNNLFNLFPEFLLLYFIILCNYYNIYIYIYKKFSSPIIYIYITSFDNSQPSDVKKAISDSDDMNHNENMNGASVVALLNQNRVRVLSRGASSKNMQQSLLGGVGGCSGASNCTATRTNTAQSALQPSIGTTTRAERPRQRMSWTIDMNTYIMRTYYTITKLETDMTNYRPTLHAKFAQQYPHLDISIERITTQRRNIITRNLLAEPILQRLRDEVANDLANTSTSVANPEAPASSAREPLQPSIEEEERRDVEKMEEGFQCALAEYEGSDAATRPRIPRQPASWKLCKATKILNEHTLPLHLQNHNSLQEIHTAIYCAAVAASRANGYEVRNEGRSNRGNKAQPPWQVRLEKRIEELRSSIGRITQYMQGNRGKKLVRKVKMALKRNRIHTRHEEPNKHISEYLDTLKQKLGVYARRLRRYKDYTNKKQQNMQFQANQKAFYRKLRETPANKDKYEAPKPAEIETFWKTLWSNEVQHKSAPWIQQEMEATRGIEEMEYTGITIEELQQVIQRTHNWKAPGIDGIHNFWYKKFTSAHGPLAKELTAIIEDPSKMPEFLCKGITYLLPKDQDTSNPAKYRPITCLNTLYKILTGCISEKISRHSESNNLMTEEQKGCQKGTLGCKEQLTIDSVILEQARKQKRKLNTAYIDYKKAFDSVPHSWLLEILSIYKVHPSIIRFLQSSMKQWRTRLQLNTPDSKIETAEIPIRRGIFQGDALSPQWFCLALNPLSRMLNTSKYGYMLKKDKRNLHKVSHLMYVDDIKLYAPTITQLRQLISITETFSKDIGMEFGLDKCKIQKNSKEDLPGIELEDGRLLKTLDEGETYKYLGIMQKRQQEHKKVKVQLTQAFQERLRSIVKTKLSGKNTTQAINAYAVPVLTYSFGIIKWSNTELEQLQRKMRTIQRRAGQLHPATAIERQTLPREEGGRGQADLKDLHDKQIQSMRQYFQLKSPRSPLIQAIIQADANYTPLNLCSTEERVLETANEQKLRTWAGKPLHGRHYNDLQQPHVDKKASNSWLAKGTLQPETEGFMLAIQDQVIATRNNQKFIQRKDIESDKCRHCHAASETIQHVMAGCKILAQSDYKHRHDQVAKIVHQKLAANAGFLTEKCPYYKYEPETVHENETHKLYWDRAIITDKTVPHNRPDITLVDKSNKTTYLIDIAVPNTNNIQTTYTTKITKYQDLRHEVRDIWGMEKILIIPLVISATGIVPKTLATNLEILNIDPNTYSSGQNCGNPLKKDYFRGLMANNTTFFCTNTIKLYIIGKVI

SEQ ID NO: 22182 - protein, 1108 aa, Dysdera silvatica
MSWTIDMNTYIMRTYYTITKLETDMTNYRPTLHAKFAQQYPHLDISIERITTQRRNIITRNLLAEPILQRLRDEVANDLANTSTSVANPEAPASSAREPLQPSIEEEERRDVEKMEEGFQCALAEYEGSDAATRPRIPRQPASWKLCKATKILNEHTLPLHLQNHNSLQEIHTAIYCAAVAASRANGYEVRNEGRSNRGNKAQPPWQVRLQKRIEELRSSIGRITQYMQGNRSKKLVRKVKMALKRNRIHTRHEEPNKHISEYLDTLKQKLGVYARRLRRYKDYTNKKQQNMQFQANQKAFYRKLRETPANKDKYEAPKPAEIETFWKTLWSNEVQHKSAPWIQQEMEATRGIEEMEYTGITIEELQQVIQRTHNWKAPGIDGIHNFWYKKFTSAHGPLAKELTAIIEDPSKMPEFLCKGITYLLPKDQDTSNPAKYRPITCLNTLYKILTGCISEKISRHSESNNLMTEEQKGCQKGTLGCKEQLTIDSVILEQARKQKRKLNTAYIDYKKAFDSVPHSWLLEILSIYKVHPSIIRFLQSSMKQWRTRLQLNTPDSKIETAEIPIRRGIFQGDALSPQWFCLALNPLSRMLNTSKYGYMLKKDKRNLHKVSHLMYVDDIKLYAPTITQLRQLISITETFSKDIGMEFGLDKCKIQKNSKEDLPGIELEDGRLLKTLDEGETYKYLGIMQKRQQEHKKVKVQLTQAFQERLRSIVKTKLSGKNTTQAINAYAVPVLTYSFGIIKWSNTELEQLQRKMRTIQRRAGQLHPATAIERQTLPREEGGRGQADLKDLHDKQIQSMRQYFQLKSPRSPLIQAIIQADANYTPLNLCSTEERVLETANEQKLRTWAGKPLHGRHYNDLQQPHVDKKASNSWLAKGTLQPETEGFMLAIQDQVIATRNNQKFIQRKDIESDKCRHCHAASETIQHVMAGCKILAQSDYKHRHDQVAKIVHQKLAANAGFLTEKCPYYKYEPETVHENETHKLYWDRAIITDKTVPHNRPDITLVDKSNKTTYLIDIAVPNTNNIQTTYTTKITKYQDLRHEVRDIWGMEKILIIPLVISATGIVPKTLATNLEILNIDPNTYIEIQKATILNTCHIVRKFLDMAH

SEQ ID NO: 22183 - protein, 1108 aa, Dysdera silvatica
MSWTIDMNTYIMRTYYTITKLETDMTNYRPTLHAKFAQQYPHLDISIERITTQRRNIITRNLLAEPILQRLRDEVANDLANTSTSVANPEAPAIGAREPLQPSIEEEERRDVEKMEEGFQCALAEYEGSDAATRPRIPRQPASWKLCKATKILNEHTLPLHLQNHNSLQEIHTAIYCAAVAASRANGYEVRNEGRSNRGNKAQPPWQVRLQKRIEELRSSIGRITQYMQGNRSKKLVRKVKMALKRNRIHTRHEEPNKHISEYLDTLKQKLGVYARRLRRYKDYTNRKQQNMQFQANQKAFYRKLRETPANKDKYEAPKPAEIETFWKTLWSNEVQHKSAPWIQQEMEATRGIEEMEYTGITIEELQQVIQRTHNWKAPGIDGIHNFWYKKFTSAHGPLAKELTAIIEDPSKMPEFLCKGITYLLPKDQDTSNPAKYRPITCLNTLYKILTGCISEKISRHSESNNLMTEEQKGCQKGTLGCKEQLTIDSVILEQARKQKRKLNTAYIDYKKAFDSVPHSWLLEILSIYKVHPSIIRFLQSSMKQWRTRLQLNTPDSKIETAEIPIRRGIFQGDALSPQWFCLALNPLSRMLNTSKYGYMLKKDKRNLHKVSHLMYVDDIKLYAPTITQLRQLISITETFSKDIGMEFGLDKCKIQKNSKEDLPGIELEDGRLLKTLDEGETYKYLGIMQKRQQEHKKVKVQLTQAFQERLRSIVKTKLSGKNTTQAINAYAVPVLTYSFGIIKWSNTELEQLQRKMRTIQRRAGQLHPATAIERQTLPREEGGRGQADLKDLHDKQIQSMRQYFQLKSPRSPLIQAIIQADANYTPLNLCSTEERVLETANEQKLRTWAGKPLHGRHYNDLQQPHVDKKASNSWLAKGTLQPETEGFMLAIQDQVIATRNNQKFIQRKDIESDKCRHCHAASETIQHVMAGCKILAQSDYKHRHDQVAKIVHQKLAANAGFLTEKCPYYKYEPETVHENETHKLYWDRAIITDKTVPHNRPDITLVDKSNKTTYLIDIAVPNTNNIQTTYTTKITKYQDLRHEVRDIWGMEKIFIIPLVISATGIVPKTLATNLEILNIDPNTYIEIQKATILNTCHIVRKFLDMAH

SEQ ID NO: 22184 - protein, 1084 aa, Dysdera silvatica
MTNYRPTLHAKFAQQYPHLDISIERITTQRRNIITRNLLAEPILQRLRDEVANDLANTSTSVANPEAPASSAREPLQPSIEEEERRDVEKMEEGFQCALAEYEGSDAATRPRIPRQPASWKLCKATKILNEHTLPLHLQNHNSLQEIHTAIYCAAVAASRANGYEVRNEGRSNRGNKAQPPWQVRLQKRIEELRSSIGRITQYMQGNRSKKLVRKVKMALKRNRIHTRHEEPNKHISEYLDTLKQKLGVYARRLRRYKDYTNRKQQNMQFQANQKAFYRKLRETPANKDKYEAPKPAEIETFWKTLWSNEVQHKSAPWIQQEMEATRGIEEMEYTGITIEELQQVIQRTHNWKAPGIDGIHNFWYKKFTSAHGPLAKELTAIIEDPSKMPEFLCKGITYLLPKDQDTSNPAKYRPITCLNTLYKILTGCISEKISRHSESNNLMTEEQKGCQKGTLGCKEQLTIDSVILEQARKQKRKLNTAYIDYKKAFDSVPHSWLLEILSIYKVHPSIIRFLQSSMKQWRTRLQLNTPDSKIETAEIPIRRGIFQGDALSPQWFCLALNPLSRMLNTSKYGYMLKKDKRNLHKVSHLMYVDDIKLYAPTITQLRQLISITETFSKDIGMEFGLDKCKIQKNSKEDLPGIELEDGRLLKTLDEGETYKYLGIMQKRQQEHKKVKVQLTQAFQERLRSIVKTKLSGKNTTQAINAYAVPVLTYSFGIIKWSNTELEQLQRKMRTIQRRAGQLHPATAIERQTLPREEGGRGQADLKDLHDKQIQSMRQYFQLKSPRSPLIQAIIQADANYTPLNLCSTEERVLETANEQKLRTWAGKPLHGRHYNDLQQPHVDKKASNSWLAKGTLQPETEGFMLAIQDQVIATRNNQKFIQRKDIESDKCRHCHAASETIQHVMAGCKILAQSDYKHRHDQVAKIVHQKLAANAGFLTEKCPYYKYEPETVHENETHKLYWDRAIITDKTVPHNRPDITLVDKSNKTTYLIDIAVPNTNNIQTTYTTKITKYQDLRHEVRDIWGMEKILIIPLVISATGIVPKTLATNLEILNIDPNTYIEIQKATILNTCHIVRKFLDMAH

SEQ ID NO: 22185 - protein, 871 aa, Dysdera silvatica
MQGNRSKKLVRKVKMALKRNRIHTRHEEPNKHISEYLDTLKQKLGVYARRLRRYKDYTNRKQQNMQFQANQKAFYRKLRETPANKDKYEAPKPAEIETFWKTLWSNEVQHKSAPWIQQEMEATRGIEELQQVIQRTHNWKAPGIDGIHNFWYKKFTSAHGPLAKELTAIIEDPSKMPEFLCKGITYLLPKDQDTSNPAKYRPITCLNTLYKILTGCISEKISRHSESNNLMTEEQKGCQKGTLGCKEQLTIDSVILEQARKQKRKLNTAYIDYKKAFDSVPHSWLLEILSIYKVHPSIIRFLQSSMKQWRTRLQLNTPDSKIETAEIPIRRGIFQGDALSPQWFCLALNPLSRMLNTSKYGYMLKKDKRNLHKVSHLMYVDDIKLYAPTITQLRQLISITETFSKDIGMEFGLDKCKIQKNSKEDLPGIELEDGRLLKTLDEGETYKYLGIMQKRQQEHKKVKVQLTQAFQERLRSIVKTKLSGKNTTQAINAYAVPVLTYSFGIIKWSNTELEQLQRKMRTIQRRAGQLHPATAIERQTLPREEGGRGQADLKDLHDKQIQSMRQYFQLKSPRSPLIQAIIQADANYTPLNLCSTEERVLETANEQKLRTWAGKPLHGRHYNDLQQPHVDKKASNSWLAKGTLQPETEGFMLAIQDQVIATRNNQKFIQRKDIESDKCRHCHAASETIQHVMAGCKILAQSDYKHRHDQVAKIVHQKLAANAGFLTEKCPYYKYEPETVHENETHKLYWDRAIITDKTVPHNRPDITLVDKSNKTTYLIDIAVPNTNNIQTTYTTKITKYQDLRHEVRDIWGMEKILIIPLVISATGIVPKTLATNLEILNIDPNTYIEIQKATILNTCHIVRKFLDMAH

SEQ ID NO: 22186 - protein, 881 aa, Dysdera silvatica
MQGNRSKKLVRKVKMALKRNRIHTRHEEPNKHISEYLDTLKQKLGVYARRLRRYKDYTNRKQQNMQFQANQKAFYRKLRETPANKDKYEAPKPAEIETFWKTLWSNEVQHKSAPWIQQEMEATRGIEEMEYTGITIEELQQVIQRTHNWKAPGIDGIHNFWYKKFTSAHGPLAKELTAIIEDPSKMPEFLCKGITYLLPKDQDTSNPAKYRPITCLNTLYKILTGCISEKISRHSESNNLMTEEQKGCQKGTLGCKEQLTIDSVILEQARKQKRKLNTAYIDYKKAFDSVPHSWLLEILSIYKVHPSIIRFLQSSMKQWRTRLQLNTPDSKIETAEIPIRRGIFQGDALSPQWFCLALNPLSRMLNTSKYGYMLKKDKRNLHKVSHLMYVDDIKLYAPTITQLRQLISITETFSKDIGMEFGLDKCKIQKNSKEDLPGIELEDGRLLKTLDEGETYKYLGIMQKRQQEHKKVKVQLTQAFQERLRSIVKTKLSGKNTTQAINAYAVPVLTYSFGIIKWSNTELEQLQRKMRTIQRRAGQLHPATAIERQTLPREEGGRGQADLKDLHDKQIQSMRQYFQLKSPRSPLIQAIIQADANYTPLNLCSTEERVLETANEQKLRTWAGKPLHGRHYNDLQQPHVDKKASNSWLAKGTLQPETEGFMLAIQDQVIATRNNQKFIQRKDIESDKCRHCHAASETIQHVMAGCKILAQSDYKHRHDQVAKIVHQKLAANAGFLTEKCPYYKYEPETVHENETHKLYWDRAIITDKTVPHNRPDITLVDKSNKTTYLIDIAVPNTNNIQTTYTTKITKYQDLRHEVRDIWGMEKIFIIPLVISATGIVPKTLATNLEILNIDPNTYIEIQKATILNTCHIVRKFLDMAH

SEQ ID NO: 22187 - protein, 1179 aa, Dysdera silvatica
MNGESVVALLNQNRIRTLSRGVCSKNMQQSLLGGAGSCSGAYNCTATRTNRAHSALQPSIGATTRAERARQRMSWTIDMNTYIMRTYYTITKLETDMTNYRPTLHAKFAQQYPHQDISIERITTQRRNIITRNLLAEPILQRLRDEVANDLANTSTSAANPEPPISSPREPLQPNIEEESRDVEKMEEGFQCALAEYEGSDAATRPRIPRQPASWKLCKATKILNEHILPLYLQNHNSLQEIHTAIYCAAIAASRANGYEVRNEGRNNRGNKAQPPWQVRLQKRIEELRRSIGRITQYMQGNRGKKLVRKVKMALKRNRTHTRHEEPNKHISEYLDTLKQKLGVYARRLRRYKDCTNKKQQNMQFQANQKAFYRKLRETPANKDKYEAPKPAVIETFWKTLWSNEVQHKSAPWIQQEMEATRGIEEMEYTGITIEELQQVIQRTHNWKASGIDGIHNFWYKKFTSTHGPLAKELTAIIEDPSKMPEFLCKGITYLLPKDQDTSNPAKYRPITCLNTLYKILTGCISEKISRHSESNNLMTEEQKGCQKGTLGCKEQLTIDSVILEQARKQKRKLNTAYIDYKKAFDSVPHSWLLEILSIYKVHPSIIRFLQSSMKQWRTRLQLNTPDSKIETAEIPIRRGIFQGDALSPQWFCLALNPLSRMLNTSKYGYMLKKDKRNLHKVSHLMYVDDIKLYAPTITQLRQLISITETFSKDIGMEFGLDKCKIQENRKEDLPGIEFEDGRLLKILDEGETYKYLGIMQKRQQEHKKVKVQLTQAFQERLRSIVKTKLSGKNTTQAINAYAVPVLTYSFGIIKWSNTELEQLQRKMRTIQRRAGQLHPATAIERQTLPREEGGRGQADLKDLHDKQIQSMRQYFQLKSPRSPLIQAIIQADANYTPLNLCSTEERVLETANEQKLRTWAGKPLHGRHYNDLQHPHVDKKASNSWLAKGTLQPETEGFMLAIQDQVIATRNNQKFIQRKDIESDKCRHCHAASETIQHVMAGCKILAQSDYKHRHDQVAKIVHQKLAANAGFLTEKCPYYKYEPETVHENETHKLYWDRAIITDKTVPHNRPDITLVDKSNKTTYLIDIAVPNTNNIQTTYTTKITKYQDLRHEVRDIWGMEKILIIPLVISATGIVPKTLATNLEILNIDPNTYIEIQKATILNTCHIVRKFLDMAH

SEQ ID NO: 22188 - protein, 994 aa, Dysdera silvatica
MEEGFQCALAEYEGSDAATRPRIPRQPASWKLCKATKILNEHTLPLHLQNHNSLQEIHTAIYCAAVAASRANGYEVRNEGRSNRGNKAQPPWQVRLQKRIEELRSSIGRITQYMQGNRGKKLVRKVKMALKRNRIHTRHEEPNKHISEYLDTLKQKLGVYARRLRRYKDYTNKKQQNMQFQANQKAFYRKLRETPANKDKYEAPKPAEIETFWKTLWSNEVQHKSAPWIQQEMEATRGIEEMEYTGITIEELQQVIQRTHNWKAPGIDGIHNFWYKKFTSAHGPLAKELTAIIEDPSKMPEFLCKGITYLLPKDQDTSNPAKYRPITCLNTLYKILTGCISEKISRHSESNNLMAEEQKGCQKGTLGCKEQLTIDSVILEQARKQKRKLNTAYIDYKKAFDSVPHSWLLEILSIYKVHPSIIRFLQSSMKQWRTRLQLNTPDSKIETAEIPIRRGIFQGDALSPQWFCLALNPLSRMLNTSKYGYMLKKDKRNLHKVSHLMYVDDIKLYAPTITQLRQLISITETFSKDIGMEFGLDKCKIQKNSKEDLPGIELEDGRLLKTLDEGETYKYLGIMQKRQQEHKKVKVQLTQAFQERLRSIVKTKLSGKNTTQAINAYAVPVLTYSFGIIKWSNTELEQLQRKMRTIQRRAGQLHPATAIERQTLPREEGGRGQADLKDLHDKQIQSMRQYFQLKSPRSPLIQAIIQADANYTPLNLCSTEERVLETANEQKLRTWAGKPLHGRHYNDLQQPHVDKKASNSWLAKGTLQPETEGFMLAIQDQVIATRNNQKFIQRKDIESDKCRHCHAASETIQHVMAGCKILAQSDYKHRHDQVAKIVHQKLAANAGFLTEKCPYYKYEPETVHENETHKLYWDRAIITDKTVPHNRPDITLVDKSNKTTYLIDIAVPNTNNIQTTYTTKITKYQDLRHEVRDIWGMEKIFIIPLVISATGIVPKTLATNLEILNIDPNTYIEIQKATILNTCHIVRKFLDMAH

SEQ ID NO: 22189 - protein, 1117 aa, Dysdera silvatica
MDNRYEHLHHAHLLYDYKARNRHDKLQTHTSRQIRTTVPTLHAKFAQQYPHLDISIERITTQRRNIITRNLLAQPILQRLRDEVANDLVNTSTSVANPEAPAIGAREPLQTSIEEEERRDVEKMEEGFQCALAEYEGSNAATRPRIPRQPASWKLCKATKILNEHTLPLHLQKHNSLQEIHTAIYCATVAASRVNGYEVRNEDRNNRGNKAQPPWQVRLQKRIEELRSSIGRITQYMQGNRSKKLVRKVKMALKRNRIHTRHEEPNKHISEYLDTLKQKLGVYARRLRRYKDCTNRKQQNMQFQANQKAFYRKLQETSASQDKYEAPKPAVIETFWKTLWSNEVQHKSAPWIQQEMEATRGIEEMEYTGITIEELQQVIQRTHNWKAPGIDGIHNFWYKKFTSAHGPLAKELTAIIEDPSKMPEFLCKGITYLLPKDQDTSNPAKYRPITCLNTLYKILTGCISEKISRHSESNNLMAEEQKGCQKGTLGCKEQLTIDSVILEQARKQKRKLNTAYIDYKKAFDSVPHSWLLEILSIYKVHPSIIRFLQSSMKQWRTRLQLNTPDSKIESAEIPIRRGIFQGDALSPQWFCLALNPLSRMLNTSKYGYMLKKDKRNLHKVSHLMYVDDIKLYAPTITQLRQLISITETFSKDIGMEFGLDKCKIQKNSKEDLPGIELEDGRLLKTLDEGETYKYLGIMQKRQQEHKKVKVQLTQAFQERLRSIVKTKLSGKNTTQAINAYAVPVLTYSFGIIKWSNTELEQLQRKMRTIQRRAGQLHPATAIERQTLPREEGGRGQADLKDLHDKQIQSMRQYFQLKSPRSPLIQAIIQADANYTPLNLCSTEERVLETANEQKLRTWAGKPLHGRHYNDLQQPHVDKKASNSWLAKGTLQPETEGFMLAIQDQVIATRNNQKFIQRKDIESDKCRHCHAASETIQHVMAGCKILAQSDYKHRHDQVAKIVHQKLAANAGFLTEKCPYYKYEPETVHENETHKLYWDRAIITDKTVPHNRPDITLVDKSNKTTYLIDIAVPNTNNIQTTYTTKITKYQDLRHEVRDIWGMEKILIIPLVISATGIVPKTLATNLEILNIDPNTYIEIQKATILNTCHIVRKFLDMAH

SEQ ID NO: 22190 - protein, 1186 aa, Dysdera silvatica
MNHNENMNGASVVSLLNQNRVRVLSRGASSKNMQQSLLGGVGGCSGASNCTATRTNTAQSALQPSIGATTRAERPRQRMSWTIDMNTYIMRTYYTITKLETDMTNYRPTLHAKFAQQYPHLDISIERITTQRRNIITRNLLAEPILQRLRDEVANDLANTSTSVANPEAPASSAREPLQPSIEEEERRDVEKMEEGFQCALAEYEGSDAATRPRIPRQPASWKLCKATKILNEHTLPLHLQNHNSLQEIHTAIYCAAVAASRANGYEVRNEGRSNRGNKAQPPWQVRLQKRIEELRSSIGRITQYMQGNRSKKLVRKVKMALKRNRIHTRHEEPNKHISEYLDTLKQKLGVYARRLRRYKDCTNKKQQNMQFQANQKAFYRKLRETPANKDKYEAPKPAEIETFWKTLWSNEVQHKSAPWIQQEMEATRGIEEMEYTGITIEELQQVIQRTHNWKAPGIDGIHNFWYKKFTSAHGPLAKELTAIIEDPSKMPEFLCKGITYLLPKDQDTSNPAKYRPITCLNTLYKILTGCISEKISRHSESNNLMTEEQKGCQKGTLGCKEQLTIDSVILEQARKQKRKLNTAYIDYKKAFDSVPHSWLLEILSIYKVHPSIIRFLQSSMKQWRTRLQLNTPDSKIETAEIPIRRGIFQGDALSPQWFCLALNPLSRMLNTSKYGYMLKKDKRNLHKVSHLMYVDDIKLYAPTITQLRQLISITETFSKDIGMEFGLDKCKIQKNSKEDLPGIELEDGRLLKTLDEGETYKYLGIMQKRQQEHKKVKVQLTQAFQERLRSIVKTKLSGKNTTQAINAYAVPVLTYSFGIIKWSNTELEQLQRKMRTIQRRAGQLHPATAIERQTLPREEGGRGQADLKDLHDKQIQSMRQYFQLKSPRSPLIQAIIQADANYTPLNLCSTEERVLETANEQKLRTWAGKPLHGRHYNDLQQPHVDKKASNSWLAKGTLQPETEGFMLAIQDQVIATRNNQKFIQRKDIESDKCRHCHAASETIQHVMAGCKILAQSDYKHRHDQVAKIVHQKLAANAGFLTEKCPYYKYEPETVHENETHKLYWDRAIITDKTVPHNRPDITLVDKSNKTTYLIDIAVPNTNNIQTTYTTKITKYQDLRHEVRDIWGMEKIFIIPLVISATGIVPKTLATNLEILNIDPNTYIEIQKATILNTCHIVRKFLDMAH

SEQ ID NO: 22191 - protein, 1108 aa, Dysdera silvatica
MSWTIDMNTYIMRTYYTITKLETDMTNYRPTLHAKFAQQYPHLDISIERITTQRRNIITRNLLAEPILQRLRDEVANDLANTSTSVANPEAPASSAREPLQPSIEEEERRDVEKMEEGFQCALAEYEGSDAATRPRIPRQPASWKLCKATKILNEHTLPLHLQNHNSLQEIHTAIYCAAVAASRANGYEVRNEGRSNRGNKAQPPWQVRLQKRIEELRSSIGRITQYMQGNRSKKLVRKVKMALKRNRIHTRHEEPNKHISEYLDTLKQKLGVYARRLRRYKDYTNKKQQNMQFQANQKAFYRKLRETPANKDKYEAPKPAEIETFWKTLWSNEVQHKSAPWIQQEMEATRGIEEMEYTGITIEELQQVIQRTHNWKAPGIDGIHNFWYKKFTSAHGPLAKELTAIIEDPSKMPEFLCKGITYLLPKDQDTSNPAKYRPITCLNTLYKILTGCISEKISRHSESNNLMAEEQKGCQKGTLGCKEQLTIDSVILEQARKQKRKLNTAYIDYKKAFDSVPHSWLLEILSIYKVHPSIIRFLQSSMKQWRTRLQLNTPDSKIETAEIPIRRGIFQGDALSPQWFCLALNPLSRMLNTSKYGYMLKKDKRNLHKVSHLMYVDDIKLYAPTITQLRQLISITETFSKDIGMEFGLDKCKIQKNSKEDLPGIELEDGRLLKTLDEGETYKYLGIMQKRQQEHKKVKVQLTQAFQERLRSIVKTKLSGKNTTQAINAYAVPVLTYSFGIIKWSNTELEQLQRKMRTIQRRAGQLHPATAIERQTLPREEGGRGQADLKDLHDKQIQSMRQYFQLKSPRSPLIQAIIQADANYTPLNLCSTEERVLETANEQKLRTWAGKPLHGRHYNDLQQPHVDKKASNSWLAKGTLQPETEGFMLAIQDQVIATRNNQKFIQRKDIESDKCRHCHAASETIQHVMAGCKILAQSDYKHRHDQVAKIVHQKLAANAGFLTEKCPYYKYEPETVHENETHKLYWDRAIITDKTVPHNRPDITLVDKSNKTTYLIDIAVPNTNNIQTTYTTKITKYQDLRHEVRDIWGMEKILIIPLVISATGIVPKTLATNLEILNIDPNTYIEIQKATILNTCHIVRKFLDMAH

SEQ ID NO: 22192 - protein, 1182 aa, Dysdera silvatica
MNHNENMNGASVVSLLNQNRVRVLSRGASSKNMQQSLLGGVGGCSGASNCTATRTNTAQSALQPSIGATTRAERPRQRMSWTIDMNTYIMRTYYTITKLETDMTNYRPTLHAKFAQQYPHLDISIERITTQRRNIITRNLLAEPILQRLRDEVANDLANTSTSVANPEAPASSAREPLQPSIEEEERRDVEKMEEGFQCALAEYEGSDAATRPRIPRQPASWKLCKATKILNEHTLPLHLQNHNSLHEIHTAIYCAAVAASRANGYEARNNRGNKAQPPWQVRLEKRIKELRSSIGRITQYMQGNRGKKLVRKVKMALKRNRIHTRHEEPNKHISEYLDTLKQKLGVYARRLRRYKDCTNKKQQNMQFQANQKAFYRKLRETPANKDKYEAPKPAEIETFWKTLWSNEVQHKSAPWIQQEMEATRGIEEMEYTGITIEELQQVIQRTHNWKAPGIDGIHNFWYKKFTSAHGPLAKELTAIIEDPSKMPEFLCKGITYLLPKDQDTSNPAKYRPITCLNTLYKILTGCISEKISRHSESNNLMAEEQKGCQKGTLGCKEQLTIDSVILEQARKQKRKLNTAYIDYKKAFDSVPHSWLLEILSIYKVHPSIIRFLQSSMKQWRTRLQLNTPDSKIETAEIPIRRGIFQGDALSPQWFCLALNPLSRMLNASKYGYMLKKDKRNLHKVSHLMYVDDIKLYAPTITQLRQLISITETFSKDIGMEFGLDKCKIQKNSKEDLPGIELEDGRLLKTLDEGETYKYLGIMQKRQQEHKKVKVQLTQAFQERLRSIVKTKLSGKNTTQAINAYAVPVLTYSFGIIKWSNTELEQLQRKMRTIQRRAGQLHPATAIERQTLPREEGGRGQADLKDLHDKQIQSMRQYFQLKSPRSPLIQAIIQADANYTPLNLCSTEERVLETANEQKLRTWAGKPLHGRHYNDLQQPHVDKKASNSWLAKGTLQPETEGFMLAIQDQVIATRNNQKFIQRKDIESDKCRHCHAASETIQHVMAGCKILAQSDYKHRHDQVAKIVHQKLAANAGFLTEKCPYYKYEPETVHENETHKLYWDRAIITDKTVPHNRPDITLVDKSNKTTYLIDIAVPNTNNIQTTYTTKITKYQDLRHEVRDIWGMEKILIIPLVISATGIVPKTLATNLEILNIDPNTYIEIQKATILNTCHIVRKFLDMAH

SEQ ID NO: 22193 - protein, 1186 aa, Dysdera silvatica
MNHNENMNGASVVSLLNQNRVRVLSRGASSKNMQQSLLGGVGGCSGASNCTATRTNTAQSALQPSIGATTRAERPRQRMSWTIDMNTYIMRTYYTITKLETDMTNYRPTLHAKFAQQYPHLDISIERITTQRRNIITRNLLAEPILQRLRDEVANDLANTSTSVANPEAPAIGAREPLQTSIEEEERRDVEKMEEGFQCALAEYEGSDAATRPRIPRQPASWKLCKATKILNEHTLPLHLQNHNSLQEIHTAIYCAAVAASRANGYEVRNEGRSNRGNKAQPPWQVRLEKRIEELRSSIGRITQYMQGNRSKKLVRKVKMALKRNRIHTRHEEPNKHISEYLDTLKQKLGVYARRLRRYKDYTNRKQQNMQFQANQKAFYRKLRETPANKDKYEAPKPAEIETFWKTLWSNEVQHKSAPWIQQEMEATRGIEEMEYTGITIEELQQVIQRTHNWKAPGIDGIHNFWYKKFTSAHGPLAKELTAIIEDPSKMPEFLCKGITYLLPKDQDTSNPAKYRPITCLNTLYKILTGCISEKISRHSESNNLMTEEQKGCQKGTLGCKEQLTIDSVILEQARKQKRKLNTAYIDYKKAFDSVPHSWLLEILSIYKVHPSIIRFLQSSMKQWRTRLQLNTPDSKIETAEIPIRRGIFQGDALSPQWFCLALNPLSRMLNTSKYGYMLKKDKRNLHKVSHLMYVDDIKLYAPTITQLRQLISITETFSKDIGMEFGLDKCKIQKNSKEDLPGIELEDGRLLKTLDEGETYKYLGIMQKRQQEHKKVKVQLTQAFQERLRSIVKTKLSGKNTTQAINAYAVPVLTYSFGIIKWSNTELEQLQRKMRTIQRRAGQLHPATAIERQTLPREEGGRGQADLKDLHDKQIQSMRQYFQLKSPRSPLIQAIIQADANYTPLNLCSTEERVLETANEQKLRTWAGKPLHGRHYNDLQQPHVDKKASNSWLAKGTLQPETEGFMLAIQDQVIATRNNQKFIQRKDIESDKCRHCHAASETIQHVMAGCKILAQSDYKHRHDQVAKIVHQKLAANAGFLTEKCPYYKYEPETVHENETHKLYWDRAIITDKTVPHNRPDITLVDKSNKTTYLIDIAVPNTNNIQTTYTTKITKYQDLRHEVRDIWGMEKILIIPLVISATGIVPKTLATNLEILNIDPNTYIEIQKATILNTCHIVRKFLDMAH

SEQ ID NO: 22194 - protein, 1186 aa, Dysdera silvatica
MNHNENMNGASVVSLLNQNRVRVLSRGASSKNMQQSLLGGVGGCSGASNCTATRTNTAQSALQPSIGATTRAERPRQRMSWTIDMNTYIMRTYYTITKLETDMTNYRPTLHAKFAQQYPHLDISIERITTQRRNIITRNLLAEPILQRLRDEVANDLANTSTSVANPEAPAIGAREPLQPSIEEEERRDVEKMEEGFQCALAEYEGSDAATRPRIPRQPASWKLCKATKILNEHTLPLHLQNHNSLQEIHTAIYCAAVAASRANGYEVRNEGRSNRGNKAQPPWQVRLEKRIEELRSSIGRITQYMQGNRGKKLVRKVKMALKRNRIHTRHEEPNKHISEYLDTLKQKLGVYARRLRRYKDCTNKKQQNMQFQANQKAFYRKLRETPANKDKYEAPKPAEIETFWKTLWSNEVQHKSAPWIQQEMEATRGIEEMEYTGITIEELQQVIQRTHNWKAPGIDGIHNFWYKKFTSAHGPLAKELTAIIEDPSKMPEFLCKGITYLLPKDQDTSDPAKYRPITCLNTLYKILTGCISEKISRHSESNNLMAEEQKGCQKGTLGCKEQLTIDSVILEQARKQKRKLNTAYIDYKKAFDSVPHSWLLEILSIYKVHPSIIRFLQSSMKQWRTRLQLNTPDSKIETAEIPIRRGIFQGDALSPQWFCLALNPLSRMLNASKYGYMLKKDKRNLHKVSHLMYVDDIKLYAPTITQLRQLISITETFSKDIGMEFGLDKCKIQKNSKEDLPGIELEDGRLLKTLDEGETYKYLGIMQKRQQEHKKVKVQLTQAFQERLRSIVKTKLSGKNTTQAINAYAVPVLTYSFGIIKWSNTELEQLQRKMRTIQRRAGQLHPATAIERQTLPREEGGRGQADLKDLHDKQIQSMRQYFQLKSPRSPLIQAIIQADANYTPLNLCSTEERVLETANEQKLRTWAGKPLHGRHYNDLQQPHVDKKASNSWLAKGTLQPETEGFMLAIQDQVIATRNNQKFIQRKDIESDKCRHCHAASETIQHVMAGCKILAQSDYKHRHDQVAKIVHQKLAANAGFLTEKCPYYKYEPETVHENETHKLYWDRAIITDKTVPHNRPDITLVDKSNKTTYLIDIAVPNTNNIQTTYTTKITKYQDLRHEVRDIWGMEKILIIPLVISATGIVPKTLATNLEILNIDPNTYIEIQKATILNTCHIVRKFLDMAH

SEQ ID NO: 22195 - protein, 1186 aa, Dysdera silvatica
MNHNENMNGASVVALLNQNRVRVLSRGASSKNMQQSLLGGVGGCSGASNCTATRTNTAQSALQPSIGATTRAERPRQRMSWTIDMNTYIMRTYYTITKLETDMTNYRPTLHAKFAQQYPHLDISIERITTQRRNIITRNLLAEPILQRLRDEVANDLANTSTSVANPEAPASSAREPLQPSIEEEERRDVEKMEEGFQCALAEYEGSDAATRPRIPRQPASWKLCKATKILNEHTLPLHLQNHNSLQEIHTAIYCAAVAASRANGYEVRNEGRSNRGNKAQPPWQVRLEKRIEELRSSIGRITQYMQGNRGKKLVRKVKMALKRNRIHTRHEEPNKHISEYLDTLKQKLGVYARRLRRYKDYTNKKQQNMQFQANQKAFYRKLRETPANKDKYEAPKPAEIETFWKTLWSNEVQHKSAPWIQQEMEATRGIEEMEYTGITIEELQQVIQRTHNWKAPGIDGIHNFWYKKFTSAHGPLAKELTAIIEDPSKMPEFLCKGITYLLPKDQDTSNPAKYRPITCLNTLYKILTGCISEKISRHSESNNLMTEEQKGCQKGTLGCKEQLTIDSVILEQARKQKRKLNTAYIDYKKAFDSVPHSWLLEILSIYKVHPSIIRFLQSSMKQWRTRLQLNTPDSKIETAEIPIRRGIFQGDALSPQWFCLALNPLSRMLNTSKYGYMLKKDKRNLHKVSHLMYVDDIKLYAPTITQLRQLISITETFSKDIGMEFGLDKCKIQKNSKEDLPGIELKDRRLLKTLDEGETYKYLGIMQKRQQEHKKVKVQLTQAFQERLRSIVKTKLSGKNTTQAINAYAVPVLTYSFGIIKWSNTELEQLQRKMRTIQRRAGQLHPATAIERQTLPREEGGRGQADLKDLHDKQIQSMRQYFQLKSPRSPLIQAIIQADANYTPLNLCNTEERVLEAANEQKLRSWAGKPLHGRHYNDLQQPHVDKKASNSWLAKGTLQPETEGFMLAIQDQVIATRNNQKFIQRKDIESDKCRHCHAASETIQHVMAGCKILAQSDYKHRHDQVAKIVHQKLAANAGFLTEKCPYYKYEPETVHENETHKLYWDRAIITDKTVPHNRPDITLVDKSSKTTYLIDIAVPNTNNIQTTYTTKITKYQDLRHEVRDIWSMEKIFIIPLVISATGIVPKTLATNLGILNIDPNTYIEIQKATILNTCHIVRKFLDMEH

SEQ ID NO: 22196 - protein, 1166 aa, Dysdera silvatica
MNHNENMNGESVVALLNQNRIRTLSRGVCSKNMQQSLLGGAGSCSGAYNCTATRTNRAHSALQPSIGATTRAERARQRMSWTIDMNTYIMRTYYTITKLISIERITTQRRNIITRNLLAQPILQRLRDEVANDLVNTSTSVANPEVPEAPAIGAREPLQTSIEEEERRDVEKMEEGFQCALAEYEGSDAAARPRIPRQPEYWKLCAATKILNEHTLPLHLQKHNSLQEIHTAIYCATVAASRVNGYEVRNEDRNNRGSKAQPPWQVRLEKRIEELRSSIGRITQYMQGNRSKKLVRKVKMALKRNRIHTRHEEPNKHISEYLDTLKQKLGVYARRLRRYKDCTNRKQQNMQFQANQKAFYRKLQETSASQDKYEAPKPAVIETFWKTLWSNEVQHKSAPWIQQEMEATRGIEEMEYTGITIEELQQVIQRTHNWKAPGIDGIHNFWYKKFTSAHGPLAKELTAIIEDPSKMPEFLCKGITYLLPKDQDTSNPAKYRPITCLNTLYKILTGCISEKISRHSESNNLMAEEQKGCQKGTLGCKEQLTIDSVILEQARKQKRKLNTAYIDYKKAFDSVPHSWLLEILSIYKVHPSIIRFLQSSMKQWRTRLQLNTPDSKIESAEIPIRRGIFQGDALSPQWFCLALNPLSRMLNTSKYGYMLKKDKRNLHKVSHLMYVDDIKLYAPTITQLRQLISITETFSKDIGMEFGLDKCKIQKNSKEDLPGIELEDGRLLKTLDEGETYKYLGIMQKRQQEHKKVKVQLTQAFQERLRSIVKTKLSGKNTTQAINAYAVPVLTYSFGIIKWSNTELEQLQRKMRTIQRRAGQLHPATAIERQTLPREEGGRGQADLKDLHDKQIQSMRQYFQLKSPRSPLIQAIIQADANYTPLNLCSTEERVLETANEQKLRTWAGKPLHGRHYNDLQQPHVDKKASNSWLAKGTLQPETEGFMLAIQDQVIATRNNQKFIQRKDIESDKCRHCHAASETIQHVMAGCKILAQSDYKHRHDQVAKIVHQKLAANAGFLTEKCPYYKYEPETVHENETHKLYWDRAIITDKTVPHNRPDITLVDKSNKTTYLIDIAVPNTNNIQTTYTTKITKYQDLRHEVRDIWGMEKILIIPLVISATGIVPKTLATNLEILNIDPNTYIEIQKATILNTCHIVRKFLDMAH

SEQ ID NO: 22197 - protein, 1189 aa, Dysdera silvatica
MKNRICSQLMPQQHPECHWSTTRYPGNMIWAISDSDDMNHNENMNGASVVALLNQNRVRVLSRGASSKNMQQSLLGGVGGCSGASNCTATRTNTAQSALQPSIGATTRAERPRQRMSWTIDMNTYIMRTYYTITKLETDMTNYRPTLHAKFAQQYPHLDISIERITVQRRNIITRNLLAEPILQRLRDEVANDLANTPTSEVNAEAPTNSAREPLQPSIEEEERRDVEKMEGFQCALAEYEGSDAATRPRIPRQPASWKLCKATKILNEHTLPLHLQNHNSLQEIHTAIYCAAVAASRANGYEVRNEGRSNRGNKAQPPWQVRLQKRIEELRSSIGRITQYMQGNRGKKLVRKVKMALKRNRIHTRHEEPNKHISEYLDTLKQKLGVYARRLRRYKDYTNKKQQNMQFQANQKAFYRKLRETSASQDKYETPKPAEIETFWKTLWSNEVQHKSAPWIQQEMEATRGIEEMEYTGITIEELQQVIQRTHNWKAPGIDGIHNFWYKKFTSAHGPLAKELTAIIEDPSKMPEFLCKGITYLLPKDQDTSNPAKYRPITCLNTLYKILTGCISEKISRHSESNNLMAEEQKGCQKGTLGCKEQLTIDSVILEQARKQKRKLNTAYIDYKKAFDSVPHSWLLEILSIYKVHPSIIRFLQSSMKQWRTRLQLNTPDSKIETAEIPIRRGIFQGDALSPQWFCLALNPLSRMLNTSKYGYMLKKDKRNLHKVSHLMYVDDIKLYAPTITQLRQLISITETFSKDIGMEFGLDKCKIQKNSKEDLPGIELEDGRLLKTLDEGETYKYLGIMQKRQQEHKKVKVQLTQAFQERLRSIVKTKLSGKNTTQAINAYAVPVLTYSFGIIKWSNTELEQLQRKMRTIQRRAGQLHPATAIERQTLPREEGGRGQADLKDLHDKQIQSMRQYFQLKSPRSPLIQAIIQADANYTPLNLCSTEERVLETANEQKLRTWAGKPLHGRHYNDLQQPHVDKKASNSWLAKGTLQPETEGFMLAIQDQVIATRNNQKFIQRKDIESDKCRHCHAASETIQHVMAGCKILAQSDYKHRHDQVAKIVHQKLAANAGFLTEKCPYYKYEPETVHENETHKLYWDRAIITDKTVPHNRPDITLVDKSNKTTYLIDIAVPNTNNIQTTYTTKITKYQDLRHEVRDIWGMEKIFEEKDLQRPKSGKFEIHCYNK

SEQ ID NO: 22198 - protein, 1126 aa, Dysdera silvatica
MYLNPSSCSSIPERPRQRMSWTIDMNTYIMRTYYTITKLETDMTNYRPTLHAKFAQQYPHLDISIERITTQRRNIITRNLLAEPILQRLRDEVANDLANTSTSVANPEAPASSAREPLQPSIEEEERRDVEKMEEGFQCALAEYEGSDAATRPRIPRQPASWKLCKATKILNEHTLPLHLQNHNSLQEIHTAIYCAAVAASRANGYEVRNEGRSNRGNKAQPPWQVRLQKRIEELRSSIGRITQYMQGNRSKKLVRKVKMALKRNRIHTRHEEPNKHISEYLDTLKQKLGVYARRLRRYKDYTNKKQQNMQFQANQKAFYRKLRETPANKDKYEAPKPAEIETFWKTLWSNEVQHKSAPWIQQEMEATRGIEEMEYTGITIEELQQVIQRTHNWKAPGIDGIHNFWYKKFTSAHGPLAKELTAIIEDPSKMPEFLCKGITYLLPKDQDTSNPAKYRPITCLNTLYKILTGCISEKISRHSESNNLMTEEQKGCQKGTLGCKEQLTIDSVILEQARKQKRKLNTAYIDYKKAFDSVPHSWLLEILSIYKVHPSIIRFLQSSMKQWRTRLQLNTPDSKIETAEIPIRRGIFQGDALSPQWFCLALNPLSRMLNTSKYGYMLKKDKRNLHKVSHLMYVDDIKLYAPTITQLRQLISITETFSKDIGMEFGLDKCKIQKNSKEDLPGIELEDGRLLKTLDEGETYKYLGIMQKRQQEHKKVKVQLTQAFQERLRSIVKTKLSGKNTTQAINAYAVPVLTYSFGIIKWSNTELEQLQRKMRTIQRRAGQLHPATAIERQTLPREEGGRGQADLKDLHDKQIQSMRQYFQLKSPRSPLIQAIIQADANYTPLNLCSTEERVLETANEQKLRTWAGKPLHGRHYNDLQQPHVDKKASNSWLAKGTLQPETEGFMLAIQDQVIATRNNQKFIQRKDIESDKCRHCHAASETIQHVMAGCKILAQSDYKHRHDQVAKIVHQKLAANAGFLTEKCPYYKYEPETVHENETHKLYWDRAIITDKTVPHNRPDITLVDKSNKTTYLIDIAVPNTNNIQTTYTTKITKYQDLRHEVRDIWGMEKIFIIPLVISATGIVPKTLATNLEILNIDPNTYIEIQKATILNTCHIVRKFLDMAH

SEQ ID NO: 22199 - protein, 1189 aa, Dysdera silvatica
MNHNENMNGESVVALLNQNRIRTLSRGVCSKNMQQSLLGGAGSCSGAYNCTATRTNRAHSALQPSIGATTRAERARQRMSWTIDMNTYIMRTYYTITKLETDMTNYRPTLHAKFAQQYPHLDISIERITTQRRNIITRNLLAEPILQRLRDEVANDLANTSTSVANPEVPEAPAIGAREPLQTSIEQEERRDVEKMEEGFQCALAEYEGSDAATRPRIPRQPASWKLCKATKILNEHTLPLHLQKHNSLQEIHTAIYCATVAASRVNGYEVRNEDRNNRGSKTQPPWQVRLEKRIEELRRSIGRITQYMQGNRGKKLVRKVKMALKRNRIHTRHEEPNKHISEYLDTLKQKLGVYARRLRRYKDCTNRKQQNMQFQANQKAFYRKLQETSASQDKYEAPKPAVIETFWKTLWSNEVQHKSAPWIQQEMEATRGIEEMEYTGITIEELQQVIQRTHNWKAPGIDGIHNFWYKKFTSAHGPLAKELTAIIEDPSKMPEFLCKGITYLLPKDQDTSNPAKYRPITCLNTLYKILTGCISEKISRHSESNNLMTEEQKGCQKGTLGCKEQLTIDSVILEQARKQKRKLNTAYIDYKKAFDSVPHSWLLEILSIYKVHPSIIRFLQSSMKQWRTRLQLNTPDSKIESAEIPIRRGIFQGDALSPQWFCLALNPLSRMLNTSKYGYMLKKDKRNLHKVSHLMYVDDIKLYAPTITQLRQLISITETFSKDIGMEFGLDKCKIQKNSKEDLPGIELEDGRLLKTLDEGETYKYLGIMQKRQQEHKKVKVQLTQAFQERLRSIVKTKLSGKNTTQAINAYAVPVLTYSFGIIKWSNTELEQLQRKMRTIQRRAGQLHPATAIERQTLPREEGGRGQADLKDLHDKQIQSMRQYFQLKSPRSPLIQAIIQADANYTPLNLCSTEERVLETANEQKLRTWAGKPLHGRHYNDLQQPHVDKKASNSWLAKGTLQPETEGFMLAIQDQVIATRNNQKFIQRKDIESDKCRHCHAASETIQHVTAGCKILAQSDYKHRHDQVAKIVHQKLAANAGFLTEKCPYYKYEPETVHENETHKLYWDRAIITDKTVPHNRPDITLVDKSNKTTYLIDIAVPNTNNIQTTYTTKITKYQDLRHEVRDIWGMEKIFIIPLVISATGIVPKTLATNLEILNIDPNTYIEIQKATILNTCHIVRKFLDMAH

SEQ ID NO: 22200 - protein, 1186 aa, Dysdera silvatica
MNHNENMNGASVVSLLNQNRVRTLSRGASSKNMQQSLLGGVGGCSGASNCTATRTNTAQSALQPSIGATTRAERPRQRMSWTIDMNTYIMRTYYTITKLETDMTNYRPTLHAKFAQQYPHLDISIERITTQRRNIITRNLLAEPILQRLRDEVANDLANTSTSVANPEAPAIGAREPLQPSIEQEERRDVEKMEEGFQCALAEYEGSDAATRPRIPRQPASWKLCKATKILNEHTLPLHLQNHNSLQEIHTAIYCAAVAASRANGYEVRNEGRSNRGNKAQPPWQVRLEKRIEELRSSIGRITQYMQGNRGKKLVRKVKMALKRNRIHTRHEEPNKHISEYLDTLKQKLGVYARRLRRYKDYTNKKQQNMQFQANQKAFYRKLRETPANKDKYEAPKPAEIETFWKTLWSNEVQHKSAPWIQQEMEATRGIEEMEYTGITIEELQQVIQRTHNWKAPGIDGIHNFWYKKFTSAHGPLAKELTAIIEDPSKMPEFLCKGITYLLPKDQDTSNPAKYRPITCLNTLYKILTGCISEKISRHSESNNLMTEEQKGCQKGTLGCKEQLTIDSVILEQARKQKRKLNTAYIDYKKAFDSVPHSWLLEILSIYKVHPSIIRFLQSSMKQWRTRLQLNTPDSKIETAEIPIRRGIFQGDALSPQWFCLALNPLSRMLNTSKYGYMLKKDKRNLHKVSHLMYVDDIKLYAPTITQLRQLISITETFSKDIGMEFGLDKCKIQKNSKEDLPGIELEDGRLLKTLDEGETYKYLGIMQKRQQEHKKVKVQLTQAFQERLRSIVKTKLSGKNTTQAINAYAVPVLTYSFGIIKWSNTELEQLQRKMRTIQRRAGQLHPATAIERQTLPREEGGRGQADLKDLHDKQIQSMRQYFQLKSPRSPLIQAIIQADANYTPLNLCSTEERVLETANEQKLRTWAGKPLHGRHYNDLQQPHVDKKASNSWLAKGTLQPETEGFMLAIQDQVIATRNNQKFIQRKDIESDKCRHCHAASETIQHVMAGCKILAQSDYKHRHDQVAKIVHQKLAANAGFLTEKCPYYKYEPETVHENETHKLYWDRAIITDKTVPHNRPDITLVDKSNKTTYLIDIAVPNTNNIQTTYTTKITKYQDLRHEVRDIWGMEKILIIPLVISATGIVPKTLATNLEILNIDPNTYIEIQKATILNTCHIVRKFLDMAH

SEQ ID NO: 22201 - protein, 1186 aa, Dysdera silvatica
MNHNENMNGASVVSLLNQNRVRVLSRGASSKNMQQSLLGGVGGCSGASNCTATRTNTAQSALQPSIGATTRAERPRQRMSWTIDMNTYIMRTYYTITKLETDMTNYRPTLHAKFAQQYPHLDISIERITTQRRNIITRNLLAEPILQRLRDEVANDLANTSTSVANPEAPASSAREPLQPSIEEEERRDVEKMEEGFQCALAEYEGSDAATRPRIPRQPASWKLCKATKILNEHTLPLHLQNHNSLQEIHTAIYCAAVAASRANGYEVRNEGRSNRGNKAQPPWQVRLEKRIEELRSSIGRITQYMQGNRSKKLVRKVKMALKRNRIHTRHEEPNKHISEYLDTLKQKLGVYARRLRRYKDYTNKKQQNMQFQANQKAFYRKLRETPANKDKYEAPKPAEIETFWKTLWSNEVQHKSAPWIQQEMEATRGIEEMEYTGITIEELQQVIQRTHNWKAPGIDGIHNFWYKKFTSAHGPLAKELTAIIEDPSKMPEFLCKGITYLLPKDQDTSNPAKYRPITCLNTLYKILTGCISEKISRHSESNNLMTEEQKGCQKGTLGCKEQLTIDSVILEQARKQKRKLNTAYIDYKKAFDSVPHSWLLEILSIYKVHPSIIRFLQSSMKQWRTRLQLNTPDSKIETAEIPIRRGIFQGDALSPQWFCLALNPLSRMLNTSKYGYMLKKDKRNLHKVSHLMYVDDIKLYAPTITQLRQLISITETFSKDIGMEFGLDKCKIQKNSKEDLPGIELEDGRLLKTLDEGETYKYLGIMQKRQQEHKKVKVQLTQAFQERLRSIVKTKLSGKNTTQAINAYAVPVLTYSFGIIKWSNTELEQLQRKMRTIQRRAGQLHPATAIERQTLPREEGGRGQADLKDLHDKQIQSMRQYFQLKSPRSPLIQAIIQADANYTPLNLCSTEERVLETANEQKLRTWAGKPLHGRHYNDLQQPHVDKKASNSWLAKGTLQPETEGFMLAIQDQVIATRNNQKFIQRKDIESDKCRHCHAASETIQHVMAGCKILAQSDYKHRHDQVAKIVHQKLAANAGFLTEKCPYYKYEPETVHENETHKLYWDRAIITDKTVPHNRPDITLVDKSNKTTYLIDIAVPNTNNIQTTYTTKITKYQDLRHEVRDIWGMEKIFIIPLVISATGIVPKTLATNLEILNIDPNTYIEIQKATILNTCHIVRKFLDMAH

SEQ ID NO: 22202 - protein, 1180 aa, Dysdera silvatica
MNGASVVALLNQNRVRALSRGASSKNMQQSLLGGVGGCSGASNCTATRTNTAQSALQPSIGATTRAERPRQRMSWTIDMNTYIMRTYYTITKLETDMTNYRPTLHAKFAQQYPHLDISIERITTQRRNIITRNLLAEPILQRLRDEVANDLANTSTSVANPEAPASSAREPLQPSIEEEERRDVEKMEEGFQCALAEYEGSDAATRPRIPRQPASWKLCKATKILNEHTLPLHLQNHNSLQEIHTAIYCAAVAASRANGYEVRNEGRSNRGNKAQPPWQVRLEKRIEELRSSIGRITQYMQGNRSKKLVRKVKMALKRNRIHTRHEEPNKHISEYLDTLKQKLGVYARRLRRYKDYTNRKQQNMQFQANQKAFYRKLRETPANKDKYEAPKPAEIETFWKTLWSNEVQHKSAPWIQQEMEATRGIEEMEYTGITIEELQQVIQRTHNWKAPGIDGIHNFWYKKFTSAHGPLAKELTAIIEDPSKMPEFLCKGITYLLPKDQDTSNPAKYRPITCLNTLYKILTGCISEKISRHSESNNLMTEEQKGCQKGTLGCKEQLTIDSVILEQARKQKRKLNTAYIDYKKAFDSVPHSWLLEILSIYKVHPSIIRFLQSSMKQWRTRLQLNTPDSKIETAEIPIRRGIFQGDALSPQWFCLALNPLSRMLNTSKYGYMLKKDKRNLHKVSHLMYVDDIKLYAPTITQLRQLISITETFSKDIGMEFGLDKCKIQKNSKEDLPGIELEDGRLLKTLDEGETYKYLGIMQKRQQEHKKVKVQLTQAFQERLRSIVKTKLSGKNTTQAINAYAVPVLTYSFGIIKWSNTELEQLQRKMRTIQRRAGQLHPATAIERQTLPREEGGRGQADLKDLHDKQIQSMRQYFQLKSPRSPLIQAIIQADANYTPLNLCSTEERVLETANEQKLRTWAGKPLHGRHYNDLQQPHVDKKASNSWLAKGTLQPETEGFMLAIQDQVIATRNNQKFIQRKDIESDKCRHCHAASETIQHVMAGCKILAQSDYKHRHDQVAKIVHQKLAANAGFLTEKCPYYKYEPETVHENETHKLYWDRAIITDKTVPHNRPDITLVDKSNKTTYLIDIAVPNTNNIQTTYTTKITKYQDLRHEVRDIWGMEKIFIIPLVISATGIVPKTLATNLEILNIDPNTYIEIQKATILNTCHIVRKFLDMAH

SEQ ID NO: 22203 - protein, 1186 aa, Dysdera silvatica
MNHNENMNGASVVSLLNQNRVRVLSRGASSKNMQQSLLGGVGGCSGASNCTATRTNTAQSALQPSIGATTRAERPRQRMSWTIDMNTYIMRTYYTITKLETDMTNYRPTLHAKFAQQYPHLDISIERITTQRRNIITRNLLAAPILQRLRDEVANDLVNTSTSAANPEPPVSSPREPLKPSIEEEERRDVEKMEEGFQCALAEYEGSDAATRPRIPRQPASWKLCKATKILNEHTLPLHLQNHNSLHEIHTAIYCAAIAATRAHGDAVRNAGRNNRGNKAQPPWQVRLEKRIKELRSSIGRITQYMQGNRGKKLVRKVKMALKRNRIHTRHEEPNKHISEYLDTLKQKLGVYARRLRRYKDCTNKKQQNMQFQANQKAFYRKLRETPANKDKYEAPKPAEIETFWKTLWSNEVQHKSAPWIQQEMEATRGIEEMEYTGITIEELQQVIQRTHNWKAPGIDGIHNFWYKKFTSAHGPLAKELTAIIEDPSKMPEFLCKGITYLLPKDQDTSNPAKYRPITCLNTLYKILTGCISEKISRHSESNNLMTEEQKGCQKGTLGCKEQLTIDSVILEQARKQKRKLNTAYIDYKKAFDSVPHSWLLEILSIYKVHPSIIRFLQSSMKQWRTRLQLNTPDSKIETAEIPIRRGIFQGDALSPQWFCLALNPLSRMLNASKYGYMLKKDKRNLHKVSHLMYVDDIKLYAPTITQLRQLISITETFSKDIGMEFGLDKCKIQKNSKEDLPGIELEDGRLLKTLDEGETYKYLGIMQKRQQEHKKVKVQLTQAFQERLRSIVKTKLSGKNTTQAINAYAVPVLTYSFGIIKWSNTELEQLQPKMRTIQRRAAELHPATVIERKTLPREEGGRGQADLKDLHDKQIQSMRQYFQLKSPRSPLIQAIIQADANYTPLNLCSTEERVLETANEQKLRTWAGKPLHGRHYNDLQQPHVDKKASNSWLAKGTLQPETEGFMLAIQDQVIATRNNQKFIQRKDIESDKCRHCHAASETIQHVTAGCKILAQSDYKHRHDQVAKIVHQKLAANAGFLTEKCPYYKYEPETVHENETHKLYWDRAIITDKTVPHNRPDITLVDKSNKTTYLIDIAVPNTNNIQTTYTTKITKYQDLRHEVRDIWGMEKIFIIPLVISATGIVPKTLATNLEILNIDPNTYIEIQKATILNTCHIVRKFLDMAH

SEQ ID NO: 22204 - protein, 994 aa, Dysdera silvatica
MEEGFQCALAEYEGSDAATRPRIPRQLASWKLCKATKILNEHTLPLHLQNHNSLQEIHTAIYCAAIAASRANGYEVRNEGRNNRGNKAQPPWQVRLEKRIEELRRSIGRITQYMQGNRGKKLVRKVKMALKRNRMHTRHEEPNKHISEYLDTLKQKLGVYARRLRRYKDCTNKKQQNMQFQANQKAFYRKLQETPANKDKYEAPKPAVIETFWKTLWSNEVQHKSAPWIQQEMEATRGIEEMEYTGITIEELQQVIQRTHNWKAPGIDGIHNFWYKKFTSAHGPLAKELTAIIEDPSKMPEFLCKGITYLLPKDQDTSNPAKYRPITCLNTLYKILTGCISEKISRHSESNNLMTEEQKGCQKGTLGCKEQLTIDSVILEQARKQKRKLNTAYIDYKKAFDSVPHSWLLEILSIYKVHPSIIRFLQSSMKQWRTRLQLNTPDSKIETAEIPIRRGIFQGDALSPQWFCLALNPLSRMLNTSKYGYMLKKDKRNLHKVSHLMYVDDIKLYAPTITQLRQLISITETFSKDIGMEFGLDKCKIQKNSKEDLPGIELEDGRLLKTLDEGETYKYLGIMQKRQQEHKKVKVQLTQAFQERLRSIVKTKLSGKNTTQAINAYAVPVLTYSFGIIKWSNTELEQLQRKMRTIQRRAGQLHPATAIERQTLPREEGGRGQADLKDLHDKQIQSMRQYFQLKSPRSPLIQAIIQADANYTPLNLCSTEERVLETANEQKLRTWAGKPLHGRHYNDLQQPHVDKKASNSWLAKGTLQPETEGFMLAIQDQVIATRNNQKFIQRKDIESDKCRHCHAASETIQHVMAGCKILAQSDYKHRHDQVAKIVHQKLAANAGFLTEKCPYYKYEPETVHENETHKLYWDRAIITDKTVPHNRPDITLVDKSNKTTYLIDIAVPNTNNIQTTYTTKITKYQDLRHEVRDIWGMEKIFIIPLVISATGIVPKTLATNLEILNIDPNTYIEIQKATILNTCHIVRKFLDMAH

SEQ ID NO: 22205 - protein, 881 aa, Dysdera silvatica
MQGNRGKKLVRKVKMALKRNRMHTRHEEPNKHISEYLDTLKQKLGVYARRLRRYKDCTNKKQQNMQFQANQKAFYRKLQETPANKDKYEAPKPAVIETFWKTLWSNEVQHKSAPWIQQEMEATRGIEEMEYTGITIEELQQVIQRTHNWKAPGIDGIHNFWYKKFTSAHGPLAKELTAIIEDPSEMPEFLCKGITYLLPKDQDKSNPAKYRPITCLNTLYKILTGCISEKISRHSESNNLMTEEQKGCQKGTLGCKEQLTIDSVILEQARKQKRKLNTAYIDYKKAFDSVPHSWLLEILSIYKVHPSIIRFLQSSMKQWRTRLQLNTPDSKIKTAEIPIRRGIFQGDALSPQWFCLALNPLSRMLNTSKYGYMLKKDKRNLHKVSHLMYVDDIKLYAPTITQLRQLISITETFSKDIGMEFGLDKCKIQKNSKEDLPGIELEDGRLLKTLDEGETYKYLGIMQKRQQEHKKVKVQLTQAFQERLRSIVKTKLSGKNTTQAINAYAVPVLTYSFGIIKWSNTELEQLQRKMRTIQRRAGQLHPATAIERQTLPREEGGRGQADLKDLHDKQIQSMRQYFQLKSPRSPLIQAIIQADANYTPLNLCSTEERVLETANEQKLRTWAGKPLHGRHYNDLQQPHVDKKASNSWLAKGTLQPETEGFMLAIQDQVIATRNNQKFIQRKDIESDKCRHCHAASETIQHVMAGCKILAQSDYKHRHDQVAKIVHQKLAANAGFLTEKCPYYKYEPETVHENETHKLYWDRAIITDKTVPHNRPDITLVDKSNKTTYLIDIAVPNTNNIQTTYTTKITKYQDLRHEVRDIWGMEKILIIPLVISATGIVPKTLATNLEILNIDPNTYIEIQKATILNTCHIVRKFLDMAH

SEQ ID NO: 22206 - protein, 1084 aa, Dysdera silvatica
MTNYRPTLYVKFAQQYPHLDISIERITTQRRNIITRNLLAEPILQRLRDEVANDLANTSTSVANPEAPAIGAREPLQPSIEEEERRDVEKMEEGFQCALADYEGSDAATRPRIPRQPASWKLCKATKILNEHTLPLHLQKHNSLQEIHTAIYCAAVAASRANGYEVRNEGRSNRGNKAQPPWQVRLQKRIEELRSSIGRITQYMQGNRSKKLVRKVKMALKRNRIHTRHEEPNKHISEYLDTLKQKLGVYARRLRRYKDYTNRKQQNMQFQANQKAFCRKLQETSASQDKYEAPKPAEIETFWKTLWSNEVQHKSAPWIQQEMEATRGIEEMEYTGITIEELQQVIQRTHNWKAPGIDGIHNFWYKKFTSAHGPLAKELTAIIEDPSKMPEFLCKGITYLLPKDQDTSNPAKYRPITCLNTLYKILTGCISEKISRHSESNNLMTEEQKGCQKGTLGCKEQLTIDSVILEQARKQKRKLNTAYIDYKKAFDSVPHSWLLEILSIYKVHPSIIRFLQSSMKQWRTRLQLNTPDSKIETAEIPIRRGIFQGDALSPQWFCLALNPLSRMLNTSKYGYMLKKDKRNLHKVSHLMYVDDIKLYAPTITQLRQLISITETFSKDIGMEFGLDKCKIQKNSKEDLPGIELEDGRLLKTLDEGETYKYLGIMQKRQQEHKKVKVQLTQAFQERLRSIVKTKLSGKNTTQAINAYAVPVLTYSFGIIKWSNTELEQLQRKMRTIQRRAGQLHPATAIERQTLPREEGGRGQADLKDLHDKQIQSMRQYFQLKSPRSPLIQAIIQADANYTPLNLCSTEERVLETANEQKLRTWAGKPLHGRHYNDLQQPHVDKKASNSWLAKGTLQPETEGFMLAIQDQVIATRNNQKFIQRKDIESDKCRHCHAASETIQHVMAGCKILAQSDYKHRHDQVAKIVHQKLAANAGFLTEKCPYYKYEPETVHENETHKLYWDRAIITDKTVPHNRPDITLVDKSNKTTYLIDIAVPNTNNIQTTYTTKITKYQDLRHEVQDIWGMEKIFVIPLVISASGIVPKTLTANLEILNIDPNTYIEIQKSTILITSHVVRKFLSMAH

SEQ ID NO: 22207 - protein, 1186 aa, Dysdera silvatica
MNHNENMNGASVVSLLNQNRVRTLSRGASSKNMQQSLLGGVGGCSGASNCTATRTNTAQSALQPSIGATTRAERPRQRMSWTIDMNTYIMRTYYTITKLETDMTNYRPTLHAKFAQQYPHLDISIERITTQRRNIITRNLLAEPILQRLRDEVANDLANTSTSVANPEAPASSAREPLQPSIEEEERRDVEKMEEGFQCALAEYEGSDAATRPRIPRQPASWKLCKATKILNEHTLPLHLQNHNSLQEIHTAIYCAAVAASRANGYEVRNEGRSNRGNKAQPPWQVRLEKRIEELRSSIGRITQYMQGNRGKKLVRKVKMALKRNRIHTRHEEPNKHISEYLDTLKQKLGVYARRLRRYKDYTNRKQQNKKFQTNQKAFYRKLRETPANQDKYEAPKPAEIETFWKTLWSNEVQHKSAPWIQQEMEATRGIEEMEYTGITIEELQQVIQRTHNWKAPGIDGIHNFWYKKFTSAHGPLAKELTAIIEDPSKMPEFLCKGITYLLPKDHNTSNPAKYRPITCLNTLYKILTGCISEKISRHSESNNLMTEEQKGCQKGTLGCKEQLTIDSVILEQARKQKRKLNTAYIDYKKAFDSVPHSWLLEILSIYKVHPSIIRFLQSSMKQWRTRLQLNTPDSKIETAEIPIRRGIFQGDALSPQWFCLALNPLSRMLNTSKYGYMLKKDKRNLHKVSHLMYVDDIKLYAPTITQLRQLISITETFSKDIGMEFGLDKCKIQKNSKEDLPGIELEDGRLLKTLDEGETYKYLGIMQKRQQEHKKVKVQLTQAFQERLRSIVKTKLSGKNTTQAINAYAVPVLTYSFGIIKWSNTELEQLQRKMRTIQRRAGQLHPATAIERQTLPREEGGRGQADLKDLHDKQIQSMRQYFQLKSPRSPLIQAIIQADANYTPLNLCSTEERVLETANEQKLRTWAGKPLHGRHYNDLQQPHVDKKASNSWLAKGTLQPETEGFMLAIQDQVIATRNNQKFIQRKDIESDKCRHCHAASETIQHVMAGCKILAQSDYKHRHDQVAKIVHQKLAANAGFLTEKCPYYKYEPETVHENETHKLYWDRAIITDKTVPHNRPDITLVDKSNKTTYLIDIAVPNTNNIQTTYTTKITKYQDLRHEVRDIWGMEKIFIIPLVISATGIVPKTLATNLEILNIDPNTYIEIQKATILNTCHIVRKFLDMAH

SEQ ID NO: 22208 - protein, 1184 aa, Dysdera silvatica
MNHNENMNGASVVSLLNQNRVRTLSRGASSKNMQQSLLGGVGGCSGASNCTATRTNTAQSALQPSIGATTRAERPRQRMSWTIDMNTYIMRTYYTITKLETDMTNYRPTLHAKFAQQYPHLDISIERITTQRRNIITRNLLAEPILQRLRDEVANDLANTSTSVANPEAPASSAREPLQPSIEERRDVEKMEEGFQCALAEYEGSDAATRPRIPRQPASWKLCKATKILNEHTLPLHLQNHNSLQEIHTAIYCAAVAASRANGYEVRNEGRSNRGNKAQPPWQVRLEKRIEELRSSIGRITQYMQGNRGKKLVRKVKMALKRNRIHTRHEEPNKHISEYLDTLKQKLGVYARRLRRYKDYTNKKQQNMQFQANQKAFYRKLRETPANKDKYEAPKPAEIETFWKTLWSNEVQHKSAPWIQQEMEATRGIEEMEYTGITIEELQQVIQRTHNWKAPGIDGIHNFWYKKFTSAHGPLAKELTAIIEDPSKMPEFLCKGITYLLPKDQDTSNPAKYRPITCLNTLYKILTGCISEKISRHSESNNLMTEEQKGCQKGTLGCKEQLTIDSVILEQARKQKRKLNTAYIDYKKAFDSVPHSWLLEILSIYKVHPSIIRFLQSSMKQWRTRLQLNTPDSKIETAEIPIRRGIFQGDALSPQWFCLALNPLSRMLNTSKYGYMLKKDKRNLHKVSHLMYVDDIKLYAPTITQLRQLISITETFSKDIGMEFGLDKCKIQKNSKEDLPGIELEDGRLLKTLDEGETYKYLGIMQKRQQEHKKVKVQLTQAFQERLRSIVKTKLSGKNTTQAINAYAVPVLTYSFGIIKWSNTELEQLQRKMRTIQRRAGQLHPATAIERQTLPREEGGRGQADLKDLHDKQIQSMRQYFQLKSPRSPLIQAIIQADANYTPLNLCSTEERVLETANEQKLRTWAGKPLHGRHYNDLQQPHVDKKASNSWLAKGTLQPETEGFMLAIQDQVIATRNNQKFIQRKDIESDKCRHCHAASETIQHVMAGCKILAQSDYKHRHDQVAKIVHQKLAANAGFLTEKCPYYKYEPETVHENETHKLYWDRAIITDKTVPHNRPDITLVDKSNKTTYLIDIAVPNTNNIQTTYTTKITKYQDLRHEVRDIWGMEKILIIPLVISATGIVPKTLATNLEILNIDPNTYIEIQKATILNTCHIVRKFLDMAH

SEQ ID NO: 22209 - protein, 1186 aa, Dysdera silvatica
MNHNENMNGASVVSLLNQNRVRVLSRGASSKNMQQSLLGGVGGCSGASNCTATRTNTAQSALQPSIGATTRAERPRQRMSWTIDMNTYIMRTYYTITKLETDMTNYRPTLHAKFAQQYPHLDISIERITTQRRNIITRNLLAEPILQRLRDEVANDLANTSTSVANPEAPAIGAREPLQPSIEEEERRDVEKMEEGFQCALAEYEGSDAATRPRIPRQPASWKLCKATKILNEHTLPLHLQNHNSLQEIHTAIYCAAVAASRANGYEVRNEGRSNRGNKAQPPWQVRLEKRIEELRSSIGRITQYMQGNRSKKLVRKVKMALKRNRIHTRHEEPNKHISEYLDTLKQKLGVYARRLRRYKDYTNKKQQNMQFQANQKAFYRKLRETPANKDKYEAPKPAEIETFWKTLWSNEVQHKSAPWIQQEMEATRGIEEMEYTGITIEELQQVIQRTHNWKAPGIDGIHNFWYKKFTSAHGPLAKELTAIIEDPSKMPEFLCKGITYLLPKDQDTSNPAKYRPITCLNTLYKILTGCISEKISRHSESNNLMTEEQKGCQKGTLGCKEQLTIDSVILEQARKQKRKLNTAYIDYKKAFDSVPHSWLLEILSIYKVHPSIIRFLQSSMKQWRTRLQLNTPDSKIETAEIPIRRGIFQGDALSPQWFCLALNPLSRMLNTSKYGYMLKKDKRNLHKVSHLMYVDDIKLYAPTITQLRQLISITETFSKDIGMEFGLDKCKIQKNSKEDLPGIELEDGRLLKTLDEGETYKYLGIMQKRQQEHKKVKVQLTQAFQERLRSIVKTKLSGKNTTQAINAYAVPVLTYSFGIIKWSNTELEQLQRKMRTIQRRAGQLHPATAIERQTLPREEGGRGQADLKDLHDKQIQSMRQYFQLKSPRSPLIQAIIQADANYTPLNLCSTEERVLETANEQKLRTWAGKPLHGRHYNDLQQPHVDKKASNSWLAKGTLQPETEGFMLAIQDQVIATRNNQKFIQRKDIESDKCRHCHAASETIQHVMAGCKILAQSDYKHRHDQVAKIVHQKLAANAGFLTEKCPYYKYEPETVHENETHKLYWDRAIITDKTVPHNRPDITLVDKSNKTTYLIDIAVPNTNNIQTTYTTKITKYQDLRHEVRDIWGMEKILIIPLVISATGIVPKTLATNLEILNIDPNTYIEIQKATILNTCHIVRKFLDMAH

SEQ ID NO: 22210 - protein, 1186 aa, Dysdera silvatica
MNHNENMNGASVVSLLNQNRVRVLSRGARSKNMQQSLLGGVGGCSGASNCTATRTNTAQSALQPSIGATTRAERPRQRMSWTIDMNTYIMRTYYTITKLETDMTNYRPTLHAKFAQQYPHLDISIERITTQRRNIITRNLLAEPILQRLRDEVANDLANTSTSVANPEAPASSAREPLQPSIEEEERRDVEKMEEGFQCALAEYEGSDAATRPRIPRQPASWKLCAATKILNEHTLPLHLQNHNSLHEIHTAIYCAAVAASRANGYEVRNEGRSNRGNKAQPPWQVRLEKRIEELRSSIGRITQYMQGNRGKKLVRKVKMALKRNRIHTRHEEPNKHISEYLDTLKQKLGVYARRLRRYKDCTNKKQQNMQFQANQKAFYRKLRETPANKDKYEAPKPAEIETFWKTLWSNEVQHKSAPWIQQEMEATRGIEEMEYTGITIEELQQVIQRTHNWKAPGIDGIHNFWYKKFTSAHGPLAKELTAIIEDPSKMPEFLCKGITYLLPKDQDTSDPAKYRPITCLNTLYKILTGCISEKISRHSESNNLMTEEQKGCQKGTLGCKEQLTIDSVILEQARKQKRKLNTAYIDYKKAFDSVPHSWLLEILSIYKVHPSIIRFLQSSMKQWRTRLQLNTPDSKIETAEIPIRRGIFQGDALSPQWFCLALNPLSRMLNASKYGYMLKKDKRNLHKVSHLMYVDDIKLYAPTITQLRQLISITETFSKDIGMEFGLDKCKIQKNSKEDLPGIELEDGRLLKTLDEGETYKYLGIMQKRQQEHKKVKVQLTQAFQERLRSIVKTKLSGKNTTQAINAYAVPVLTYSFGIIKWTNTELEQLQRKMRTIQRRAGQLHPATAIERQTLPREEGGRGQADLKDLHDKQIQSMRQYFQLKSPRSPLIQAIIQADANYTPLNLCSTEERVLETANEQKLRTWAGKPLHGRHYNDLQQPHVDKKASNSWLAKGTLQPETEGFMLAIQDQVIATRNNQKFIQRKDIESDKCRHCHAASETIQHVMAGCKILAQSDYKHRHDQVAKIVHQKLAANAGFLTEKCPYYKYEPETVHENETHKLYWDRAIITDKTVPHNRPDITLVDKSNKTTYLIDIAVPNTNNIQTTYTTKITKYQDLRHEVRDIWGMEKIFIIPLVISATGIVPKTLATNLEILNIDPNTYIEIQKATILNTCHIVRKFLDMAH

SEQ ID NO: 22211 - protein, 1186 aa, Dysdera silvatica
MNHNENMNGASVVSLLNQNRVRTLSRGASSKNMQQSLLGGVGGCSGASNCTATRTNTAQSALQPSIGATTRAERPRQRMSWTIDMNTYIMRTYYTITKLETDMTNYRPTLHAKFAQQYPHLDISIERITTQRRNIITRNLLAEPILQRLRDEVANDLANTSTSVANPEAPAIGAREPLQPSIEEEERRDVEKMEEGFQCALAEYEGSDAATRPRIPRQPASWKLCAATKILNEHTLPLHLQKHNSLHEIHTAIYCAAIAASRANGYEVRNEGRNNRGNKAQPPWQVRLEKRIEELRSSIGRITQYMQGNRGKKLVRKVKMALKRNRIHTRHEEPNKHISEYLDTLKQKLGVYARRLRRYKDCTNKKQQNMQFQANQKAFYRKLRETPANKDKYEAPKPAEIETFWKTLWSNEVQHKSAPWIQQEMEATRGIEEMEYTGITIEELQQVIQRTHNWKAPGIDGIHNFWYKKFTSAHGPLAKELTAIIEDPSKMPEFLCKGITYLLPKDQDTSNPAKYRPITCLNTLYKILTGCISEKISRHSESNNLMTEEQKGCQKGTLGCKEQLTIDSVILEQARKQKRKLNTAYIDYKKAFDSVPHSWLLEILSIYKVHPSIIRFLQSSMKQWRTRLQLNTPDSKIETAEIPIRRGIFQGDALSPQWFCLALNPLSRMLNTSKYGYMLKKDKRNLHKVSHLMYVDDIKLYAPTITQLRQLISITETFSKDIGMEFGLDKCKIQKNSKEDLPGIELEDGRLLKTLDEGETYKYLGIMQKRQQEHKKVKVQLTQAFQERLRSIVKTKLSGKNTTQAINAYAVPVLTYSFGIIKWSNTELEQLQRKMRTIQRRAGQLHPATAIERQTLPREEGGRGQADLKDLHDKQIQSMRQYFQLKSPRSPLIQAIIQADANYTPLNLCSTEERVLETANEQKLRTWAGKPLHGRHYNDLQQPHVDKKASNSWLAKGTLQPETEGFMLAIQDQVIATRNNQKFIQRKDIESDKCRHCHAASETIQHVMAGCKILAQSDYKHRHDQVAKIVHQKLAANAGFLTEKCPYYKYEPETVHENETHKLYWDRAIITDKTVPHNRPDITLVDKSNKTTYLIDIAVPNTNNIQTTYTTKITKYQDLRHEVRDIWGMEKILIIPLVISATGIVPKTLATNLETLNIDPNTYIEIQKATILNTCHIVRKFLDMAH

SEQ ID NO: 22212 - protein, 881 aa, Dysdera silvatica
MQGNRSKKLVRKVKMALKRNRIHTRHEEPNKHISEYLDTLKQKLGVYARRLRRYKDCTNRKQQNMQFQANQKAFYRKLQETSASQDKYEAPKPAVIETFWKTLWSNEVQHKSAPWIQQEMEATRGIEEMEYTGITIEELQQVIQRTHNWKAPGIDGIHNFWYKKFTSAHGPLAKELTAIIEDPSKMPEFLCKGITYLLPKDQDTSNPAKYRPITCLNTLYKILTGCISEKISRHSESNNLMAEEQKGCQKGTLGCKEQLTIDSVILEQARKQKRKLNTAYIDYKKAFDSVPHSWLLEILSIYKVHPSIIRFLQSSMKQWRTRLQLNTPDSKIESAEIPIRRGIFQGDALSPQWFCLALNPLSRMLNTSKYGYMLKKDKRNLHKVSHLMYVDDIKLYAPTITQLRQLISITETFSKDIGMEFGLDKCKIQKNSKEDLPGIELEDGRLLKTLDEGETYKYLGIMQKRQQEHKKVKVQLTQAFQERLRSIVKTKLSGKNTTQAINAYAVPVLTYSFGIIKWSNTELEQLQRKMRTIQRRAGQLHPATAIERQTLPREEGGRGQADLKDLHDKQIQSMRQYFQLKSPRSPLIQAIIQADANYTPLNLCSTEERVLETANEQKLRTWAGKPLHGRHYNDLQQPHVDKKASNSWLAKGTLQPETEGFMLAIQDQVIATRNNQKFIQRKDIESDKCRHCHAASETIQHVMAGCKILAQSDYKHRHDQVAKIVHQKLAANAGFLTEKCPYYKYEPETVHENETHKLYWDRAIITDKTVPHNRPDITLVDKSNKTTYLIDIAVPNTNNIQTTYTTKITKYQDLRHEVRDIWGMEKILIIPLVISATGIVPKTLATNLEILNIDPNTYIEIQKATILNTCHIVRKFLDMAH

SEQ ID NO: 22213 - protein, 863 aa, Dysdera silvatica
MQGNRGKKLVRKVKMALKRNRMHTRHEEPNKHISEYLDTLKQKLGVYARRLRRYKDCTNKKQQNMQFQANQKAFYRKLRETPANKDKYEAPKPAVIETFWKTLWSNEVQHKSAPWIQQEMEATRGIEEMEYTGITIEELQQVIQRTHNWKAPGIDGIHNFWYKKFTSAHGPLAKELTAIIEDPSKMPEFLCKGITYLLPKDQDTSNPAKYRPITCLNTLYKILTGCISEKISRHSESNNLMTEEQKGCQKGTLGCKEQLTIDSVILEQARKQKRKLNTAYIDYKKAFDSVPHSWLLEILSIYKVHPSIIRFLQSSMKQWRTRLQLNTPDSKIKTAEIPIRRGIFQGDALSPQWFCLALNPLSRMLNTSKYGYMLKKDKRNLHKVSHLMYVDDIKLYAPTITQLRQLISITETFSKDIGMEFGLDKCKIQKNSKEDLPGIELEDGRLLKTLDEGETYKYLGIMQKRQQEHKKVKVQLTQAFQERLRSIVKTKLSGKNTTQAINAYAVPVLTYSFGIIKWSNTELEQLQRKMRTIQRRAGQLHPATAIERQTLPREEGGRGQADLKDLHDKQIQSMRQYFQLKSPRSPLIQAIIQADANYTPLNLCSTEERVLETANEQKLRTWAGKPLHGRHYNDLQQPHVDKKASNSWLAKGTLQPETEGFMLAIQDQVIATRNNQKFIQRKDIESDKCRHCHAASETIQHVMAGCKILAQSDYKHRHDQVAKIVHQKLAANAGFLTEKCPYYKYEPETVHENETHKLYWDRAIITDKTVPHNRPDITLVDKSNKTTYLIDIAVPNTNNIQTTYTTKITKYQDLRHEVRDIWGMEKILIIPLVISATGIVPKTLATNLEILNMESVFHMYVFT

SEQ ID NO: 22214 - protein, 1011 aa, Dysdera silvatica
MLACRQQATNPVLMAQWYFYSLLILSNKNTIGPLKTGYVAEKTGFVAKLCKATKILNEHTLPLHLQKHNSLQEIHTAIYCAAVAASRANGYEVRNEGRSNRGNKAQPPWQVRLEKRIEELRSSIGRITQYMQGNRSKKLVRKVKMALKRNRIHTRHEEPNKHISEYLDTLKQKLGVYARRLRRYKDYTNRKQQNMQFQANQKAFYRKLRETPANKDKYEAPKPAEIETFWKTLWSNEVQHKSAPWIQQEMEATRGIEEMEYTGITIEELQQVIQRTHNWKAPGIDGIHNFWYKKFTSAHGPLAKELTAIIEDPSKMPEFLCKGITYLLPKDQDTSNPAKYRPITCLNTLYKILTGCISEKISRHSESNNLMTEEQKGCQKGTLGCKEQLTIDSVILEQARKQKRKLNTAYIDYKKAFDSVPHSWLLEILSIYKVHPSIIRFLQSSMKQWRTRLQLNTPDSKIETAEIPIRRGIFQGDALSPQWFCLALNPLSRMLNTSKYGYMLKKDKRNLHKVSHLMYVDDIKLYAPTITQLRQLISITETFSKDIGMEFGLDKCKIQKNSKEDLPGIELEDGRLLKTLDEGETYKYLGIMQKRQQEHKKVKVQLTQAFQERLRSIVKTKLSGKNTTQAINAYAVPVLTYSFGIIKWSNTELEQLQRKMRTIQRRAGQLHPATAIERQTLPREEGGRGQADLKDLHDKQIQSMRQYFQLKSPRSPLIQAIIQADANYTPLNLCSTEERVLETANEQKLRTWAGKPLHGRHYNDLQQPHVDKKASNAWLAKGTLQPETEGFMLAIQDQVIATRNNQKFIQRKDIESDKCRHCHAASETIQHVMAGCKILAQSDYKHRHDQVAKIVHQKLAANAGFLTEKCPYYKYEPETVHENETHKLYWDRAIITDKTVPHNRPDITLVDKSSKTTYLIDIAVPNTNNIQTTYTTKITKYQDLRHEVRDIWGMEKIFIIPLVISATGIVPKTLATNLGILNIDPNTYIEIQKATILNTCHIVRKFLDMAH

SEQ ID NO: 22215 - protein, 947 aa, Dysdera silvatica
MEEGFQCALAEYEGSDAAARPRIPRQPEYWKLCAATKILNEHTLPLHLQKHNSLQEIHTAIYCAAVAASRANGYEVRNEDRNNRGSKAQPPWQVRLEKRIEELRSSIGRITQYMQGNRSKKLVRKVKMALKRNRIHTRHEEPNKHISEYLDTLKQKLGVYARRLRRYKDCTNKKQQNMQFQANQKAFYRKLQETPANKDKYEAPKPAVIETFWKTLWSNEVQHKSAPWIQQEMEATRGIEEMEYTGITIEELQQVIQRTHNWKAPGIDGIHNFWYKKFTSAHGPLAKELTAIIEDPSKMPEFLCKGITYLLPKDQDTSDPAKYRPITCLNTLYKILTGCISEEISRHSESNNLMAEEQKGCQKGTLGCKEQLTIDSVILEQARKQKRKLNTAYIDYKKAFDSVPHSWLLEILSIYKVHPSIIRFLQSSMKQWRTRLQLNTPDSKIESAEIPIRRGIFQGDALSPQWFCLALNPLSRMLNTSKYGYMLKKDKRNLHKVSHLMYVDDIKLYAPTITQLRQLISITETFSKDIGMEFGLDKCKIQKNSKEDLPGIELEDGRLLKTLDEGETYKYLGIMQKRQQEHKKVKVQLTQAFQERLRSIVKTKLSGKNTTQAINAYAVPVLTYSFGIIKWSNTELEQLQRKMRTIQRRAGQLHPATAIERQTLPREEGGRGQADLKDLHDKQIQSMRQYFQLKSPRSPLIQAIIQADANYTPLNLCSTEERVLETANEQKLRTWAGKPLHGRHYNDLQQPHVDKKASNSWLAKGTLQPETEGFMLAIQDQVIATRNNQKFIQRKDIESDKCRHCHAASETIQHVTAGCKILAQSDYKHRHDQVAKIVHQKLAANAGFLTEKCPYYKYEPETVHENETHKLYWDRAIITDKTVPHNRPDITLVDKSNKTTYLIDIAVPNTNNIQTTYTTKITKYQDLRHEVRDIWGMEKILIIPLVI

SEQ ID NO: 22216 - protein, 1084 aa, Dysdera silvatica
MTNYRPTLHAKFAQQYPHLDISIERITTQRRNIITRNLLAEPILQRLRDEVANDLANTSTSVANPEAPAIGAREPLQPSIEEEERRDVEKMEEGFQCALAEYEGSDAATRPRIPRQPASWKLCKATKILNEHTLPLHLQNHNSLQEIHTAIYCAAVAASRANGYEVRNEGRSNRGNKAQPPWQVRLQKRIEELRSSIGRITQYMQGNRSKKLVRKVKMALKRNRIHTRHEEPNKHISEYLDTLKQKLGVYARRLRRYKDYTNKKQQNMQFQANQKAFYRKLRETPANKDKYEAPKPAEIETFWKTLWSNEVQHKSAPWIQQEMEATRGIEEMEYTGITIEELQQVIQRTHNWKAPGIDGIHNFWYKKFTSAHGPLAKELTAIIEDPSKMPEFLCKGITYLLPKDQDTSNPAKYRPITCLNTLYKILTGCISEKISRHSESNNLMTEEQKGCQKGTLGCKEQLTIDSVILEQARKQKRKLNTAYIDYKKAFDSVPHSWLLEILSIYKVHPSIIRFLQSSMKQWRTRLQLNTPDSKIETAEIPIRRGIFQGDALSPQWFCLALNPLSRMLNTSKYGYMLKKDKRNLHKVSHLMYVDDIKLYAPTITQLRQLISITETFSKDIGMEFGLDKCKIQKNSKEDLPGIELEDGRLLKTLDEGETYKYLGIMQKRQQEHKKVKVQLTQAFQERLRSIVKTKLSGKNTTQAINAYAVPVLTYSFGIIKWSNTELEQLQRKMRTIQRRAGQLHPATAIERQTLPREEGGRGQADLKDLHDKQIQSMRQYFQLKSPRSPLIQAIIQADANYTPLNLCSTEERVLETANEQKLRTWAGKPLHGRHYNDLQQPHVDKKASNSWLAKGTLQPETEGFMLAIQDQVIATRNNQKFIQRKDIESDKCRHCHAASETIQHVMAGCKILAQSDYKHRHDQVAKIVHQKLAANAGFLTEKCPYYKYEPETVHENETHKLYWDRAIITDKTVPHNRPDITLVDKSNKTTYLIDIAVPNTNNIQTTYTTKITKYQDLRHEVRDIWGMEKILIIPLVISATGIVPKTLATNLEILNIDPNTYIEIQKATILNTCHIVRKFLDMAH

SEQ ID NO: 22217 - protein, 1186 aa, Dysdera silvatica
MNHNENMNGASVVALLNQNRVRVLSRGASSKNMQQSLLGGVGGCSGASNCTATRTNTAQSALQPSIGATTRAERPRQRMSWTIDMNTYIMRTYYTITKLETDMTNYRPTLHAKFAQQYPHLDISIERITTQRRNIITRNLLAEPILQRLRDEVANDLANTSTSVANPEAPASSAREPLQPSIEEEERRDVEKMEEGFQCALAEYEGSDAATRPRIPRQPASWKLCKATKILNEHTLPLHLQNHNSLQEIHTAIYCAAVAASRANGYEVRNEGRSNRGNKAQPPWQVRLEKRIEELRSSIGRITQYMQGNRGKKLVRKVKMALKRNRIHTRHEEPNKHISEYLDTLKQKLGVYARRLRRYKDYTNKKQQNMQFQANQKAFYRKLRETPANKDKYEAPKPAEIETFWKTLWSNEVQHKSAPWIQQEMEATRGIEEMEYTGITIEELQQVIQRTHNWKAPGIDGIHNFWYKKFTSAHGPLAKELTAIIEDPSKMPEFLCKGITYLLPKDQDTSNPAKYRPITCLNTLYKILTGCISEKISRHSESNNLMTEEQKGCQKGTLGCKEQLTIDSVILEQARKQKRKLNTAYIDYKKAFDSVPHSWLLEILSIYKVHPSIIRFLQSSMKQWRTRLQLNTPDSKIETAEIPIRRGIFQGDALSPQWFCLALNPLSRMLNTSKYGYMLKKDKRNLHKVSHLMYVDDIKLYAPTITQLRQLISITETFSKDIGMEFGLDKCKIQKNSKEDLPGIELEDGRLLKTLDEGETYKYLGIMQKRQQEHKKVKVQLTQAFQERLRSIVKTKLSGKNTTQAINAYAVPVLTYSFGIIKWSNTELEQLQRKMRTIQRRAGQLHPATAIERQTLPREEGGRGQADLKDLHDKQIQSMRQYFQLKSPRSPLIQAIIQADANYTPLNLCSTEERVLETANEQKLRTWAGKPLHGRHYNDLQQPHVDKKASNSWLAKGTLQPETEGFMLAIQDQVIATRNNQKFIQRKDIESDKCRHCHAASETIQHVMAGCKILAQSDYKHRHDQVAKIVHQKLAANAGFLTEKCPYYKYEPETVHENETHKLYWDRAIITDKTVPHNRPDITLVDKSNKTTYLIDIAVPNTNNIQTTYTTKITKYQDLRHEVRDIWGMEKILIIPLVISATGIVPKTLATNLEILNIDPNTYIEIQKATILNTCHIVRKFLDMAH

SEQ ID NO: 22218 - protein, 1170 aa, Dysdera silvatica
MFPGIYIYIYIFEKIVRKYCSPQQVGGCSGASNCTATRTNTAQSALQPSIGATTRAERPRQRMSWTIDMNTYIMRTYYTITKLETDMTNYRPTLHAKFAQQYPHLDISIERITTQRRNIITRNLLAEPILQRLRDEVANDLANTSTSVANPEAPASSAREPLQPSIEEEERRDVEKMEEGFQCALAEYEGSDAATRPRIPRQPASWKLCKATKILNEHTLPLHLQNHNSLQEIHTAIYCAAVAASRANGYEVRNEGRSNRGNKAQPPWQVRLEKRIEELRSSIGRITQYMQGNRSKKLVRKVKMALKRNRIHTRHEEPNKHISEYLDTLKQKLGVYARRLRRYKDYTNRKQQNMQFQANQKAFYRKLRETPANKDKYEAPKPAEIETFWKTLWSNEVQHKSAPWIQQEMEATRGIEEMEYTGITIEELQQVIQRTHNWKAPGIDGIHNFWYKKFTSAHGPLAKELTAIIEDPSKMPEFLCKGITYLLPKDQDTSNPAKYRPITCLNTLYKILTGCISEKISRHSESNNLMTEEQKGCQKGTLGCKEQLTIDSVILEQARKQKRKLNTAYIDYKKAFDSVPHSWLLEILSIYKVHPSIIRFLQSSMKQWRTRLQLNTPDSKIETAEIPIRRGIFQGDALSPQWFCLALNPLSRMLNTSKYGYMLKKDKRNLHKVSHLMYVDDIKLYAPTITQLRQLISITETFSKDIGMEFGLDKCKIQKNSKEDLPGIELEDGRLLKTLDEGETYKYLGIMQKRQQEHKKVKVQLTQAFQERLRSIVKTKLSGKNTTQAINAYAVPVLTYSFGIIKWSNTELEQLQRKMRTIQRRAGQLHPATAIERQTLPREEGGRGQADLKDLHDKQIQSMRQYFQLKSPRSPLIQAIIQADANYTPLNLCSTEERVLETANEQKLRTWAGKPLHGRHYNDLQQPHVDKKASNSWLAKGTLQPETEGFMLAIQDQVIATRNNQKFIQRKDIESDKCRHCHAASETIQHVMAGCKILAQSDYKHRHDQVAKIVHQKLAANAGFLTEKCPYYKYEPETVHENETHKLYWDRAIITDKTVPHNRPDITLVDKSNKTTYLIDIAVPNTNNIQTTYTTKITKYQDLRHEVRDIWGMEKILIIPLVISATGIVPKTLATNLEILNIDPNTYIEIQKATILNTCHIVRKFLDMAH

SEQ ID NO: 22219 - protein, 1186 aa, Dysdera silvatica
MNHNENMNGASVVSLLNQNRVRVLSRGASSKNMQQSLLGGVGGCSGASNCTATRTNTAQSALQPSIGATTRAERPRQRMSWTIDMNTYIMRTYYTITKLETDMTNYRPTLHAKFAQQYPHLDISIERITTQRRNIITRNLLAEPILQRLRDEVANDLANTSTSVANPEAPVSSPREPLQPSIEEEERRDVEKMEEGFQCALAEYEGSDAATRPRIPRQPASWKLCKATKILNEHTLPLHLQNHNSLQEIHTAIYCAAVAASRANGYEVRNEGRSNRGNKAQPPWQVRLQKRIEELRSSIGRITQYMQGNRGKKLVRKVKMALKRNRIHTRHEEPNKHISEYLDTLKQKLGVYARRLRRYKDYTNKKQQNMQFQANQKAFYRKLRETPANKDKYEAPKPAEIETFWKTLWSNEVQHKSAPWIQQEMEATRGIEEMEYTGITIEELQQVIQRTHNWKAPGIDGIHNFWYKKFTSAHGPLAKELTAIIEDPSKMPEFLCKGITYLLPKDQDTSNPAKYRPITCLNTLYKILTGCISEKISRHSESNNLMTEEQKGCQKGTLGCKEQLTIDSVILEQARKQKRKLNTAYIDYKKAFDSVPHSWLLEILSIYKVHPSIIRFLQSSMKQWRTRLQLNTPDSKIETAEIPIRRGIFQGDALSPQWFCLALNPLSRMLNTSKYGYMLKKDKRNLHKVSHLMYVDDIKLYAPTITQLRQLISITETFSKDIGMEFGLDKCKIQKNSKEDLPGIELEDGRLLKTLDEGETYKYLGIMQKRQQEHKKVKVQLTQAFQERLRSIVKTKLSGKNTTQAINAYAVPVLTYSFGIIKWSNTELEQLQRKMRTIQRRAGQLHPATAIERQTLPREEGGRGQADLKDLHDKQIQSMRQYFQLKSPRSPLIQAIIQADANYTPLNLCSTEERVLETANEQKLRTWAGKPLHGRHYNDLQQPHVDKKASNSWLAKGTLQPETEGFMLAIQDQVIATRNNQKFIQRKDIESDKCRHCHAASETIQHVMAGCKILAQSDYKHRHDQVAKIVHQKLAANAGFLTEKCPYYKYEPETVHENETHKLYWDRAIITDKTVPHNRPDITLVDKSNKTTYLIDIAVPNTNNIQTTYTTKITKYQDLRHEVRDIWGMEKILIIPLVISATGIVPKTLATNLEILNIDPNTYIEIQKATILNTCHIVRKFLDMAH

SEQ ID NO: 22220 - protein, 1186 aa, Dysdera silvatica
MNHNENMNGASVVALLNQNRVRALSRGASSKNMQQSLLGGVGGCSGASNCTATRTNTAQSALQPSIGATTRAERPRQRMSWTIDMNTYIMRTYYTITKLETDMTNYRPTLHAKFAQQYPHLDISIERITTQRRNIITRNLLAEPILQRLRDEVANDLANTSTSVANPEAPASSAREPLQPSIEEEERRDVEKMEEGFQCALAEYEGSDAATRPRIPRQPASWKLCKATKILNEHTLPLHLQNHNSLQEIHTAIYCAAVAASRANGYEVRNEGRSNRGNKAQPPWQVRLEKRIEELRSSIGRITQYMQGNRSKKLVRKVKMALKRNRIHTRHEEPNKHISEYLDTLKQKLGVYARRLRRYKDYTNKKQQNMQFQANQKAFYRKLRETPANKDKYEAPKPAEIETFWKTLWSNEVQHKSAPWIQQEMEATRGIEEMEYTGITIEELQQVIQRTHNWKAPGIDGIHNFWYKKFTSAHGPLAKELTAIIEDPSKMPEFLCKGITYLLPKDQDTSNPAKYRPITCLNTLYKILTGCISEKISRHSESNNLMTEEQKGCQKGTLGCKEQLTIDSVILEQARKQKRKLNTAYIDYKKAFDSVPHSWLLEILSIYKVHPSIIRFLQSSMKQWRTRLQLNTPDSKIETAEIPIRRGIFQGDALSPQWFCLALNPLSRMLNTSKYGYMLKKDKRNLHKVSHLMYVDDIKLYAPTITQLRQLISITETFSKDIGMEFGLDKCKIQKNSKEDLPGIELEDGRLLKTLDEGETYKYLGIMQKRQQEHKKVKVQLTQAFQERLRSIVKTKLSGKNTTQAINAYAVPVLTYSFGIIKWSNTELEQLQRKMRTIQRRAGQLHPATAIERQTLPREEGGRGQADLKDLHDKQIQSMRQYFQLKSPRSPLIQAIIQADANYTPLNLCSTEERVLETANEQKLRTWAGKPLHGRHYNDLQQPHVDKKASNSWLAKGTLQPETEGFMLAIQDQVIATRNNQKFIQRKDIESDKCRHCHAASETIQHVMAGCKILAQSDYKHRHDQVAKIVHQKLAANAGFLTEKCPYYKYEPETVHENETHKLYWDRAIITDKTVPHNRPDITLVDKSNKTTYLIDIAVPNTNNIQTTYTTKITKYQDLRHEVRDIWGMEKILIIPLVISATGIVPKTLATNLEILNIDPNTYIEIQKATILNTCHIVRKFLDMAH

SEQ ID NO: 22221 - protein, 994 aa, Dysdera silvatica
MEEGFQCALADYEGSDAATRPRIPRQPESWKLCKATKILNEHTLPLYLQNHKSLQEIHTAIYCAAVAASRANGHEVRNEGRSNRGNKAQPPWQVRLEKRIEELRRSIGRITQYMQGNRGKKLVRKVKMALKRNRMHTRHEEPNKHISEYLDTLKQKLGVYARRLRRYKDCTNKKQQNMQFQANQKAFYRKLQETPANKDKYEAPKPAVIETFWKTLWSNEVQHKSAPWIQQEMEATRGIEEMEYTGITIEELQQVIQRTHNWKAPGIDGIHNFWYKKFTSAHGPLAKELTAIIEDPSEMPEFLCKGITYLLPKDQDKSNPAKYRPITCLNTLYKILTGCISEKISRHSESNNLMTEEQKGCQKGTLGCKEQLTIDSVILEQARKQKRKLNTAYIDYKKAFDSVPHSWLLEILSIYKVHPSIIRFLQSSMKQWRTRLQLNTPDSKIKTAEIPIRRGIFQGDALSPQWFCLALNPLSRMLNTSKYGYMLKKDKRNLHKVSHLMYVDDIKLYAPTITQLRQLISITETFSKDIGMEFGLDKCKIQKNSKEDLPGIELEDGRLLKTLDEGETYKYLGIMQKRQQEHKKVKVQLTQAFQERLRSIVKTKLSGKNTTQAINAYAVPVLTYSFGIIKWSNTELEQLQRKMRTIQRRAGQLHPATAIERQTLPREEGGRGQADLKDLHDKQIQSMRQYFQLKSPRSPLIQAIIQADANYTPLNLCSTEERVLETANEQKLRTWAGKPLHGRHYNDLQQPHVDKKASNSWLAKGTLQPETEGFMLAIQDQVIATRNNQKFIQRKDIESDKCRHCHAASETIQHVMAGCKILAQSDYKHRHDQVAKIVHQKLAANAGFLTEKCPYYKYEPETVHENETHKLYWDRAIITDKTVPHNRPDITLVDKSNKTTYLIDIAVPNTNNIQTTYTTKITKYQDLRHEVRDIWGMEKILIIPLVISATGIVPKTLATNLEILNIDPNTYIEIQKATILNTCHIVRKFLDMAH

SEQ ID NO: 22222 - protein, 988 aa, Dysdera silvatica
MEEGFQCALAEYEGSDSAARPRIPRQPEYWKLCAATKILNEHTLPLHLREIHTAIYCATVAASRVNGYEVRNEDRNNRGSKTQPPWQVRLQKRIEELRSSIGRITQYMQGNRSKKLVRKVKMALKRNRIHTRHEEPNKHISEYLDTLKQKLGVYARRLRRYKDCTNRKQQNKKFQTNQKAFYRKLQETSASQDKYEAPKPAVIETFWKTLWSNEVQHKSAPWIQQEMEATRGIEEMEYTGITIEELQQVIQRTLNWKAPGTDGIHNFWYKKFTSAHGPLAKELTAIIEDPSKMPEFLCKGITYLLPKDQDTSNPAKYRPITCLNTLYKILTGCISEKISRHSESNNLMAEEQKGCQKGTLGCKEQLTIDSVILEQARKQKRKLNTAYIDYKKAFDSVPHSWLLEILSIYKVHPSIIRFLQSSMKQWRTRLQLNTPDSKIETAEIPIRRGIFQGDALSPQWFCLALNPLSRMLNTSKYGYMLKKDKRNLHKVSHLMYVDDIKLYAPTITQLRQLISITETFSKDIGMEFGLDKCKIQKNSKEDLPGIELEDGRLLKTLDEGETYKYLGIMQKRQQEHKKVKVQLTQAFQERLRSIVKTKLSGKNTTQAINAYAVPVLTYSFGIIKWSNTELEQLQRKMRTIQRRAGQLHPATAIERQTLPREEGGRGQADLKDLHDKQIQSMRQYFQLKSPRSPLIQAIIQADANYTPLNLCSTEERVLETANEQKLRTWAGKPLHGRHYNDLQQPHVDKKASNSWLAKGTLQPETEGFMLAIQDQVIATRNNQKFIQRKDIESDKCRHCHAASETIQHVMAGCKILAQSDYKHRHDQVAKIVHQKLAANAGFLTEKCPYYKYEPETVHENETHKLYWDRAIITDKTVPHNRPDITLVDKSNKTTYLIDIAVPNTNNIQTTYTTKITKYQDLRHEVRDIWGMEKILIIPLVISATGIVPKTLATNLEILNIDPNTYIEIQKATILNTCHIVRKFLDMAH

SEQ ID NO: 22223 - protein, 1189 aa, Dysdera silvatica
MSHVQESQLLEFRRIFRILYIYRVRTLSRGASSKNMQQSLLGGVGGCSGASNCTATRTNTAQSALQPSIGATTRAERPRQRMSWTIDMNTYIMRTYYTITKLETDMTNYRPTLHAKFAQQYPHLDISIERITTQRRNIITRNLLAEPILQRLRDEVANDLANTSTSVANPEAPAIGAREPLQPSIEEEERRDVEKMEEGFQCALAEYEGSDAATRPRIPRQPASWKLCKATKILNEHTLPLHLQNHNSLQEIHTAIYCAAVAASRANGYEVRNEGRSNRGNKAQPPWQVRLEKRIEELRSSIGRITQYMQGNRSKKLVRKVKMALKRNRIHTRHEEPNKHISEYLDTLKQKLGVYARRLRRYKDYTNKKQQNMQFQANQKAFYRKLRETPANKDKYEAPKPAEIETFWKTLWSNEVQHKSAPWIQQEMEATRGIEEMEYTGITIEELQQVIQRTHNWKAPGIDGIHNFWYKKFTSAHGPLAKELTAIIEDPSKMPEFLCKGITYLLPKDQDTSNPAKYRPITCLNTLYKILTGCISEKISRHSESNNLMTEEQKGCQKGTLGCKEQLTIDSVILEQARKQKRKLNTAYIDYKKAFDSVPHSWLLEILSIYKVHPSIIRFLQSSMKQWRTRLQLNTPDSKIETAEIPIRRGIFQGDALSPQWFCLALNPLSRMLNTSKYGYMLKKDKRNLHKVSHLMYVDDIKLYAPTITQLRQLISITETFSKDIGMEFGLDKCKIQKNSKEDLPGIELEDGRLLKTLDEGETYKYLGIMQKRQQEHKKVKVQLTQAFQERLRSIVKTKLSGKNTTQAINAYAVPVLTYSFGIIKWSNTELEQLQRKMRTIQRRAGQLHPATAIERQTLPREEGGRGQADLKDLHDKQIQSMRQYFQLKSPRSPLIQAIIQADANYTPLNLCSTEERVLETANEQKLRTWAGKPLHGRHYNDLQQPHVDKKASNSWLAKGTLQPETEGFMLAIQDQVIATRNNQKFIQRKDIESDKCRHCHAASETIQHVMAGCKILAQSDYKHRHDQVAKIVHQKLAANAGFLTEKCPYYKYEPETVHENETHKLYWDRAIITDKTVPHNRPDITLVDKSNKTTYLIDIAVPNTNNIQTTYTTKITKYQDLRHEVRDIWGMEKILIIPLVISATGIVPKTLATNLEILNIDPNTYIEIQKATILNTCHIVRKFLDMAH

SEQ ID NO: 22224 - protein, 994 aa, Dysdera silvatica
MEEGFQCALAEYEGSDAATRPRIPRQPEYWKLCAATKILNEHTLPLHLQKHNSLQEIHTAIYCAAVAASRANGYEVRNEGRSNRGNKAQPPWQVRLEKRIEELRSSIGRITQYMQGNRGKKLVRKVKMALKRNRIHTRHEEPNKHISEYLDTLKQKLGVYARRLRRYKDYTNRKQQNMQFQANQKAFYRKLRETSANKDKYEAPKPAEIETFWKTLWSNEIQHKSAPWIQQEMEATSGIEEMEYTGITIEELQQVIQRTHNWKAPGIDGIHNFWYKKFTSAHGPLAKELTAIIEDPSKMPEFLCKGITYLLPKDQDTSNPAKYRPITCLNTLYKILTGCISEKISRHSESNNLMAEEQKGCQKGTLGCKEQLTIDSVILEQARKQKRKLNTAYIDYKKAFDSVPHSWLLEILSIYKVHPSIIRFLQSSMKQWRTRLQLNTPDSKIETAEIPIRRGIFQGDALSPQWFCLALNPLSRMLNTSKYGYMLKKDKRNLHKVSHLMYVDDIKLYAPTITQLRQLISITETFSKDIGMEFGLDKCKIQKNSKEDLPGIELEDGRLLKTLDEGETYKYLGIMQKRQQEHKKVKVQLTQAFQERLRSIVKTKLSGKNTTQAINAYAVPVLTYSFGIIKWSNTELEQLQRKMRTIQRRAGQLHPATAIERQTLPREEGGRGQADLKDLHDKQIQSMRQYFQLKSPRSPLIQAIIQADANYTPLNLCSTEERVLETANEQKLRTWAGKPLHGRHYNDLQQPHVDKKASNSWLAKGTLQPETEGFMLAIQDQVIATRNNQKFIQRKDIESDKCRHCHAASETIQHVMAGCKILAQSDYKHRHDQVAKIVHQKLAANAGFLTEKCPYYKYEPETVHENETHKLYWDRAIITDKTVPHNRPDITLVDKSNKTTYLIDIAVPNTNNIQTTYTTKITKYQDLRHEVRDIWGMEKIFIIPLVISATGIVPKTLATNLEILNIDPNTYIEIQKATILNTCHIVRKFLDMAH

SEQ ID NO: 22225 - protein, 1186 aa, Dysdera silvatica
MNHNENMNGASVVSLLNQNRVRTLSRGASSKNMQQSLLGGVGGCSGASNCTATRTNTAQSALQPSIGATTRAERPRQRMSWTIDMNTYIMRTYYTITKLETDMTNYRPTLHAKFAQQYPHLDISIERITTQRRNIITRNLLAEPILQRLRDEVANDLANTSTSVANPEAPASSAREPLQPSIEEEERRDVEKMEEGFQCALAEYEGSDAATRPRIPRQPASWKLCKATKILNEHTLPLHLQNHNSLQEIHTAIYCAAVAASRANGYEVRNEGRSNRGNKAQPPWQVRLEKRIEELRSSIGRITQYMQGNRGKKLVRKVKMALKRNRIHTRHEEPNKHISEYLDTLKQKLGVYARRLRRYKDYTNKKQQNMQFQANQKAFYRKLRETPANKDKYEAPKPAEIETFWKTLWSNEVQHKSAPWIQQEMEATRGIEEMEYTGITIEELQQVIQRTHNWKAPGIDGIHNFWYKKFTSAHGPLAKELTAIIEDPSKMPEFLCKGITYLLPKDQDTSNPAKYRPITCLNTLYKILTGCISEKISRHSESNNLMTEEQKGCQKGTLGCKEQLTIDSVILEQARKQKRKLNTAYIDYKKAFDSVPHSWLLEILSIYKVHPSIIRFLQSSMKQWRTRLQLNTPDSKIETAEIPIRRGIFQGDALSPQWFCLALNPLSRMLNTSKYGYMLKKDKRNLHKVSHLMYVDDIKLYAPTITQLRQLISITETFSKDIGMEFGLDKCKIQKNSKEDLPGIELEDGRLLKTLDEGETYKYLGIMQKRQQEHKKVKVQLTQAFQERLRSIVKTKLSGKNTTQAINAYAVPVLTYSFGIIKWSNTELEQLQRKMRTIQRRAGQLHPATAIERQTLPREEGGRGQADLKDLHDKQIQSMRQYFQLKSPRSPLIQAIIQADANYTPLNLCSTEERVLETANEQKLRTWAGKPLHGRHYNDLQQPHVDKKASNSWLAKGTLQPETEGFMLAIQDQVIATRNNQKFIQRKDIESDKCRHCHAASETIQHVMAGCKILAQSDYKHRHDQVAKIVHQKLAANAGFLTEKCPYYKYEPETVHENETHKLYWDRAIITDKTVPHNRPDITLVDKSNKTTYLIDIAVPNTNNIQTTYTTKITKYQDLRHEVRDIWGMEKILIIPLVISATGIVPKTLATNLETLNIDPNTYIEIQKATILNTCHIVRKFLDMAH

SEQ ID NO: 22226 - protein, 1151 aa, Dysdera silvatica
MVEYDDDIYIHAPNCMATRTNTAQSALQPNIGTTTRAERPRQRMSWTIDMNTYIMRTYYTITKLETDITNYRPTLHAKFAQQYPHLDISIERITVQRRNIVTGNLLAELLLQKIRDKVANNFANTPTSVANPEAPASSGREPLQPSIEEEERRDVEKMEEGFQCALAEYEGSDAATRPRIPRQPASWKLCKATKILNEHTLPLHLQNHNSLQEIHTAIYCAAVAASRANGYEVRNEGRSNRGNKAQPPWQVRLEKRIEELRSSIGRITQYMQGNRGKKLVRKVKMALKRNRIHTRHEEPNKHISEYLDTLKQKLGVYARRLRRYKDYTNKKQQNMQFQANQKAFYRKLRETPANKDKYEAPKPAEIETFWKTLWSNEVQHKSAPWIQQEMEATRGIEEMEYTGITIEELQQVIQRTHNWKAPGIDGIHNFWYKKFTSAHGPLAKELTAIIEDPSKMPEFLCKGITYLLPKDQDTSNPAKYRPITCLNTLYKILTGCISEKISRHSESNNLMTEEQKGCQKGTLGCKEQLTIDSVILEQARKQKRKLNTAYIDYKKAFDSVPHSWLLEILSIYKVHPSIIRFLQSSMKQWRTRLQLNTPDSKIETAEIPIRRGIFQGDALSPQWFCLALNPLSRMLNTSKYGYMLKKDKRNLHKVSHLMYVDDIKLYAPTITQLRQLISITETFSKDIGMEFGLDKCKIQKNSKEDLPGIELEDGRLLKTLDEGETYKYLGIMQKRQQEHKKVKVQLTQAFQERLRSIVKTKLSGKNTTQAINAYAVPVLTYSFGIIKWSNTELEQLQRKMRTIQRRAGQLHPATAIERQTLPREEGGRGQADLKDLHDKQIQSMRQYFQLKSPRSPLIQAIIQADANYTPLNLCSTEERVLETANEQKLRTWAGKPLHGRHYNDLQQPHVDKKASNSWLAKGTLQPETEGFMLAIQDQVIATRNNQKFIQRKDIESDKCRHCHAASETIQHVMAGCKILAQSDYKHRHDQVAKIVHQKLAANAGFLTEKCPYYKYEPETVHENETHKLYWDRAIITDKTVPHNRPDITLVDKSNKTTYLIDIAVPNTNNIQTTYTTKITKYQDLRHEVRDIWGMEKILIIPLVISATGIVPKTLATNLEILNIDPNTYIEIQKATILNTCHIVRKFLDMAH

SEQ ID NO: 22227 - protein, 843 aa, Dysdera silvatica
MQGNRGKKLVRKVKMALKRNRIHTRHEEPNKHISEYLDTLKQKLGVYARRLRRYKDYTNKKQQNMQFQANQKAFYRKLRETPANKDKYEAPKPAEIETFWKTLWSNEVQHKSAPWIQQEMEATRGIEEMEYTGITIEELQQVIQRTHNWKAPGIDGIHNFWYKKFTSAHGPLAKELTAIIEDPSKMPEFLCKGITYLLPKDQDTSNPAKYRPITCLNTLYKILTGCISEKISRHSESNNLMTEEQKGCQKGTLGCKEQLTIDSVILEQARKQKRKLNTAYIDYKKAFDSVPHSWLLEILSIYKVHPSIIRFLQSSMKQWRTRLQLNTPDSKIETAEIPIRRGIFQGDALSPQWFCLALNPLSRMLNTSKYGYMLKKDKRNLHKVSHLMYVDDIKLYAPTITQLRQLISITETFSKDIGMEFGLDKCKIQKNSKEDLPGIELEDGRLLKTLDEGETYKYLGIMQKRQQEHKKVKVQLTQAFQERLRSIVKTKLSGKNTTQAINAYAVPVLTYSFGIIKWSNTELEQLQRKMRTIQRRAGQLHPATAIERQTLPREEGGRGQADLKDLHDKQIQSMRQYFQLKSPRSPLIQAIIQADANYTPLNLCSTEERVLETANEQKLRTWAGKPLHGRHYNDLQQPHVDKKASNSWLAKGTLQPETEGFMLAIQDQVIATRNNQKFIQRKDIESDKCRHCHAASETIQHVMAGCKILAQSDYKHRHDQVAKIVHQKLAANAGFLTEKCPYYKYEPETVHENETHKLYWDRAIITDKTVPHNRPDITLVDKSNKTTYLIDIAVPNTNNIQTTYTTKITKYQDLRHEVRDAVMNLRYPTLTQTPTLKYKKPQS

SEQ ID NO: 22228 - protein, 1157 aa, Dysdera silvatica
MNHNENMNGASVVSLLNQNRVRTLSRGASSKNMQQSLLGGVGGCSGASNCTATRTNTAQSALQPSIGATTRAERPRQRMSWTIDMNTYIMRTYYTITKLETDMTNYRPTLHAKFAQQYPHLDISIERITTQRRNIITRNLLAEPILQRLRDEVANDLANTSTSVANPEAPASSAREPLQPSIEEEERRDVEKMEEGFQCALAEYEGSDAATRPRIPRQPASWKLCKATKILNEHTLPLHLQNHNSLQEIHTAIYCAAVAASRANGYEVRNEGRSNRGNKAQPPWQVRLEKRIEELRSSIGRITQYMQGNRGKKLVRKVKMALKRNRIHTRHEEPNKHISEYLDTLKQKLGVYARRLRRYKDYTNRKQQNMQFQANQKAFYRKLRETSASQDKYESPKPAERIEEMEYTGITIEELQQVIQRTHNWKAPGIDGIHNFWYKKFTSAHGPLAKELTAIIEDPSKMPEFLCKGITYLLPKDQDTSNPAKYRPITCLNTLYKILTGCISEKISRHSESNNLMTEEQKGCQKGTLGCKEQLTIDSVILEQARKQKRKLNTAYIDYKKAFDSVPHSWLLEILSIYKVHPSIIRFLQSSMKQWRTRLQLNTPDSKIETAEIPIRRGIFQGDALSPQWFCLALNPLSRMLNTSKYGYMLKKDKRNLHKVSHLMYVDDIKLYAPTITQLRQLISITETFSKDIGMEFGLDKCKIQKNSKEDLPGIELEDGRLLKTLDEGETYKYLGIMQKRQQEHKKVKVQLTQAFQERLRSIVKTKLSGKNTTQAINAYAVPVLTYSFGIIKWSNTELEQLQRKMRTIQRRAGQLHPATAIERQTLPREEGGRGQADLKDLHDKQIQSMRQYFQLKSPRSPLIQAIIQADANYTPLNLCSTEERVLETANEQKLRTWAGKPLHGRHYNDLQQPHVDKKASNSWLAKGTLQPETEGFMLAIQDQVIATRNNQKFIQRKDIESDKCRHCHAASETIQHVMAGCKILAQSDYKHRHDQVAKIVHQKLAANAGFLTEKCPYYKYEPETVHENETHKLYWDRAIITDKTVPHNRPDITLVDKSNKTTYLIDIAVPNTNNIQTTYTTKITKYQDLRHEVRDIWGMEKILIIPLVISATGIVPKTLATNLEILNIDPNTYIEIQKATILNTCHIVRKFLDMAH

SEQ ID NO: 22229 - protein, 1186 aa, Dysdera silvatica
MNHNENMNGASVVALLNQNRVRALSRGASSKNMQQSLLGGVGGCSGASNCTATRTNTAQSALQPSIGATTRAERPRQRMSWTIDMNTYIMRTYYTITKLETDMTNYRPTLHAKFAQQYPHLDISIERITTQRRNIITRNLLAEPILQRLRDEVANDLANTSTSVANPEAPASSAREPLQPSIEEEERRDVEKMEEGFQCALADYEGSDAATRPRIPRQPASWKLCKATKILNEHTLPLHLQNHNSLQEIHTAIYCAAVAASRANGYEVRNEGRSNRGNKAQPPWQVRLQKRIEELRSSIGRITQYMQGNRSKKLVRKVKMALKRNRIHTRHEEPNKHISEYLDTLKQKLGVYARRLRRYKDYTNRKQQNMQFQANQKAFYRKLRETPANKDKYEAPKPAEIETFWKTLWSNEVQHKSAPWIQQEMEATRGIEEMEYTGITIEELQQVIQRTHNWKAPGIDGIHNFWYKKFTSAHGPLAKELTAIIEDPSKMPEFLCKGITYLLPKDQDTSNPAKYRPITCLNTLYKILTGCISEKISRHSESNNLMTEEQKGCQKGTLGCKEQLTIDSVILEQARKQKRKLNTAYIDYKKAFDSVPHSWLLEILSIYKVHPSIIRFLQSSMKQWRTRLQLNTPDSKIETAEIPIRRGIFQGDALSPQWFCLALNPLSRMLNTSKYGYMLKKDKRNLHKVSHLMYVDDIKLYAPTITQLRQLISITETFSKDIGMEFGLDKCKIQKNSKEDLPGIELEDGRLLKTLDEGETYKYLGIMQKRQQEHKKVKVQLTQAFQERLRSIVKTKLSGKNTTQAINAYAVPVLTYSFGIIKWSNTELEQLQRKMRTIQRRAGQLHPATAIERQTLPREEGGRGQADLKDLHDKQIQSMRQYFQLKSPRSPLIQAIIQADANYTPLNLCSTEERVLETANEQKLRTWAGKPLHGRHYNDLQQPHVDKKASNSWLAKGTLQPETEGFMLAIQDQVIATRNNQKFIQRKDIESDKCRHCHAASETIQHVMAGCKILAQSDYKHRHDQVAKIVHQKLAANAGFLTEKCPYYKYEPETVHENETHKLYWDRAIITDKTVPHNRPDITLVDKSNKTTYLIDIAVPNTNNIQTTYTTKITKYQDLRHEVRDIWGMEKIFIIPLVISATGIVPKTLATNLEILNIDPNTYIEIQKATILNTCHIVRKFLDMAH

SEQ ID NO: 22230 - protein, 1060 aa, Dysdera silvatica
MMMMMIYIYITRNLLAEPILQRLRDEVANDLANTSTSVANPEAPAIGAREPLQPSIEEEERRDVEKMEEGFQCALAEYEGSDAATRPRIPRQPASWKLCKATKILNEHTLPLHLQNHNSLQEIHTAIYCAAVAASRANGYEVRNEGRSNRGNKAQPPWQVRLQKRIEELRSSIGRITQYMQGNRSKKLVRKVKMALKRNRIHTRHEEPNKHISEYLDTLKQKLGVYARRLRRYKDYTNKKQQNMQFQANQKAFYRKLRETPANKDKYEAPKPAEIETFWKTLWSNEVQHKSAPWIQQEMEATRGIEEMEYTGITIEELQQVIQRTHNWKAPGIDGIHNFWYKKFTSAHGPLAKELTAIIEDPSKMPEFLCKGITYLLPKDQDTSNPAKYRPITCLNTLYKILTGCISEKISRHSESNNLMTEEQKGCQKGTLGCKEQLTIDSVILEQARKQKRKLNTAYIDYKKAFDSVPHSWLLEILSIYKVHPSIIRFLQSSMKQWRTRLQLNTPDSKIETAEIPIRRGIFQGDALSPQWFCLALNPLSRMLNTSKYGYMLKKDKRNLHKVSHLMYVDDIKLYAPTITQLRQLISITETFSKDIGMEFGLDKCKIQKNSKEDLPGIELEDGRLLKTLDEGETYKYLGIMQKRQQEHKKVKVQLTQAFQERLRSIVKTKLSGKNTTQAINAYAVPVLTYSFGIIKWSNTELEQLQRKMRTIQRRAGQLHPATAIERQTLPREEGGRGQADLKDLHDKQIQSMRQYFQLKSPRSPLIQAIIQADANYTPLNLCSTEERVLETANEQKLRTWAGKPLHGRHYNDLQQPHVDKKASNSWLAKGTLQPETEGFMLAIQDQVIATRNNQKFIQRKDIESDKCRHCHAASETIQHVMAGCKILAQSDYKHRHDQVAKIVHQKLAANAGFLTEKCPYYKYEPETVHENETHKLYWDRAIITDKTVPHNRPDITLVDKSNKTTYLIDIAVPNTNNIQTTYTTKITKYQDLRHEVRDIWGMEKILIIPLVISATGIVPKTLATNLEILNIDPNTYIEIQKATILNTCHIVRKFLDMAH

SEQ ID NO: 22231 - protein, 1231 aa, Dysdera silvatica
MESNSYTHAHTHAYAHAHTHAYAHAHTHTHTRTPTYTRTYIHTYARAHARLHTHTYIHTQSHTAYMYHIYIYLDEREDSRYIYIYIYIYIYIYISIASIASIYIYILQPNTGITTRAERARQRMSWTIDMNTYIMRTYYTITKLETDMTNYRPTLHAKFAQQYPHLDISIERITTQRRNIITRNLLAEPILQRLRDEVANDLANTSTSVANPEAPAISAREPLQPSIEEEERRDVEKMEEGFQCALAEYAGSDAATRPRIPRQPASWKLCKATKILNEHTLPLHLQNHNSLQEIHTAIYCAAIAASRTNGYEVRNEGRNNRGNKAQPPWQVRLKKRIEELRRSIGRITQYMQGNRSRKLVRKVKMALKRNRTHTRHEEPNKHIAEYLDTLKQKLGVYARRLRKYKEFANRKQQNMQFQANQKAFYRKLQETPANKDKYEAPKPAVIETFWKTLWSNEIQHKSAPWIQQEMEAVSGIEEMEYTGITIEELQQVIQRTHNWKAPGIDGIHNFWYKKFTSIHGPLAKELTAIIEDPSEMPEFLCKGITYLLPKDQDKSNPAKYRPITCLNTLYKILTGCISEKISRHSESNNLMTEEQKGCQKGTLGCKEQLTIDSVILEQARKQKRKLNTAYIDYKKAFDSVPHSWLLEILSIYKVHPSIIRFLQSSMKQWRTRLQLNTPDSKIETAEIPIRRGIFQGDALSPQWFCLALNPLSRMLNTSKYGYMLKKDKRNLHKVSHLMYVDDIKLYAPTITQLRQLISITETFSKDIGMEFGLDKCKIQKNSKEDLPGIEFEDGRLLKILDEGETYKYLGIMQKRQQEHKKVKVQLTQAFQERLRSIVKTKLSGKNTTQAINAYAVPVLTYSFGIIKWTNTELEQLQRKMRTIQRRAGQLHPATAIERQTLPREEGGRGQADLKDLHDKQIQSMRQYFQLKSPRSPLIQAIIQADANYTPLNLCNTEERVLETANEQKLRTWAGKPLHGRHYNDLQQPHVDKKASNSWLAKGTLQPETEGFMLAIQDQVIATRNNQKFIQRKDIESDKCRHCHAASETIQHVMAGCKILAQSDYKHRHDQVAKIVHQKLAANAGFLTEKCPYYKYEPETVHENETHKLYWDRAIITDKTVPHNRPDITLVDKSNKTTYLIDIAVPNTNNIQTTYITKITKYQDLRHEVRDIWGMEKILIIPLVISATGIVPKTLVTNLEIPNIDPNTYIEIQKATILNTCHIVRKFLDMAH

SEQ ID NO: 22232 - protein, 924 aa, Dysdera silvatica
MKARMPQQGQEWFHRPTGILETLKQTAKILNEHTLPLHLQKHNSLQEIHTAIYCAAVAASRVNGYEVRNEDRNNRGNKAQPPWQVRLEKRIEELRSSIGRITQYMQGNRSKKLVRKVKMALKRNRIHTRHEEPNKHISEYLDTLKQKLGVYARRLRRYKDCTNRKQQNMQFQANQKAFYRKLQETSASQDKYEAPKPAVIETFWKTLWSNEVQHKSAPWIQQEMEATRGIEEMEYTGITIEELQQVIQRTHNWKAPGIDGIHNFWYKKFTSAHGPLAKELTVIIEDPSKMPEFLCKGITYLLPKDQDTSNPAKYRPITCLNTLYKILTGCISEKISRHSESNNLMAEEQKGCQKGTLGCKEQLTIDSVILEQARKQKRKLNTAYIDYKKAFDSVPHSWLLEILSIYKVHPSIIRFLQSSMKQWRTRLQLNTPDSKIETAEIPIRRGIFQGDALSPQWFCLALNPLSRMLNTSKYGYMLKKDKRNLHKVSHLMYVDDIKLYAPTITQLRQLISITETFSKDIGMEFGLDKCKIQKNSKEDLPGIELEDGRLLKTLDEGETYKYLGIMQKRQQEHKKVKVQLTQAFQERLRSIVKTKLSGKNTTQAINAYAVPVLTYSFGIIKWSNTELEQLQRKMRTIQRRAGQLHPATAIERQTLPREEGGRGQADLKDLHDKQIQSMRQYFQLKSPRSPLIQAIIQADANYTPLNLCSTEERVLETANEQKLRTWAGKPLHGRHYNDLQQPHVDKKASNSWLAKGTLQPETEGFMLAIQDQVIATRNNQKFIQRKDIESDKCRHCHAASETIQHVMAGCKILAQSDYKHRHDQVAKIVHQKLAANAGFLTEKCPYYKYEPETVHENETHKLYWDRAIITDKTVPHNRPDITLVDKSNKTTYLIDIAVPNTNNIQTTYTTKVSRTKISDILQNV

SEQ ID NO: 22233 - protein, 881 aa, Dysdera silvatica
MQGNRSRKLVRKVKMALKRNRMHTRHEEPNKHIAEYLDTLKQKLSVYTRRLRKYKEFANRKQQNKQFQTNQKAFYRKLRETPANKDKYEAPKPAVIETFWKTLWSNEIQHKSAPWIQQEMEATRGIEEMEYTGITIEELQQVIQKTHNWKAPGIDGIHNFWYKKFTSTHVPLAKELTAIIEDPSEMPEFLCKGITYLLPKDQDTSNPAKYRPITCLNTLYKILTGCISEKISRHSESNNLMTEEQKGCQKGTLGCKEQLTIDSVILEQARKQKRKLNTAYIDYKKAFDSVPHSWLLEILSIYKVHPSIIRFLQSSMKQWRTRLQLNTPDSKIETAEIPIRRGIFQGDALSPQWFCLALNPLSRMLNTSKYGYMLKKDKRNLHKVSHLMYVDDIKLYAPTITQLRQLISITETFSKDIGMEFGLDKCKIQKNSKEDLPGIELEDGRLLKTLDEGETYKYLGIMQKRQQEHKKVKVQLTQAFQERLRSIVKTKLSGKNTTQAINAYAVPVLTYSFGIIKWSNTELEQLQRKMRTIQRRAGQLHPATAIERQTLPREEGGRGQADLKDLHDKQIQSMRQYFQLKSPRSPLIQAIIQADANYTPLNLCSTEERVLETANEQKLRTWAGKPLHGRHYNDLQHPHVDKKASNSWLAKGTLQPETEGFMLAIQDQVIATRNNQKFIQRKDIESDKCRHCHAASETIQHVMAGCKILAQSDYKHRHDQVAKIVHQKLAANAGFLTEKCPYYKYEPETVHENETHKLYWDRAIITDKTVPHNRPDITLVDKSNKTTYLIDIAVPNTNNIQTTYTTKITKYQDLRHEVRDIWGMEKILIIPLVISATGIVPKTLATNLEILNIDPNTYIEIQKATILNTCHIVRKFLDMAH

SEQ ID NO: 22234 - protein, 881 aa, Dysdera silvatica
MQGNRSKKLVRKVKMALKRNRIHTRHEEPNKHISEYLDTLKQKLGVYARRLRRYKDYTNRKQQNMQFQANQKAFYRKLRETPANKDKYEAPKPAEIETFWKTLWSNEVQHKSAPWIQQEMEATRGIEEMEYTGITIEELQQVIQRTHNWKAPGIDGIHNFWYKKFTSAHGPLAKELTAIIEDPSKMPEFLCKGITYLLPKDQDTSNPAKYRPITCLNTLYKILTGCISEKISRHSESNNLMTEEQKGCQKGTLGCKEQLTIDSVILEQARKQKRKLNTAYIDYKKAFDSVPHSWLLEILSIYKVHPSIIRFLQSSMKQWRTRLQLNTPDSKIETAEIPIRRGIFQGDALSPQWFCLALNPLSRMLNTSKYGYMLKKDKRNLHKVSHLMYVDDIKLYAPTITQLRQLISITETFSKDIGMEFGLDKCKIQKNSKEDLPGIELEDGRLLKTLDEGETYKYLGIMQKRQQEHKKVKVQLTQAFQERLRSIVKTKLSGKNTTQAINAYAVPVLTYSFGIIKWSNTELEQLQRKMRTIQRRAGQLHPATAIERQTLPREEGGRGQADLKDLHDKQIQSMRQYFQLKSPRSPLIQAITQADANYTPLNLCSTEERVLETANEQKLRSWAGKPLHGRHYNDLQQPHVDKKASNSWLAKGTLQPETEGFMLAIQDQVIATRNNQKFIQRKDIESDKCRHCHAASETIQHVMAGCKILAQSDYKHRHDQVAKIVHQKLAANAGFLTEKCPYYKYEPETVHENETHKLYWDRAIITDKTVPHNRPDITLVDKSNKTTYLIDIAVPNTNNIQTTYTTKITKYQDLRHEVRDIWGMEKILIIPLVISATGIVPKTLATNLEILNIDPNTYIEIQKATILNTCHIVRKFLDMAH

SEQ ID NO: 22235 - protein, 1186 aa, Dysdera silvatica
MNHNENMNGASVVSLLNQNRVRTLSRGASSKNMQQSLLGGVGGCSGASNCTATRTNTAQSALQPSIGATTRAERPRQRMSWTIDMNTYIMRTYYTITKLETDMTNYRPTLHAKFAQQYPHLDISIERITTQRRNIITRNLLAEPILQRLRDEVANDLANTSTSVANPEAPASSAREPLQPSIEEEERRDVEKMEEGFQCALAEYEGSDAATRPRIPRQPASWKLCKATKILNEHTLPLHLQNHNSLQEIHTAIYCAAVAASRANGYEVRNEGRSNRGNKAQPPWQVRLEKRIEELRSSIGRITQYMQGNRGKKLVRKVKMALKRNRIHTRHEEPNKHISEYLDTLKQKLGVYARRLRRYKDYTNKKQQNMQFQANQKAFYRKLRETPANKDKYEAPKPAEIETFWKTLWSNEVQHKSAPWIQQEMEATRGIEEMEYTGITIEELQQVIQRTHNWKAPGIDGIHNFWYKKFTSAHGPLAKELTAIIEDPSKMPEFLCKGITYLLPKDQDTSNPAKYRPITCLNTLYKILTGCISEKISRHSESNNLMTEEQKGCQKGTLGCKEQLTIDSVILEQARKQKRKLNTAYIDYKKAFDSVPHSWLLEILSIYKVHPSIIRFLQSSMKQWRTRLQLNTPDSKIETAEIPIRRGIFQGDALSPQWFCLALNPLSRMLNTSKYGYMLKKDKRNLHKVSHLMYVDDIKLYAPTITQLRQLISITETFSKDIGMEFGLDKCKIQKNSKEDLPGIELEDGRLLKTLDEGETYKYLGIMQKRQQEHKKVKVQLTQAFQERLRSIVKTKLSGKNTTQAINAYAVPVLTYSFGIIKWSNTELEQLQRKMRTIQRRAGQLHPATAIERQTLPREEGGRGQADLKDLHDKQIQSMRQYFQLKSPRSPLIQAIIQADANYTPLNLCSTEERVLETANEQKLRTWAGKPLHGRHYNDLQQPHVDKKASNSWLAKGTLQPETEGFMLAIQDQVIATRNNQKFIQRKDIESDKCRHCHAASETIQHVMAGCKILAQSDYKHRHDQVAKIVHQKLAANAGFLTEKCPYYKYEPETVHENETHKLYWDRAIITDKTVPHNRPDITLVDKSNKTTYLIDIAVPNTNNIQTTYTTKITKYQDLRHEVRDIWGMEKIFIIPLVISATGIVPKTLATNLGILNIDPNTYIEIQKATILNTCHIVRKFLDMAH

SEQ ID NO: 22236 - protein, 926 aa, Dysdera silvatica
MTSQPRKYKGCVAFQNFEVRVCVAITEIVKTRLILCVTWVNTFTCRLIVFLFHLYIIIFSLSTHARTHTHTHTHTHTHTHTYISLKQKLGVYARRLRRYKDYTNKKQQNMQFQANQKAFYRKLRETPANKDKYEAPKPAEIETFWKTLWSNEVQHKSAPWIQQEMEATRGIEEMEYTGITIEELQQVIQRTHNWKAPGIDGIHNFWYKKFTSAHGPLAKELTAIIEDPSKMPEFLCKGITYLLPKDQDTSNPAKYRPITCLNTLYKILTGCISEKISRHSESNNLMTEEQKGCQKGTLGCKEQLTIDSVILEQARKQKRKLNTAYIDYKKAFDSVPHSWLLEILSIYKVHPSIIRFLQSSMKQWRTRLQLNTPDSKIETAEIPIRRGIFQGDALSPQWFCLALNPLSRMLNTSKYGYMLKKDKRNLHKVSHLMYVDDIKLYAPTITQLRQLISITETFSKDIGMEFGLDKCKIQKNSKEDLPGIELEDGRLLKTLDEGETYKYLGIMQKRQQEHKKVKVQLTQAFQERLRSIVKTKLSGKNTTQAINAYAVPVLTYSFGIIKWSNTELEQLQRKMRTIQRRAGQLHPATAIERQTLPREEGGRGQADLKDLHDKQIQSMRQYFQLKSPRSPLIQAIIQADANYTPLNLCSTEERVLETANEQKLRTWAGKPLHGRHYNDLQQPHVDKKASNSWLAKGTLQPETEGFMLAIQDQVIATRNNQKFIQRKDIESDKCRHCHAASETIQHVMAGCKILAQSDYKHRHDQVAKIVHQKLAANAGFLTEKCPYYKYEPETVHENETHKLYWDRAIITDKTVPHNRPDITLVDKSNKTTYLIDIAVPNTNNIQTTYTTKITKYQDLRHEVRDIWGMEKIFIIPLVISATGIVPKTLATNLEILNIDPNTYIEIQKATILNTCHIVRKFLDMAH

SEQ ID NO: 22237 - protein, 994 aa, Dysdera silvatica
MEEGFQCALAEYEGSDAATRPRIPRQPASWKLCKATKILNEHTLPLHLQNHNSLQEIHTAIYCAAVAASRANGYEVRNEGRSNRGNKAQPPWQVRLQKRIEELRSSIGRITQYMQGNRSKKLVRKVKMALKRNRIHTRHEEPNKHISEYLDTLKQKLGVYARRLRRYKDYTNRKQQNMQFQANQKAFYRKLRETSASQDKYESPKPAEIETFWKTLWSNEVQHKSAPWIQQEMEATRGIEEMEYTGITIEELQQVIQRTHNWKAPGIDGIHNFWYKKFTSAHGPLAKELTAIIEDPSKMPEFLCKGITYLLPKDQDTSNPAKYRPITCLNTLYKILTGCISEKISRHSESNNLMTEEQKGCQKGTLGCKEQLTIDSVILEQARKQKRKLNTAYIDYKKAFDSVPHSWLLEILSIYKVHPSIIRFLQSSMKQWRTRLQLNTPDSKIETAEIPIRRGIFQGDALSPQWFCLALNPLSRMLNTSKYGYMLKKDKRNLHKVSHLMYVDDIKLYAPTITQLRQLISITETFSKDIGMEFGLDKCKIQKNSKEDLPGIELEDGRLLKTLDEGETYKYLGIMQKRQQEHKKVKVQLTQAFQERLRSIVKTKLSGKNTTQAINAYAVPVLTYSFGIIKWSNTELEQLQRKMRTIQRRAGQLHPATAIERQTLPREEGGRGQADLKDLHDKQIQSMRQYFQLKSPRSPLIQAIIQADANYTPLNLCSTEERVLETANEQKLRTWAGKPLHGRHYNDLQQPHVDKKASNSWLAKGTLQPETEGFMLAIQDQVIATRNNQKFIQRKDIESDKCRHCHAASETIQHVMAGCKILAQSDYKHRHDQVAKIVHQKLAANAGFLTEKCPYYKYEPETVHENETHKLYWDRAIITDKTVPHNRPDITLVDKSNKTTYLIDIAVPNTNNIQTTYTTKITKYQDLRHEVRDIWGMEKILIIPLVISATGIVPKTLATNLEILNIDPNTYIEIQKATILNTCHIVRKFLDMAH

SEQ ID NO: 22238 - protein, 1186 aa, Dysdera silvatica
MNHNENMNGASVVSLLNQNRVRVLSRGASSKNMQQSLLGGVGGCSGASNCTATRTNTAQSALQPSIGATTRAERPRQRMSWTIDMNTYIMRTYYTITKLETDMTNYRPTLHAKFAQQYPHLDISIERITTQRRNIITRNLLAEPILQRLRDEVANDLANTSTSVANPEAPASSAREPLQPSIEEEERRDVEKMEEGFQCALAEYEGSDAATRPRIPRQPASWKLCKATKILNEHTLPLHLQNHNSLHEIHTAIYCAAVAASRANGYEVRNEGRNNRGNKAQPPWQVRLEKRIEELRSSIGRITQYMQGNRGKKLVRKVKMALKRNRIHTRHEEPNKHISEYLDTLKQKLGVYARRLRRYKDCTNKKQQNMQFQANQKAFYRKLRETPANKDKYEAPKPAEIETFWKTLWSNEVQHKSAPWIQQEMEATRGIEEMEYTGITIEELQQVIQRTHNWKAPGIDGIHNFWYKKFTSAHGPLAKELTAIIEDPSKMPEFLCKGITYLLPKDQDTSNPAKYRPITCLNTLYKILTGCISEKISRHSESNNLMTEEQKGCQKGTLGCKEQLTIDSVILEQARKQKRKLNTAYIDYKKAFDSVPHSWLLEILSIYKVHPSIIRFLQSSMKQWRTRLQLNTPDSKIETAEIPIRRGIFQGDALSPQWFCLALNPLSRMLNTSKYGYMLKKDKRNLHKVSHLMYVDDIKLYAPTITQLRQLISITETFSKDIGMEFGLDKCKIQKNSKEDLPGIELEDGRLLKTLDEGETYKYLGIMQKRQQEHKKVKVQLTQAFQERLRSIVKTKLSGKNTTQAINAYAVPVLTYSFGIIKWSNTELEQLQRKMRTIQRRAGQLHPATAIERQTLPREEGGRGQADLKDLHDKQIQSMRQYFQLKSPRSPLIQAIIQADANYTPLNLCSTEERVLETANEQKLRTWAGKPLHGRHYNDLQQPHVDKKASNSWLAKGTLQPETEGFMLAIQDQVIATRNNQKFIQRKDIESDKCRHCHAASETIQHVMAGCKILAQSDYKHRHDQVAKIVHQKLAANAGFLTEKCPYYKYEPETVHENETHKLYWDRAIITDKTVPHNRPDITLVDKSNKTTYLIDIAVPNTNNIQTTYTTKITKYQDLRHEVRDIWGMEKILIIPLVISATGIVPKTLATNLEILNIDPNTYIEIQKATILNTCHIVRKFLDMAH

SEQ ID NO: 22239 - protein, 1144 aa, Dysdera silvatica
MQQSLLGGVGGCSGASNCTATRTNTAQSALQPSIGATTRAERPRQRMSWTIDMNTYIMRTYYTITKLETDMTNYRPTLHAKFAQQYPHLDISIERITTQRRNIITRNLLAEPILQRLRDEVANDLANTSTSVANPEAPASSAREPLQTSIEQEERRDVEKMEEGFQCALAEYEGSDAATRPRIPRQPASWKLCKATKILNEHTLPLHLQNHNSLQEIHTAIYCAAVAASRANGYEVRNEGRSNRGNKAQPPWQVRLEKRIEELRSSIGRITQYMQGNRSKKLVRKVKMALKRNRIHTRHEEPNKHISEYLDTLKQKLGVYARRLRRYKDYTNRKQQNMQFQANQKAFYRKLRETPANKDKYEAPKPAEIETFWKTLWSNEVQHKSAPWIQQEMEATRGIEELQQVIQRTHNWKAPGIDGIHNFWYKKFTSAHGPLAKELTAIIEDPSKMPEFLCKGITYLLPKDQDTSNPAKYRPITCLNTLYKILTGCISEKISRHSESNNLMTEEQKGCQKGTLGCKEQLTIDSVILEQARKQKRKLNTAYIDYKKAFDSVPHSWLLEILSIYKVHPSIIRFLQSSMKQWRTRLQLNTPDSKIETAEIPIRRGIFQGDALSPQWFCLALNPLSRMLNTSKYGYMLKKDKRNLHKVSHLMYVDDIKLYAPTITQLRQLISITETFSKDIGMEFGLDKCKIQKNSKEDLPGIELEDGRLLKTLDEGETYKYLGIMQKRQQEHKKVKVQLTQAFQERLRSIVKTKLSGKNTTQAINAYAVPVLTYSFGIIKWSNTELEQLQRKMRTIQRRAGQLHPATAIERQTLPREEGGRGQADLKDLHDKQIQSMRQYFQLKSPRSPLIQAIIQADANYTPLNLCSTEERVLETANEQKLRTWAGKPLHGRHYNDLQQPHVDKKASNSWLAKGTLQPETEGFMLAIQDQVIATRNNQKFIQRKDIESDKCRHCHAASETIQHVMAGCKILAQSDYKHRHDQVAKIVHQKLAANAGFLTEKCPYYKYEPETVHENETHKLYWDRAIITDKTVPHNRPDITLVDKSNKTTYLIDIAVPNTNNIQTTYTTKITKYQDLRHEVRDIWGMEKIFIIPLVISATGIVPKTLATNLEILNIDPNTYIEIQKATILNTCHIVRKFLDMAH

SEQ ID NO: 22240 - protein, 1186 aa, Dysdera silvatica
MNHNENMNGASVVSLLNQNRVRTLSRGASSKNMQQSLLGGVGGCSGASNCTATRTNTAQSALQPSIGATTRAERPRQRMSWTIDMNTYIMRTYYTITKLETDMTNYRPTLHAKFAQQYPHLDISIERITTQRRNIITRNLLAEPILQRLRDEVANDLANTSTSVANPEAPASSAREPLQPSIEEEERRDVEKMEEGFQCALAEYEGSDAATRPRIPRQPASWKLCKATKILNEHTLPLHLQNHNSLQEIHTAIYCAAVAASRANGYEVRNEDRSNRGNKAQPPWQVRLEKRIEELRSSIGRITQYMQGNRGKKLVRKVKMALKRNRIHTRHEEPNKHISEYLDTLKQKLGVYARRLRRYKDYTNKKQQNMQFQANQKAFYRKLRETPANKDKYEAPKPAEIETFWKTLWSNEVQHKSAPWIQQEMEATRGIEEMEYTGITIEELQQVIQRTHNWKAPGIDGIHNFWYKKFTSAHGPLAKELTAIIEDPSKMPEFLCKGITYLLPKDQDTSNPAKYRPITCLNTLYKILTGCISEKISRHSESNNLMTEEQKGCQKGTLGCKEQLTIDSVILEQARKQKRKLNTAYIDYKKAFDSVPHSWLLEILSIYKVHPSIIRFLQSSMKQWRTRLQLNTPDSKIETAEIPIRRGIFQGDALSPQWFCLALNPLSRMLNTSKYGYMLKKDKRNLHKVSHLMYVDDIKLYAPTITQLRQLISITETFSKDIGMEFGLDKCKIQKNSKEDLPGIELEDGRLLKTLDEGETYKYLGIMQKRQQEHKKVKVQLTQAFQERLRSIVKTKLSGKNTTQAINAYAVPVLTYSFGIIKWSNTELEQLQRKMRTIQRRAGQLHPATAIERQTLPREEGGRGQADLKDLHDKQIQSMRQYFQLKSPRSPLIQAIIQADANYTPLNLCSTEERVLETANEQKLRTWAGKPLHGRHYNDLQQPHVDKKASNSWLAKGTLQPETEGFMLAIQDQVIATRNNQKFIQRKDIESDKCRHCHAASETIQHVMAGCKILAQSDYKHRHDQVAKIVHQKLAANAGFLTEKCPYYKYEPETVHENETHKLYWDRAIITDKTVPHNRPDITLVDKSNKTTYLIDIAVPNTNNIQTTYTTKITKYQDLRHEVRDIWGMEKILIIPLVISATGIVPKTLATNLEILNIDPNTYIEIQKATILNTCHIVRKFLDMAH

SEQ ID NO: 22241 - protein, 1186 aa, Dysdera silvatica
MNHNENMNGASVVSLLNQNRVRTLSRGASSKNMQQSLLGGVGGCSGASNCTATRTNTAQSALQPSIGATTRAERPRQRMSWTIDMNTYIMRTYYTITKLETDMTNYRPTLHAKFAQQYPHLDISIERITTQRRNIITRNLLAEPILQRLRDEVANDLANTSTSVANPEAPASSAREPLQPSIEEEERRDVEKMEEGFQCALAEYEGSDAATRPRIPRQPASWKLCKATKILNEHTLPLHLQNHNSLQEIHTAIYCAAVAASRANGYEVRNEGRSNRGNKAQPPWQVRLEKRIEELRSSIGRITQYMQGNRGKKLVRKVKMALKRNRIHTRHEEPNKHISEYLDTLKQKLGVYARRLRRYKDYTNKKQQNMQFQANQKAFYRKLRETPANKDKYEAPKPAEIETFWKTLWSNEVQHKSAPWIQQEMEATRGIEEMEYTGITIEELQQVIQRTHNWKAPGIDGIHNFWYKKFTSAHGPLAKELTAIIEDPSKMPEFLCKGITYLLPKDQDTSNPAKYRPITCLNTLYKILTGCISEKISRHSESNNLMAEEQKGCQKGTLGCKEQLTIDSVILEQARKQKRKLNTAYIDYKKAFDSVPHSWLLEILSIYKVHPSIIRFLQSSMKQWRTRLQLNTPDSKIETAEIPIRRGIFQGDALSPQWFCLALNPLSRMLNTSKYGYMLKKDKRNLHKVSHLMYVDDIKLYAPTITQLRQLISITETFSKDIGMEFGLDKCKIQKNSKEDLPGIELEDGRLLKTLDEGETYKYLGIMQKRQQEHKKVKVQLTQAFQERLRSIVKTKLSGKNTTQAINAYAVPVLTYSFGIIKWSNTELEQLQRKMRTIQRRAGQLHPATAIERQTLPREEGGRGQADLKDLHDKQIQSMRQYFQLKSPRSPLIQAIIQADANYTPLNLCSTEERVLETANEQKLRTWAGKPLHGRHYNDLQQPHVDKKASNSWLAKGTLQPETEGFMLAIQDQVIATRNNQKFIQRKDIESDKCRHCHAASETIQHVMAGCKILAQSDYKHRHDQVAKIVHQKLAANAGFLTEKCPYYKYEPETVHENETHKLYWDRAIITDKTVPHNRPDITLVDKSNKTTYLIDIAVPNTNNIQTTYTTKITKYQDLRHEVRDIWGMEKILIIPLVISATGIVPKTLATNLEILNIDPNTYIEIQKATILNTCHIVRKFLDMAH

SEQ ID NO: 22242 - protein, 881 aa, Dysdera silvatica
MQGNRSRKLVRKVKMALKRNRMHTRHEEPNKHISEYLDTLKQKLGVYARRLRKYKEFANRKQQNKQFQANQKAFYRKLQETPANKDKYEAPKPAVIETFWKTLWSNEIQHKSAPWIQQEMEAVSGIEEMEYTGITIEELQQVIQRTHNWKAPGTDGIHNFWYKKFTSIHGPLAKELTAIIEDPSEMPEFLCKGITYLLPKDQDKSNPAKYRPITCLNTLYNILTGCISEKISRHSESNNLMAEEQKGCQKGTLGCKEQLTIDSVILEQARKQKRKLNTAYIDYKKAFDSVPHSWLLEILSIYKVHPSIIRFLQSSMKQWRTRLQLNTPDSKIKTAEIPIRRGIFQGDALSPQWFCLALNPLSRMLNASKYGYMLKKDKRNLHKVSHLMYVDDIKLYAPTITQLRQLISITETFSKDIGMEFGLDKCKIQKNSKEDLPGIEFEDGRLLKILDEGETYKYLGIMQKRQQEHKKVKVQLTQAFQERLRSIVKTKLSGKNTTQAINAYAVPVLTYSFGIIKWTNTELEQLQRKMRTIQRRAGQLHPATAIERQTLPREEGGRGQADLKDLHDKQIQSMRQYFQLKSPRSPLIQAIIQADANYTPLNLCNTEERVLETANEQKLRTWAGKPLHGRHYNDLQQPHVDKKASNSWLAKGTLQPETEGFMLAIQDQVIATRNNQKFIQRKDIESDKCRHCHAASETIQHVMAGCKILAQSDYKHRHDQVAKIVHQKLAANAGFLTEKCPYYKYEPETVHENETHKLYWDRAIITDKTVPHNRPDITLVDKSNKTTYLIDIAVPNTNNIQTTYITKITKYQDLRHEVRDIWGMEKILIIPLVISATGIVPKTLATNLEILNIDPNTYIEIQKATILNTCHIVRKFLDMAH

SEQ ID NO: 22243 - protein, 881 aa, Dysdera silvatica
MQGNRGKKLVRKVKMALKRNRMHTRHEEPNKHISEYLDTLKQKLGVYARRLRRYKDCTNKKQQNMQFQANQKAFYRKLQETPANKDKYEAPKPAVIETFWKTLWSNEVQHKSAPWIQQEMEATRGIEEMEYTGITIEELQQVIQRTHNWKAPGIDGIHNFWYKKFTSAHGPLAKELTAIIEDPSKMPEFLCKGITYLLPKDQDTSNPAKYRPITCLNTLYKILTGCISEKISRHSESNNLMTEEQKGCQKGTLGCKEQLTIDSVILEQARKQKRKLNTAYIDYKKAFDSVPHSWLLEILSIYKVHPSIIRFLQSSMKQWRTRLQLNTPDSKIETAEIPIRRGIFQGDALSPQWFCLALNPLSRMLNTSKYGYMLKKDKRNLHKVSHLMYVDDIKLYAPTITQLRQLISITETFSKDIGMEFGLDKCKIQKNSKEDLPGIELEDGRLLKTLDEGETYKYLGIMQKRQQEHKKVKVQLTQAFQERLRSIVKTKLSGKNTTQAINAYAVPVLTYSFGIIKWSNTELEQLQRKMRTIQRRAGQLHPATAIERQTLPREEGGRGQADLKDLHDKQIQSMRQYFQLKSPRSPLIQAIIQADANYTPLNLCSTEERVLETANEQKLRTWAGKPLHGRHYNDLQQPHVDKKASNSWLAKGTLQPETEGFMLAIQDQVIATRNNQKFIQRKDIESDKCRHCHAASETIQHVMAGCKILAQSDYKHRHDQVAKIVHQKLAANAGFLTEKCPYYKYEPETVHENETHKLYWDRAIITDKTVPHNRPDITLVDKSNKTTYLIDIAVPNTNNIQTTYTTKITKYQDLRHEVRDIWGMEKILIIPLVISATGIVPKTLATNLEILNIDPNTYIEIQKATILNTCHIVRKFLDMAH

SEQ ID NO: 22244 - protein, 994 aa, Dysdera silvatica
MEEGFQCALAEYEGSDAATRPRIPRQPASWKLCKATKILNEHTLPLHLQNHNSLQEIHTAIYCAAVAASRVNGYEVRNEGRSNRGNKAQPPWQVRLQKRIEELRSSIGRITQYMQGNRGKKLVRKVKMALKRNRIHTRHEEPNKHISEYLDTLKQKLGVYARRLRRYKDYTNKKQQNMQFQANQKAFYRKLRETPANKDKYEAPKPAEIETFWKTLWSNEVQHKSAPWIQQEMEATRGIEEMEYTGITIEELQQVIQRTHNWKAPGIDGIHNFWYKKFTSAHGPLAKELTAIIEDPSKMPEFLCKGITYLLPKDQDTSNPAKYRPITCLNTLYKILTGCISEKISRHSESNNLMTEEQKGCQKGTLGCKEQLTIDSVILEQARKQKRKLNTAYIDYKKAFDSVPHSWLLEILSIYKVHPSIIRFLQSSMKQWRTRLQLNTPDSKIETAEIPIRRGIFQGDALSPQWFCLALNPLSRMLNTSKYGYMLKKDKRNLHKVSHLMYVDDIKLYAPTITQLRQLISITETFSKDIGMEFGLDKCKIQKNSKEDLPGIELEDGRLLKTLDEGETYKYLGIMQKRQQEHKKVKVQLTQAFQERLRSIVKTKLSGKNTTQAINAYAVPVLTYSFGIIKWSNTELEQLQRKMRTIQRRAGQLHPATAIERQTLPREEGGRGQADLKDLHDKQIQSMRQYFQLKSPRSPLIQAIIQADANYTPLNLCSTEERVLETANEQKLRTWAGKPLHGRHYNDLQQPHVDKKASNSWLAKGTLQPETEGFMLAIQDQVIATRNNQKFIQRKDIESDKCRHCHAASETIQHVMAGCKILAQSDYKHRHDQVAKIVHQKLAANAGFLTEKCPYYKYEPETVHENETHKLYWDRAIITDKTVPHNRPDITLVDKSNKTTYLIDIAVPNTNNIQTTYTTKITKYQDLRHEVRDIWGMEKILIIPLVISATGIVPKTLATNLEILNIDPNTYIEIQKATILNTCHIVRKFLDMAH

SEQ ID NO: 22245 - protein, 881 aa, Dysdera silvatica
MQGNRGKKLVRKVKMALKRNRIHTRHEEPNKHISEYLDTLKQKLGVYARRLRRYKDYTNRKQQNMQFQANQKAFYRKLRETPANKDKYEAPKPAEIETFWKTLWSNEVQHKSAPWIQQEMEATRGIEEMEYTGITIEELQQVIQRTHNWKAPGIDGIHNFWYKKFTSAHGPLAKELTAIIEDPSKMPEFLCKGITYLLPKDQDTSNPAKYRPITCLNTLYKILTGCISEKISRHSESNNLMAEEQKGCQKGTLGCKEQLTIDSVILEQARKQKRKLNTAYIDYKKAFDSVPHSWLLEILSIYKVHPSIIRFLQSSMKQWRTRLQLNTPDSKIETAEIPIRRGIFQGDALSPQWFCLALNPLSRMLNTSKYGYMLKKDKRNLHKVSHLMYVDDIKLYAPTITQLRQLISITETFSKDIGMEFGLDKCKIQKNSKEDLPGIELEDGRLLKTLDEGETYKYLGIMQKRQQEHKKVKVQLTQAFQERLRSIVKTKLSGKNTTQAINAYAVPVLTYSFGIIKWSNTELEQLQRKMRTIQRRAGQLHPATAIERQTLPREEGGRGQADLKDLHDKQIQSMRQYFQLKSPRSPLIQAIIQADANYTPLNLCSTEERVLETANEQKLRTWAGKPLHGRHYNDLQQPHVDKKASNSWLAKGTLQPETEGFMLAIQDQVIATRNNQKFIQRKDIESDKCRHCHAASETIQHVMAGCKILAQSDYKHRHDQVAKIVHQKLAANAGFLTEKCPYYKYEPETVHENETHKLYWDRAIITDKTVPHNRPDITLVDKSNKTTYLIDIAVPNTNNIQTTYTTKITKYQDLRHEVRDIWGMEKILIIPLVISATGIVPKTLATNLEILNIDPNTYIEIQKATILNTCHIVRKFLDMAH

SEQ ID NO: 22246 - protein, 1163 aa, Dysdera silvatica
MNHNENMNGASVVSLLNQNRVRVLSRGASSKNMQQSLLGGVGGCSGASNCTATRTNTAQSALQPSIGATTRAERPRQRMSWTIDMNTYIMRTYYTITKLETDMTNYRPTLHAKFAQQYPHLDISIERITTQRRNIITRNLLAEPILQRLRDEVANDLANTSTSVANPEAPAIGAREPLQPSIEEEERRDVEKMEEGFQCALAEYEGSDAATRPRIPRQPASWKLCKATKILNEHTLPLHLQNHNSLQEIHTAIYCAAVAASRANGYEVRNEGRSNRGNKAQPPWQVRLEKRIEELRSSIGRITQYMQGNRSKKLVRKVKMALKRNRIHTRHEEPNKHISEYLDTLKQKLGVYARRLRRYKDYTNRKQQNMQFQANQKAFYRKLRETPANKDKYEAPKPAEIETFWKTLWSNEVQHKSAPWIQQEMEATRGIEEMEYTGITIEELQQVIQRTHNWKAPGIDGIHNFWYKKFTSAHGPLAKELTAIIEDPSKMPEFLCKGITYLLPKDQDTSNPAKYRPITCLNTLYKILTGCISEKISRHSESNNLMTEEQKGCQKGTLGCKEQLTIDSVILEQARKQKRKLNTAYIDYKKAFDSVPHSWLLEILSIYKVHPSIIRFLQSSMKQWRTRLQLNTPDSKIETAEIPIRRGIFQGDALSPQWFCLALNPLSRMLNTSKYGYMLKKDKRNLHKVSHLMYVDDIKLYAPTITQLRQLISITETFSKDIGMEFGLDKCKIQKNSKEDLPGIELEDGRLLKTLDEGETYKYLGIMQKRQQEHKKVKVQLTQAFQERLRSIVKTKLSGKNTTQAINAYAVPVLTYSFGIIKWSNTELEQLQRKMRTIQRRAGQLHPATAIERQTLPREEGGRGQADLKDLHDKQIQSMRQYFQLKSPRSPLIQAIIQADANYTPLNLCSTEERVLETANEQKLRTWAGKPLHGRHYNDLQQPHVDKKASNSWLAKGTLQPETEGFMLAIQDQVIATRNNQKFIQRKDIESDKCRHCHAASETIQHVMAGCKILAQSDYKHRHDQVAKIVHQKLAANAGFLTEKCPYYKYEPETVHENETHKLYWDRAIITDKTVPHNRPDITLVDKSNKTTYLIDIAVPNTNNIQTTYTTKITKYQDLRHEVRDIWGMEKILIIPLVISATGIVPKTLATNLEILNVIKHLH

SEQ ID NO: 22247 - protein, 1136 aa, Dysdera silvatica
MNHNENMNGASVVSLLNQNRVRVLSRGASSKNMQQSLLGGVGGCSGASNCTATRTNTAQSALQPSIGATTRAERPRQRMSWTIDMNTYIMRTYYTITKLETDMTNYRPTLHAKFAQQYPHLDISIERITTQRRNIITRNLLAEPILQRLRDEVANDLANTSTSVANPEAPASSAREPLQPSIEEEERRDVEKMEEGFQCALAEYEGSDAATRPRIPRQPASWKLCKATKILNEHTLPLHLQNHNSLQEIHTAIYCAAVAASRANGYEVRNEGRSNRGNKAQPPWQVRLEKRIEELRSSIGRITQYMQGNRSKKLVRKVKMALKRNRIHTRHEEPNKHISEYLDTLKQKLGVYARRLRRYKDYTNKKQQNMQFQANQKAFYRKLRETPANKDKYEAPKPAEIETFWKTLWSNEVQHKSAPWIQQEMEATRGIEEMEYTGITIEELQQVIQRTHNWKAPGIDGIHNFWYKKFTSAHGPLAKELTAIIEDPSKMPEFLCKGITYLLPKDQDTSNPAKYRPITCLNTLYKILTGCISEKISRHSESNNLMTEEQKGCQKGTLGCKEQLTIDSVILEQARKQKRKLNTAYIDYKKAFDSVPHSWLLEILSIYKVHPSIIRFLQSSMKQWRTRLQLNTPDSKIETAEIPIRRGIFQGDALSPQWFCLALNPLSRMLNASKYGYMLKKDKRNLHKVSHLMYVDDIKLYAPTITQLRQLISITETFSKDIGMEFGLDKCKIQKNSKEDLPGIELEDGRLLKTLDEGETYKYLGIMQKRQQEHKKVKVQLTQAFQERLRSIVKTKLSGKNTTQAINAYAVPVLTYSFGIIKWSNTELEQLQRKMRTIQRRAGQLHPATAIERQTLPREEGGRGQADLKDLHDKQIQSMRQYFQLKSPRSPLIQAIIQADANYTPLNLCSTEERVLEAANEQKLRSWAGKPLHGRHYNDLQQPHVDKKASNSWLAKGTLQPETEGFMLAIQDQVIATRNNQKFIQRKDIESDKCRHCHAASETIQHVMAGCKILAQSDYKHRHDQVAKIVHQKLAANAGFLTEKCPYYKYEPETVHENETHKLYWDRAIITDKTVPHNRPDITLVDKSSKTTYLIDIAVPNSNNIKTTYTTKITKYQDLRHEVRDIWVWKRSSSSR

SEQ ID NO: 22248 - protein, 994 aa, Dysdera silvatica
MEEGFQCALAEYEGSDAATRPRIPRQPASWKLCKATKILNEHTLPLHLQNHNSLQEIHTAIYCAAVAASRANGYEVRNEGRSNRGNKAQPPWQVRLQKRIEELRSSIGRITQYMQGNRSKKLVRKVKMALKRNRIHTRHEEPNKHISEYLDTLKQKLGVYARRLRRYKDYTNKKQQNMQFQANQKAFYRKLRETPANKDKYEAPKPAEIETFWKTLWSNEVQHKSAPWIQQEMEATRGIEEMEYTGITIEELQQVIQRTHNWKAPGIDGIHNFWYKKFTSAHGPLAKELTAIIEDPSKMPEFLCKGITYLLPKDQDTSNPAKYRPITCLNTLYKILTGCISEKISRHSESNNLMTEEQKGCQKGTLGCKEQLTIDSVILEQARKQKRKLNTAYIDYKKAFDSVPHSWLLEILSIYKVHPSIIRFLQSSMKQWRTRLQLNTPDSKIETAEIPIRRGIFQGDALSPQWFCLALNPLSRMLNTSKYGYMLKKDKRNLHKVSHLMYVDDIKLYAPTITQLRQLISITETFSKDIGMEFGLDKCKIQKNSKEDLPGIELEDGRLLKTLDEGETYKYLGIMQKRQQEHKKVKVQLTQAFQERLRSIVKTKLSGKNTTQAINAYAVPVLTYSFGIIKWSNTELEQLQRKMRTIQRRAGQLHPATAIERQTLPREEGGRGQADLKDLHDKQIQSMRQYFQLKSPRSPLIQAIIQADANYTPLNLCSTEERVLETANEQKLRTWAGKPLHGRHYNDLQQPHVDKKASNSWLAKGTLQPETEGFMLAIQDQVIATRNNQKFIQRKDIESDKCRHCHAASETIQHVMAGCKILAQSDYKHRHDQVAKIVHQKLAANAGFLTEKCPYYKYEPETVHENETHKLYWDRAIITDKTVPHNRPDITLVDKSNKTTYLIDIAVPNTNNIQTTYTTKITKYQDLRHEVRDIWGMEKILIIPLVISATGIVPKTLATNLEILNIDPNTYIEIQKATILNTCHIVRKFLDMAH

SEQ ID NO: 22249 - protein, 1106 aa, Dysdera silvatica
MSWTIDMNTYIMRTYYTITKLETDMTNYRPTLHAKFAQQYPHLDISIERITTQRRNIITRNLLAEPILQRLRDEVANDLANTSTSVANPEAPVSSPREPLQPSIEERRDVEKMEEGFQCALAEYEGSDAATRPRIPRQPASWKLCKATKILNEHTLPLHLQNHNSLQEIHTAIYCAAVAASRANGYEVRNEGRSNRGNKAQPPWQVRLQKRIEELRSSIGRITQYMQGNRSKKLVRKVKMALKRNRIHTRHEEPNKHISEYLDTLKQKLGVYARRLRRYKDYTNKKQQNMQFQANQKAFYRKLRETPANKDKYEAPKPAEIETFWKTLWSNEVQHKSAPWIQQEMEATRGIEEMEYTGITIEELQQVIQRTHNWKAPGIDGIHNFWYKKFTSAHGPLAKELTAIIEDPSKMPEFLCKGITYLLPKDQDTSNPAKYRPITCLNTLYKILTGCISEKISRHSESNNLMTEEQKGCQKGTLGCKEQLTIDSVILEQARKQKRKLNTAYIDYKKAFDSVPHSWLLEILSIYKVHPSIIRFLQSSMKQWRTRLQLNTPDSKIETAEIPIRRGIFQGDALSPQWFCLALNPLSRMLNTSKYGYMLKKDKRNLHKVSHLMYVDDIKLYAPTITQLRQLISITETFSKDIGMEFGLDKCKIQKNSKEDLPGIELEDGRLLKTLDEGETYKYLGIMQKRQQEHKKVKVQLTQAFQERLRSIVKTKLSGKNTTQAINAYAVPVLTYSFGIIKWSNTELEQLQRKMRTIQRRAGQLHPATAIERQTLPREEGGRGQADLKDLHDKQIQSMRQYFQLKSPRSPLIQAIIQADANYTPLNLCSTEERVLETANEQKLRTWAGKPLHGRHYNDLQQPHVDKKASNSWLAKGTLQPETEGFMLAIQDQVIATRNNQKFIQRKDIESDKCRHCHAASETIQHVMAGCKILAQSDYKHRHDQVAKIVHQKLAANAGFLTEKCPYYKYEPETVHENETHKLYWDRAIITDKTVPHNRPDITLVDKSNKTTYLIDIAVPNTNNIQTTYTTKITKYQDLRHEVRDIWGMEKILIIPLVISATGIVPKTLATNLEILNIDPNTYIEIQKATILNTCHIVRKFLDMAH

SEQ ID NO: 22250 - protein, 1163 aa, Dysdera silvatica
MNHNENMNGASVVSLLNQNRVRTLSRGASSKNMQQSLLGGVGGCSGASNCTATRTNTAQSALQPSIGATTRAERPRQRMSWTIDMNTYIMRTYYTITKLETDMTNYRPTLHAKFAQQYPHLDISIERITTQRRNIITRNLLAEPILQRLRDEVANDLANTSTSVANPEAPASSAREPLQPSIEEEERRDVEKMEEGFQCALAEYEGSDAATRPRIPRQPASWKLCKATKILNEHTLPLHLQNHNSLQEIHTAIYCAAVAASRANGYEVRNEGRSNRGNKAQPPWQVRLEKRIEELRSSIGRITQYMQGNRGKKLVRKVKMALKRNRIHTRHEEPNKHISEYLDTLKQKLGVYARRLRRYKDYTNKKQQNMQFQANQKAFYDQKTLWSNEVQHKSAPWIQQEMEATRGIEEMEYTGITIEELQQVIQRTHNWKAPGIDGIHNFWYKKFTSAHGPLAKELTAIIEDPSKMPEFLCKGITYLLPKDQDTSNPAKYRPITCLNTLYKILTGCISEKISRHSESNNLMTEEQKGCQKGTLGCKEQLTIDSVILEQARKQKRKLNTAYIDYKKAFDSVPHSWLLEILSIYKVHPSIIRFLQSSMKQWRTRLQLNTPDSKIETAEIPIRRGIFQGDALSPQWFCLALNPLSRMLNTSKYGYMLKKDKRNLHKVSHLMYVDDIKLYAPTITQLRQLISITETFSKDIGMEFGLDKCKIQKNSKEDLPGIELEDGRLLKTLDEGETYKYLGIMQKRQQEHKKVKVQLTQAFQERLRSIVKTKLSGKNTTQAINAYAVPVLTYSFGIIKWSNTELEQLQRKMRTIQRRAGQLHPATAIERQTLPREEGGRGQADLKDLHDKQIQSMRQYFQLKSPRSPLIQAIIQADANYTPLNLCSTEERVLETANEQKLRTWAGKPLHGRHYNDLQQPHVDKKASNSWLAKGTLQPETEGFMLAIQDQVIATRNNQKFIQRKDIESDKCRHCHAASETIQHVMAGCKILAQSDYKHRHDQVAKIVHQKLAANAGFLTEKCPYYKYEPETVHENETHKLYWDRAIITDKTVPHNRPDITLVDKSNKTTYLIDIAVPNTNNIQTTYTTKITKYQDLRHEVRDIWGMEKILIIPLVISATGIVPKTLATNLEILNIDPNTYIEIQKATILNTCHIVRKFLDMAH

SEQ ID NO: 22251 - protein, 1108 aa, Dysdera silvatica
MSWTIDMNTYIMRTYYTITKLETDMTNYRPTLHAKFAQQYPHLDISIERITTQRRNIITRNLLAEPILQRLRDEVANDLANTSTSVANPEAPAIGAREPLQPSIEEEERRDVEKMEEGFQCALAEYEGSDAATRPRIPRQPASWKLCKATKILNEHTLPLHLQNHNSLQEIHTAIYCAAVAASRANGYEVRNEGRSNRGNKAQPPWQVRLQKRIEELRSSIGRITQYMQGNRGKKLVRKVKMALKRNRIHTRHEEPNKHISEYLDTLKQKLGVYARRLRRYKDYTNKKQQNMQFQANQKAFYRKLRETPANKDKYEAPKPAEIETFWKTLWSNEVQHKSAPWIQQEMEATRGIEEMEYTGITIEELQQVIQRTHNWKAPGIDGIHNFWYKKFTSAHGPLAKELTAIIEDPSKMPEFLCKGITYLLPKDQDTSNPAKYRPITCLNTLYKILTGCISEKISRHSESNNLMTEEQKGCQKGTLGCKEQLTIDSVILEQARKQKRKLNTAYIDYKKAFDSVPHSWLLEILSIYKVHPSIIRFLQSSMKQWRTRLQLNTPDSKIETAEIPIRRGIFQGDALSPQWFCLALNPLSRMLNTSKYGYMLKKDKRNLHKVSHLMYVDDIKLYAPTITQLRQLISITETFSKDIGMEFGLDKCKIQKNSKEDLPGIELEDGRLLKTLDEGETYKYLGIMQKRQQEHKKVKVQLTQAFQERLRSIVKTKLSGKNTTQAINAYAVPVLTYSFGIIKWSNTELEQLQRKMRTIQRRAGQLHPATAIERQTLPREEGGRGQADLKDLHDKQIQSMRQYFQLKSPRSPLIQAIIQADANYTPLNLCSTEERVLETANEQKLRTWAGKPLHGRHYNDLQQPHVDKKASNSWLAKGTLQPETEGFMLAIQDQVIATRNNQKFIQRKDIESDKCRHCHAASETIQHVMAGCKILAQSDYKHRHDQVAKIVHQKLAANAGFLTEKCPYYKYEPETVHENETHKLYWDRAIITDKTVPHNRPDITLVDKSNKTTYLIDIAVPNTNNIQTTYTTKITKYQDLRHEVRDIWGMEKIFIIPLVISATGIVPKTLATNLEILNIDPNTYIEIQKATILNTCHIVRKFLDMAH

SEQ ID NO: 22252 - protein, 1109 aa, Dysdera silvatica
MNHNENMNGASVVALLNQNRIRTLSRGVCSKNMQQSLLGGAGSCSGAYNCTATRTNTAQSALQPNTGTTTRAERPRQRMSWTIDMNTYIMRTYYTITKLETDMTNYRPTLHAKFAQQYPHLDISIERITTQRRNIITRNLLAEPILQRLRDEVANDLANTSTSVANPEAPASSAREPLQTSIEQEERRDVEKMEEGFQCALAEYEGSDAAARPRIPRQPEYWKLCAATKILNEHTLPLHLQKHNSLQEIHTAIYCAAVAASRANGYEVRNEGRSNRGNKAQPPWQVRLQKRIEELRSSIGRITQYMQGNRGKKLVRKVKMALKRNRIHTRHEEPNKHISEYLDTLKQKLGVYARRLRRYKDYTNRKQQNMQFQANQKAFYRKLRETPANKDKYEAPKPAEIETFWKTLWSNEVQHKSAPWIQQEMEATRGIEEMEYTGITIEELQQVIQRTHNWKAPGIDGIHNFWYKKFTSAHGPLAKELTAIIEDPSKMPEFLCKGITYLLPKDQDTSNPAKYRPITCLNTLYKILTGCISEKISRHSESNNLMAEEQKGCQKGTLGCKEQLTIDSVILEQARKQKRKLNTAYIDYKKAFDSVPHSWLLEILSIYKVHPSIIRFLQSSMKQWRTRLQLNTPDSKIETAEIPIRRGIFQGDALSPQWFCLALNPLSRMLNTSKYGYMLKKDKRNLHKVSHLMYVDDIKLYAPTITQLRQLISITETFSKDIGMEFGLDKCKIQKNSKEDLPGIELEDGRLLKTLDEGETYKYLGIMQKRQQEHKKVKVQLTQAFQERLRSIVKTKLSGKNTTQAINAYAVPVLTYSFGIIKWSNTELEQLQRKMRTIQRRAGQLHPATAIERQTLPREEGGRGQADLKDLHDKQIQSMRQYFQLKSPRSPLIQAIIQADANYTPLNLCSTEERVLETANEQKLRTWAGKPLHGRHYNDLQQPHVDKKASNSWLAKGTLQPETEGFMLAIQDQVIATRNNQKFIQRKDIESDKCRHCHAASETIQHVMAGCKILAQSDYKHRHDQVAKIVHQKLAANAGFLTEKCPYYKYEPETVHENETHKLYWDRAIITDKTVPHNRPDITLVDKSNKTTYLIDIAVPNTNNIQTTY

SEQ ID NO: 22253 - protein, 994 aa, Dysdera silvatica
MEEGFQCALAEYEGSDAATRPRIPRQPASWKLCKATKILNEHTLPLHLQNHNSLHEIHTAIYCAAVAASRANGYEVRNEGRSNRGNKAQPPWQVRLQKRIEELRSSIGRITQYMQGNRGKKLVRKVKMALKRNRIHTRHEEPNKHISEYLDTLKQKLGVYARRLRRYKDYTNKKQQNMQFQANQKAFYRKLRETPANKDKYEAPKPAEIETFWKTLWSNEVQHKSAPWIQQEMEATRGIEEMEYTGITIEELQQVIQRTHNWKAPGIDGIHNFWYKKFTSAHGPLAKELTAIIEDPSKMPEFLCKGITYLLPKDQDTSNPAKYRPITCLNTLYKILTGCISEKISRHSESNNLMTEEQKGCQKGTLGCKEQLTIDSVILEQARKQKRKLNTAYIDYKKAFDSVPHSWLLEILSIYKVHPSIIRFLQSSMKQWRTRLQLNTPDSKIETAEIPIRRGIFQGDALSPQWFCLALNPLSRMLNTSKYGYMLKKDKRNLHKVSHLMYVDDIKLYAPTITQLRQLISITETFSKDIGMEFGLDKCKIQKNSKEDLPGIELEDGRLLKTLDEGETYKYLGIMQKRQQEHKKVKVQLTQAFQERLRSIVKTKLSGKNTTQAINAYAVPVLTYSFGIIKWSNTELEQLQRKMRTIQRRAGQLHPATAIERQTLPREEGGRGQADLKDLHDKQIQSMRQYFQLKSPRSPLIQAIIQADANYTPLNLCSTEERVLETANEQKLRTWAGKPLHGRHYNDLQQPHVDKKASNSWLAKGTLQPETEGFMLAIQDQVIATRNNQKFIQRKDIESDKCRHCHAASETIQHVMAGCKILAQSDYKHRHDQVAKIVHQKLAANAGFLTEKCPYYKYEPETVHENETHKLYWDRAIITDKTVPHNRPDITLVDKSNKTTYLIDIAVPNTNNIQTTYTTKITKYQDLRHEVRDIWGMEKILIIPLVISATGIVPKTLATNLEILNIDPNTYIEIQKATILNTCHIVRKFLDMAH

SEQ ID NO: 22254 - protein, 994 aa, Dysdera silvatica
MEEGFQCALAEYEGSDAAARPRIPRQPEYWKLCAATKILNEHTLPLHLQKHNSLQEIHTAIYCAAVAASRVNGYEVRNEDRNNRGNKAQPPWQVRLEKRIEELRSSIGRITQYMQGNRSKKLVRKVKMALKRNRIHTRHEEPNKHISEYLDTLKQKLGVYARRLRRYKDCTNRKQQNMQFQANQKAFYRKLQETSASQDKYEAPKPAVIETFWKTLWSNEVQHKSAPWIQQEMEATRGIEEMEYTGITIEELQQVIQRTHNWKAPGIDGIHNFWYKKFTSAHGPLAKELTAIIEDPSKMPEFLCKGITYLLPKDQDTSNPAKYRPITCLNTLYKILTGCISEKISRHSESNNLMAEEQKGCQKGTLGCKEQLTIDSVILEQARKQKRKLNTAYIDYKKAFDSVPHSWLLEILSIYKVHPSIIRFLQSSMKQWRTRLQLNTPDSKIETAEIPIRRGIFQGDALSPQWFCLALNPLSRMLNTSKYGYMLKKDKRNLHKVSHLMYVDDIKLYAPTITQLRQLISITETFSKDIGMEFGLDKCKIQKNSKEDLPGIELEDGRLLKTLDEGETYKYLGIMQKRQQEHKKVKVQLTQAFQERLRSIVKTKLSGKNTTQAINAYAVPVLTYSFGIIKWSNTELEQLQRKMRTIQRRAGQLHPATAIERQTLPREEGGRGQADLKDLHDKQIQSMRQYFQLKSPRSPLIQAIIQADANYTPLNLCSTEERVLETANEQKLRTWAGKPLHGRHYNDLQQPHVDKKASNSWLAKGTLQPETEGFMLAIQDQVIATRNNQKFIQRKDIESDKCRHCHAASETIQHVMAGCKILAQSDYKHRHDQVAKIVHQKLAANAGFLTEKCPYYKYEPETVHENETHKLYWDRAIITDKTVPHNRPDITLVDKSNKTTYLIDIAVPNTNNIQTTYTTKITKYQDLRDELRDIWGMEKIFIIPLVISATGIVPKTLATNLGILNIDPNTYIEIQKATILNTCHIVRKFLDMAH

SEQ ID NO: 22255 - protein, 994 aa, Dysdera silvatica
MEEGFQCALAEYEGSDAAARPRIPRQPASWKLCAATNILNEHTLPLHLQKHNSLQEIHTAIYCAAVAASRANGYEVRNEGRSNRGNKAQPPWQVRLEKRIEELRSSIGRITQYMQGNRSKKLVRKVKMALKRNRIHTRHEEPNKHISEYLDTLKQKLGVYARRLRRYKDYTNRKQQNMQFQANQKAFYRKLRETPANKDKYEAPKPAEIETFWKTLWSNEVQHKSAPWIQQEMEATRGIEEMEYTGITIEELQQVIQRTHNWKAPGIDGIHNFWYKKFTSAHGPLAKELTAIIEDPSKMPEFLCKGITYLLPKDQDTSNPAKYRPITCLNTLYKILTGCISEKISRHSESNNLMAEEQKGCQKGTLGCKEQLTIDSVILEQARKQKRKLNTAYIDYKKAFDSVPHSWLLEILSIYKVHPSIIRFLQSSMKQWRTRLQLNTPDSKIETAEIPIRRGIFQGDALSPQWFCLALNPLSRMLNTSKYGYMLKKDKRNLHKVSHLMYVDDIKLYAPTITQLRQLISITETFSKDIGMEFGLDKCKIQKNSKEDLPGIELEDGRLLKTLDEGETYKYLGIMQKRQQEHKKVKVQLTQAFQERLRSIVKTKLSGKNTTQAINAYAVPVLTYSFGIIKWSNTELEQLQRKMRTIQRRAGQLHPATAIERQTLPREEGGRGQADLKDLHDKQIQSMRQYFQLKSPRSPLIQAIIQADANYTPLNLCSTEERVLETANEQKLRTWAGKPLHGRHYNDLQQPHVDKKASNSWLAKGTLQPETEGFMLAIQDQVIATRNNQKFIQRKDIESDKCRHCHAASETIQHVMAGCKILAQSDYKHRHDQVAKIVHQKLAANAGFLTEKCPYYKYEPETVHENETHKLYWDRAIITDKTVPHNRPDITLVDKSNKTTYLIDIAVPNTNNIQTTYTTKITKYQDLRHEVRDIWGMEKIFIIPLVISATGIVPKTLATNLEILNIDPNTYIEIQKATILNTCHIVRKFLDMAH

SEQ ID NO: 22256 - protein, 881 aa, Dysdera silvatica
MQGNRSRKLVRKVKMALKRNRMHTRHEEPNKHISEYLDTLKQKLGVYARRLRRYKDCTNKKQQNMQFQANQKAFYRKLQETPANKDKYEAPKPAVIETFWKTLWSNEVQHKSAPWIQQEMEATRGIEEMEYTGITIEELQQVIQRTHNWKAPGIDGIHNFWYKKFTSIHGPLAKELTAIIEDPSEMPEFLCKGITYLLPKDQDKSNPAKYRPITCLNTLYKILTGCISEKISRHSESNNLMTEEQKGCQKGTLGCKEQLTIDSVILEQARKQKRKLNTAYIDYKKAFDSVPHSWLLEILSIYKVHPSIIRFLQSSMKQWRTRLQLNTPDSKIKTAEIPIRRGIFQGDALSPQWFCLALNPLSRMLNTSKYGYMLKKDKRNLHKVSHLMYVDDIKLYAPTITQLRQLISITETFSKDIGMEFGLDKCKIQKNSKEDLPGIEFEDGRLLKILDEGETYKYLGIMQKRQQEHKKVKVQLTQAFQERLRSIVKTKLSGKNTTQAINAYAVPVLTYSFGIIKWTNTELEQLQRKMRTIQRRAGQLQPATAIERQTLPREEGGRGQADLKDLHDKQIQSMRQYFQLKSPRSPLIQAIIQADANYTPLNLCNTEERVLETANEQKLRTWAGKPLHGRHYNDLQQPHVDKKASNSWLAKGTLQPETEGFMLAIQDQVIATRNNQKFIQRKDIESDKCRHCHAASETIQHVMAGCKILAQSDYKHRHDQVAKIVHQKLAANAGFLTEKCPYYKYEPETVHENETHKLYWDRAIITDKTVPHNRPDITLVDKSNKTTYLIDIAVPNTNNIQTTYTTKITKYQDLRHEVRDIWGMEKILIIPLVISATGIVPKTLATNLEILNIDPNTYIEIQKATILNTCHIVRKFLDMAH

SEQ ID NO: 22257 - protein, 997 aa, Dysdera silvatica
MEKMKDDFQCALSEFEDLDVAIRPRIPRQPASWKLCKATKILNEHTLPLHLQKHNSLQEIHTAIYCAAVAASRANGYEVRNEGRSNRGNKAQPPWQVRLQKRIEELRSSIGRITQYMQGNRGKKLVRKVKMALKRNRIHTRHEEPNKHISEYLDTLKQKLGVYARRLRRYKDYTNKKQQNMQFQANQKAFYRKLRETPANKDKYEAPKPAEIETFWKTLWSNEVQHKSAPWIQQEMEATRGIEEMEYTGITIEELQQVIQRTHNWKAPGIDGIHNFWYKKFTSAHGPLAKELTAIIEDPSKMPEFLCKGITYLLPKDQDTSNPAKYRPITCLNTLYKILTGCISEKISRHSESNNLMTEEQKGCQKGTLGCKEQLTIDSVILEQARKQKRKLNTAYIDYKKAFDSVPHSWLLEILSIYKVHPSIIRFLQSSMKQWRTRLQLNTPDSKIETAEIPIRRGIFQGDALSPQWFCLALNPLSRMLNTSKYGYMLKKDKRNLHKVSHLMYVDDIKLYAPTITQLRQLISITETFSKDIGMEFGLDKCKIQKNSKEDLPGIELEDGRLLKTLDEGETYKYLGIMQKRQQEHKKVKVQLTQAFQERLRSIVKTKLSGKNTTQAINAYAVPVLTYSFGIIKWSNTELEQLQRKMRTIQRRAGQLHPATAIERQTLPREEGGRGQADLKDLHDKQIQSMRQYFQLKSPRSPLIQAIIQADANYTPLNLCSTEERVLETANEQKLRTWAGKPLHGRHYNDLQQPHVDKKASNSWLAKGTLQPETEGFMLAIQDQVIATRNNQKFIQRKDIESDKCRHCHAASETIQHVMAGCKILAQSDYKHRHDQVAKIVHQKLAANAGFLTEKCPYYKYEPETVHENETHKLYWDRAIITDKTVPHNRPDITLVDKSNKTTYLIDIAVPNTNNIQTTYTTKITKYQDLRHEVRDIWGMEKILIIPLVISATGIVPKTLATNLEILNIDPNTYIEIQKATILNTCHIVRKFLDMAH

SEQ ID NO: 22258 - protein, 1180 aa, Dysdera silvatica
MANSSIMLTHQKPWPLVSRCWSAPDQGSGQCGMKAGGAKNHWNGPGCRLLLTLATFNGRSLASEAKLQELEEELDKIKWDIVGLSEVRRKGEELVELKSGHLFYYRGTETGRTSGVGFLINKRIKDCLLEVESTSDRAARLVVQLTQRYQLQIVQVYAPTSSHTDEEVEEFYEEIKELHTKGKQHIKLIMGDFNARIGQQEQGETSVGKYGYGERNERGDQLIESTSVANPEAPAIGAREPLQTSIEEEERRDVEKMEEGFQCALAEYEGSDAATRPRIPRQPASWKLCKATKILNEHTLPLHLQNHNSLQEIHTAIYCAAVAASRANGYEVRNEGRSNRGNKAQPPWQVRLQKRIEELRSSIGRITQYMQGNRGKKLVRKVKMALKRNRIHTRHEEPNKHISEYLDTLKQKLGVYARRLRRYKDYTNKKQQNMQFQANQKAFYRKLRETPANKDKYEAPKPAEIETFWKTLWSNEVQHKSAPWIQQEMEATRGIEEMEYTGITIEELQQVIQRTHNWKAPGIDGIHNFWYKKFTSAHGPLAKELTAIIEDPSKMPEFLCKGITYLLPKDQDTSNPAKYRPITCLNTLYKILTGCISEKISRHSESNNLMTEEQKGCQKGTLGCKEQLTIDSVILEQARKQKRKLNTAYIDYKKAFDSVPHSWLLEILSIYKVHPSIIRFLQSSMKQWRTRLQLYAPTITQLRQLISITETFSKDIGMEFGLDKCKIQKNSKEDLPGIELEDGRLLKTLDEGETYKYLGIMQKRQQEHKKVKVQLTQAFQERLRSIVKTKLSGKNTTQAINAYAVPVLTYSFGIIKWSNTELEQLQRKMRTIQRRAGQLHPATAIERQTLPREEGGRGQADLKDLHDKQIQSMRQYFQLKSPRSPLIQAIIQADANYTPLNLCSTEERVLETANEQKLRTWAGKPLHGRHYNDLQQPHVDKKASNSWLAKGTLQPETEGFMLAIQDQVIATRNNQKFIQRKDIESDKCRHCHAASETIQHVMAGCKILAQSDYKHRHDQVAKIVHQKLAANAGFLTEKCPYYKYEPETVHENETHKLYWDRAIITDKTVPHNRPDITLVDKSNKTTYLIDIAVPNTNNIQTTYTTKITKYQDLRHEVRDIWGMEKILIIPLVISATGIVPKTLATNLEILNIDPNTYIEIQKATILNTCHIVRKFLDMAH

SEQ ID NO: 22259 - protein, 1186 aa, Dysdera silvatica
MNHNENMNGASVVSLLNQNRVRVLSRGASSKNMQQSLLGGVGGCSGASNCTATRTNTAQSALQPSIGATTRAERPRQRMSWTIDMNTYIMRTYYTITKLETDMTNYRPTLHAKFAQQYPHLDISIERITTQRRNIITRNLLAEPILQRLRDEVANDLANTSTSVANPEAPASSAREPLQPSIEEEERRDVEKMEEGFQCALAEYEGSDAATRPRIPRQPASWKLCKATKILNEHTLPLHLQNHNSLQEIHTAIYCAAVAASRANGYEVRNEGRSNRGNKAQPPWQVRLEKRIEELRSSIGRITQYMQGNRSKKLVRKVKMALKRNRIHTRHEEPNKHISEYLDTLKQKLGVYARRLRRYKDYTNRKQQNMQFQANQKAFYRKLRETPANKDKYEAPKPAEIETFWKTLWSNEVQHKSAPWIQQEMEATRGIEEMEYTGITIEELQQVIQRTHNWKAPGIDGIHNFWYKKFTSAHGPLAKELTAIIEDPSKMPEFLCKGITYLLPKDQDTSNPAKYRPITCLNTLYKILTGCISEKISRHSESNNLMTEEQKGCQKGTLGCKEQLTIDSVILEQARKQKRKLNTAYIDYKKAFDSVPHSWLLEILSIYKVHPSIIRFLQSSMKQWRTRLQLNTPDSKIETAEIPIRRGIFQGDALSPQWFCLALNPLSRMLNASKYGYMLKKDKRNLHKVSHLMYVDDIKLYAPTITQLRQLISITETFSKDIGMEFGLDKCKIQKNSKEDLPGIELEDGRLLKTLDEGETYKYLGIMQKRQQEHKKVKVQLTQAFQERLRSIVKTKLSGKNTTQAINAYAVPVLTYSFGIIKWTNTELEQLQRKMRTIQRRAGQLHPATAIERQTLPREEGGRGQADLKDLHDKQIQSMRQYFQLKSPRSPLIQAIIQADANYTPLNLCNTEERVLEAANEQKLRSWAGKPLHGRHYNDLQQPHVDKKASNSWLAKGTLQPETEGFMLAIQDEVIATRNDQKFIQRKDIESDKCRHCHASSETIQYVMAGCKILTQSDYKHKHDQVAKIVHQKLAANAGFLTEKCPYYKYEPETVHENETHKLYWDRAIITDKTVPHNRPDITLVDKSSKTTYLIDIAVPNTNNIQTTHTTKITKYQDLRHEVRDIWDMEKILIIPLVISATGIVPKTLATNLEILNIDPNTYIEIQKATILNTCHIVRKFLDMAH

SEQ ID NO: 22260 - protein, 994 aa, Dysdera silvatica
MEEGFQCALAEYEGSDAATRPRIPHQPASWKLCKATKILNEHTLPLHLQNHNSLQEIHTAIYCAAVAASRANGYEVRNEGRSNRGNKAQPPWQVRLQKRIEELRSSIGRITQYMQGNRGKKLVRKVKMALKRNRIHTRHEEPNKHISEYLDTLKQKLGVYARRLRRYKDYTNKKQQNMQFQANQKAFYRKLRETPANKDKYEAPKPAEIETFWKTLWSNEVQHKSAPWIQQEMEATRGIEEMEYTGITIEELQQVIQRTHNWKAPGIDGIHNFWYKKFTSAHGPLAKELTAIIEDPSKMPEFLCKGITYLLPKDQDTSNPAKYRPITCLNTLYKILTGCISEKISRHSESNNLMTEEQKGCQKGTLGCKEQLTIDSVILEQARKQKRKLNTAYIDYKKAFDSVPHSWLLEILSIYKVHPSIIRFLQSSMKQWRTRLQLNTPDSKIETAEIPIRRGIFQGDALSPQWFCLALNPLSRMLNTSKYGYMLKKDKRNLHKVSHLMYVDDIKLYAPTITQLRQLISITETFSKDIGMEFGLDKCKIQKNSKEDLPGIELEDGRLLKTLDEGETYKYLGIMQKRQQEHKKVKVQLTQAFQERLRSIVKTKLSGKNTTQAINAYAVPVLTYSFGIIKWSNTELEQLQRKMRTIQRRAGQLHPATAIERQTLPREEGGRGQADLKDLHDKQIQSMRQYFQLKSPRSPLIQAIIQADANYTPLNLCSTEERVLETANEQKLRTWAGKPLHGRHYNDLQQPHVDKKASNSWLAKGTLQPETEGFMLAIQDQVIATRNNQKFIQRKDIESDKCRHCHAASETIQHVMAGCKILAQSDYKHRHDQVAKIVHQKLAANAGFLTEKCPYYKYEPETVHENETHKLYWDRAIITDKTVPHNRPDITLVDKSNKTTYLIDIAVPNTNNIQTTYTTKITKYQDLRHEVRDIWGMEKILIIPLVISATGIVPKTLATNLEILNIDPNTYIEIQKATILNTCHIVRKFLDMAH

SEQ ID NO: 22261 - protein, 1104 aa, Dysdera silvatica
MVERPRQRMSWTIDMNTYIMRTYYTITKLETDMTNYRPTLHAKFAQQYPHLDISIERITTQRRNIITRNLLAEPILQRLRDEVANDLANTSTSVANPEAPASSAREPLQPSIEEEERRDVEKMEEGFQCALAEYEGSDAATRPRIPRQPASWKLCKATKILNEHTLPLHLQNHNSLQEIHTAIYCAAVAASRANGYEVRNEGRSNRGNKAQPPWQVRLEKRIEELRSSIGRITQYMQGNRGKKLVRKVKMALKRNRIHTRHEEPNKHISEYLDTLKQKLGVYARRLRRYKDYTNKKQQNMQFQANQKAFYRKLRETPANKDKYEAPKPAEIETFWKTLWSNEVQHKSAPWIQQEMEATRGIEEMEYTGITIEELQQVIQRTHNWKAPGIDGIHNFWYKKFTSAHGPLAKELTAIIEDPSKMPEFLCKGITYLLPKDQDTSNPAKYRPITCLNTLYKILTGCISEKISRHSESNNLMTEEQKGCQKGTLGCKEQLTIDSVILEQARKQKRKLNTAYIDYKKAFDSVPHSWLLEILSIYKVHPSIIRFLQSSMKQWRTRLQLNTPDSKIETAEIPIRRGIFQGDALSPQWFCLALNPLSRMLNTSKYGYMLKKDKRNLHKVSHLMYVDDIKLYAPTITQLRQLISITETFSKDIGMEFGLDKCKIQKNSKEDLPGIELEDGRLLKTLDEGETYKYLGIMQKRQQEHKKVKVQLTQAFQERLRSIVKTKLSGKNTTQAINAYAVPVLTYSFGIIKWSNTELEQLQRKMRTIQRRAGQLHPATAIERQTLPREEGGRGQADLKDLHDKQIQSMRQYFQLKSPRSPLIQAIIQADANYTPLNLCSTEERVLETANEQKLRTWAGKPLHGRHYNDLQQPHVDKKASNSWLAKGTLQPETEGFMLAIQDQVIATRNNQKFIQRKDIESDKCRHCHAASETIQHVMAGCKILAQSDYKHRHDQVAKIVHQKLAANAGFLTEKCPYYKYEPETVHENETHKLYWDRAIITDKTVPHNRPDITLVDKSNKTTYLIDIAVPNTNNIQTTYTTKITKYQDLRHEVRDIWGMEKILIIPLVISATGIVPKTLATNLEILNIDPNTCHIVRKFLDMAH

SEQ ID NO: 22262 - protein, 1154 aa, Dysdera silvatica
MQQSLLGGAGSCSGAYNCTATRTNTAQSALQPNTGTTTRAERPRQRMSWTIDMNTYIMRTYYTITKLETDMTNYRPTLHAKFAQQYPHLDISIERITTQRRNIITRNLLAEPILQRLRDEVANDLANTSTSVANPEAPASSAREPLQTSIEQEERRDVEKMEEGFQCALAEYEGSDAAARPRIPRQPEYWKLCAATKILNEHTLPLHLQKHNSLQEIHTAIYCAAVAASRANGYEVRNEGRSNRGNKAQPPWQVRLQKRIEELRSSIGRITQYMQGNRGKKLVRKVKMALKRNRIHTRHEEPNKHISEYLDTLKQKLGVYARRLRRYKDYTNRKQQNMQFQANQKAFYRKLRETPANKDKYEAPKPAEIETFWKTLWSNEVQHKSAPWIQQEMEATRGIEEMEYTGITIEELQQVIQRTHNWKAPGIDGIHNFWYKKFTSAHGPLAKELTAIIEDPSKMPEFLCKGITYLLPKDQDTSNPAKYRPITCLNTLYKILTGCISEKISRHSESNNLMAEEQKGCQKGTLGCKEQLTIDSVILEQARKQKRKLNTAYIDYKKAFDSVPHSWLLEILSIYKVHPSIIRFLQSSMKQWRTRLQLNTPDSKIETAEIPIRRGIFQGDALSPQWFCLALNPLSRMLNTSKYGYMLKKDKRNLHKVSHLMYVDDIKLYAPTITQLRQLISITETFSKDIGMEFGLDKCKIQKNSKEDLPGIELEDGRLLKTLDEGETYKYLGIMQKRQQEHKKVKVQLTQAFQERLRSIVKTKLSGKNTTQAINAYAVPVLTYSFGIIKWSNTELEQLQRKMRTIQRRAGQLHPATAIERQTLPREEGGRGQADLKDLHDKQIQSMRQYFQLKSPRSPLIQAIIQADANYTPLNLCSTEERVLETANEQKLRTWAGKPLHGRHYNDLQQPHVDKKASNSWLAKGTLQPETEGFMLAIQDQVIATRNNQKFIQRKDIESDKCRHCHAASETIQHVMAGCKILAQSDYKHRHDQVAKIVHQKLAANAGFLTEKCPYYKYEPETVHENETHKLYWDRAIITDKTVPHNRPDITLVDKSNKTTYLIDIAVPNTNNIQTTYTTKITKYQDLRHEVRDIWGMEKILIIPLVISATGIVPKTLATNLEILNIDPNTYIEIQKATILNTCHIVRKFLDMAH

SEQ ID NO: 22263 - protein, 1150 aa, Dysdera silvatica
MQQSLLGGVGGCSGASNCTATRTNTAQSALQPSIGATTRAERPRQRMSWTIDMNTYIMRTYYTITKLETDMTNYRPTLHAKFAQQYPHLDISIERITTQRRNIITRNLLAEPILQRLRDEVANDLVNTSTSVANPEAPAIGAREPLQPSIEEEERRDVEKMEEGFQCALAEYEGSDAATRPRIPRQPASWKLCKATKILNEHTLPLHLQNHNSLQEIHTAIYCAAVAASRANGYEGRSNRGNKAQPPWQVRLQKRIEELRSSIGRITQYMQGNRGKKLVRKVKMALKRNRIHTRHEEPNKHISEYLDTLKQKLGVYARRLRRYKDYTNKKQQNMQFQANQKAFYRKLRETPANKDKYEAPKPAEIETFWKTLWSNEVQHKSAPWIQQEMEATRGIEEMEYTGITIEELQQVIQRTHNWKAPGIDGIHNFWYKKFTSAHGPLAKELTAIIEDPSKMPEFLCKGITYLLPKDQDTSNPAKYRPITCLNTLYKILTGCISEKISRHSESNNLMTEEQKGCQKGTLGCKEQLTIDSVILEQARKQKRKLNTAYIDYKKAFDSVPHSWLLEILSIYKVHPSIIRFLQSSMKQWRTRLQLNTPDSKIETAEIPIRRGIFQGDALSPQWFCLALNPLSRMLNTSKYGYMLKKDKRNLHKVSHLMYVDDIKLYAPTITQLRQLISITETFSKDIGMEFGLDKCKIQKNSKEDLPGIELEDGRLLKTLDEGETYKYLGIMQKRQQEHKKVKVQLTQAFQERLRSIVKTKLSGKNTTQAINAYAVPVLTYSFGIIKWSNTELEQLQRKMRTIQRRAGQLHPATAIERQTLPREEGGRGQADLKDLHDKQIQSMRQYFQLKSPRSPLIQAIIQADANYTPLNLCSTEERVLETANEQKLRTWAGKPLHGRHYNDLQQPHVDKKASNSWLAKGTLQPETEGFMLAIQDQVIATRNNQKFIQRKDIESDKCRHCHAASETIQHVMAGCKILAQSDYKHRHDQVAKIVHQKLAANAGFLTEKCPYYKYEPETVHENETHKLYWDRAIITDKTVPHNRPDITLVDKSNKTTYLIDIAVPNTNNIQTTYTTKITKYQDLRHEVRDIWGMEKILIIPLVISATGIVPKTLATNLEILNIDPNTYIEIQKATILNTCHIVRKFLDMAH

SEQ ID NO: 22264 - protein, 836 aa, Dysdera silvatica
MYARRLRRYKDYTNRKQQNKEFRTNQKAVYRKLRETPANKDKYEAPKPAEIETFWKTLWSNEVQHKSAPWIQQEMEATRGIEEMEYTGITIEELQQVIQRTHNWKAPGIDGIHNFWYKKFTSAHGPLAKELTAIIEDPSKMPEFLCKGITYLLPKDQDTSNPAKYRPITCLNTLYKILTGCISEKISRHSESNNLMTEEQKGCQKGTLGCKEQLTIDSVILEQARKQKRKLNTAYIDYKKAFDSVPHSWLLEILSIYKVHPSIIRFLQSSMKQWRTRLQLNTPDSKIETAEIPIRRGIFQGDALSPQWFCLALNPLSRMLNTSKYGYMLKKDKRNLHKVSHLMYVDDIKLYAPTITQLRQLISITETFSKDIGMEFGLDKCKIQKNSKEDLPGIELEDGRLLKTLDEGETYKYLGIMQKRQQEHKKVKVQLTQAFQERLRSIVKTKLSGKNTTQAINAYAVPVLTYSFGIIKWSNTELEQLQRKMRTIQRRAGQLHPATAIERQTLPREEGGRGQADLKDLHDKQIQSMRQYFQLKSPRSPLIQAIIQADANYTPLNLCSTEERVLETANEQKLRTWAGKPLHGRHYNDLQQPHVDKKASNSWLAKGTLQPETEGFMLAIQDQVIATRNNQKFIQRKDIESDKCRHCHAASETIQHVMAGCKILAQSDYKHRHDQVAKIVHQKLAANAGFLTEKCPYYKYEPETVHENETHKLYWDRAIITDKTVPHNRPDITLVDKSNKTTYLIDIAVPNTNNIQTTYTTKITKYQDLRHEVRDIWGMEKILIIPLVISATGIVPKTLATNLEILNIDPNTYIEIQKATILNTCHIVRKFLDMAH

SEQ ID NO: 22265 - protein, 881 aa, Dysdera silvatica
MQGNRSKKLVRKVKMALKRNRIHTRHEEPNKHISEYLDTLKQKLGVYARRLRRYKDCTNKKQQNMQFQANQKAFYRKLRETPANKDKYEAPKPAEIETFWKTLWSNEVQHKSAPWIQQEMEATRGIEEMEYTGITIEELQQVIQRTHNWKAPGIDGIHNFWYKKFTSAHGPLAKELTAIIEDPSKMPEFLCKGITYLLPKDQDTSNPAKYRPITCLNTLYKILTGCISEKISRHSESNNLMTEEQKGCQKGTLGCKEQLTIDSVILEQARKQKRKLNTAYIDYKKAFDSVPHSWLLEILSIYKVHPSIIRFLQSSMKQWRTRLQLNTPDSKIETAEIPIRRGIFQGDALSPQWFCLALNPLSRMLNTSKYGYMLKKDKRNLHKVSHLMYVDDIKLYAPTITQLRQLISITETFSKDIGMEFGLDKCKIQKNSKEDLPGIELEDGRLLKTLDEGETYKYLGIMQKRQQEHKKVKVQLTQAFQERLRSIVKTKLSGKNTTQAINAYAVPVLTYSFGIIKWSNTELEQLQRKMRTIQRRAGQLHPATAIERQTLPREEGGRGQADLKDLHDKQIQSMRQYFQLKSPRSPLIQAIIQADANYTPLNLCSTEERVLETANEQKLRTWAGKPLHGRHYNDLQQPHVDKKASNSWLAKGTLQPETEGFMLAIQDQVIATRNNQKFIQRKDIESDKCRHCHAASETIQHVMAGCKILAQSDYKHRHDQVAKIVHQKLAANAGFLTEKCPYYKYEPETVHENETHKLYWDRAIITDKTVPHNRPDITLVDKSNKTTYLIDIAVPNTNNIQTTYTTKITKYQDLRHEVRDIWGMEKILIIPLVISATGIVPKTLATNLEILNIDPNTYIEIQKATILNTCHIVRKFLDMAH

SEQ ID NO: 22266 - protein, 1084 aa, Dysdera silvatica
MTNYRPTLHAKFAQQYPHLDISIERITTQRRNIITRNLLAEPILQRLRDEVANDLANTSTSVANPEAPASSAREPLQTSIEQEERRDVEKMEEGFQCALAEYEGSDAAARPRIPRQPEYWKLCAATKILNEHTLPLHLQKHNSLQEIHTAIYCAAVAASRANGYEVRNEGRSNRGNKAQPPWQVRLQKRIEELRSSIGRITQYMQGNRGKKLVRKVKMALKRNRIHTRHEEPNKHISEYLDTLKQKLGVYARRLRRYKDYTNRKQQNMQFQANQKAFYRKLRETPANKDKYEAPKPAEIETFWKTLWSNEVQHKSAPWIQQEMEATRGIEEMEYTRITIEELQQVIQRTHNWKAPGIDGIHNFWYKKFTSAHGPLAKELTAIIEDPSKMPEFLCKGITYLLPKDQDTSNPAKYRPITCLNTLYKILTGCISEKISRHSESNNLMAEEQKGCQKGTLGCKEQLTIDSVILEQARKQKRKLNTAYIDYKKAFDSVPHSWLLEILSIYKVHPSIIRFLQSSMKQWRTRLQLNTPDSKIETAEIPIRRGIFQGDALSPQWFCLALNPLSRMLNTSKYGYMLKKDKRNLHKVSHLMYVDDIKLYAPTITQLRQLISITETFSKDIGMEFGLDKCKIQKNSKEDLPGIELEDGRLLKTLDEGETYKYLGIMQKRQQEHKKVKVQLTQAFQERLRSIVKTKLSGKNTTQAINAYAVPVLTYSFGIIKWSNTELEQLQRKMRTIQRRAGQLHPATAIERQTLPREEGGRGQADLKDLHDKQIQSMRQYFQLKSPRSPLIQAIIQADANYTPLNLCSTEERVLETANEQKLRTWAGKPLHGRHYNDLQQPHVDKKASNSWLAKGTLQPETEGFMLAIQDQVIATRNNQKFIQRKDIESDKCRHCHAASETIQHVMAGCKILAQSDYKHRHDQVAKIVHQKLAANAGFLTEKCPYYKYEPETVHENETHKLYWDRAIITDKTVPHNRPDITLVDKSNKTTYLIDIAVPNTNNIQTTYTTKITKYQDLRHEVRDIWGMEKILIIPLVISATGIVPKTLATNLEILNIDPNTYIEIQKATILNTCHIVRKFLDMAH

SEQ ID NO: 22267 - protein, 1170 aa, Dysdera silvatica
MKYEYVGYGKDLNINKKIYIYTSIWRRGHGNLTFFPYWDSNPSPSEHLVVRGGHLYIYLHAHYIWTIDMNTYIMRTYYTITKLETDMTNYRPTLHAKFAQQYPHLDISIERITTQRRNIITRNLLAEPILQRLRDEVANDLANTSTSVANPEAPASSAREPLQPSIEEEERRDVEKMEEGFQCALAEYEGSDAATRPRIPRQPASWKLCKATKILNEHTLPLHLQNHNSLQEIHTAIYCAAVAASRANGYEVRNEGRSNRGNKAQPPWQVRLQKRIEELRSSIGRITQYMQGNRSKKLVRKVKMALKRNRIHTRHEEPNKHISEYLDTLKQKLGVYARRLRRYKDYTNRKQQNMQFQANQKAFYRKLRETPANKDKYEAPKPAEIETFWKTLWSNEVQHKSAPWIQQEMEATRGIEEMEYTGITIEELQQVIQRTHNWKAPGIDGIHNFWYKKFTSAHGPLAKELTAIIEDPSKMPEFLCKGITYLLPKDQDTSNPAKYRPITCLNTLYKILTGCISEKISRHSESNNLMTEEQKGCQKGTLGCKEQLTIDSVILEQARKQKRKLNTAYIDYKKAFDSVPHSWLLEILSIYKVHPSIIRFLQSSMKQWRTRLQLNTPDSKIETAEIPIRRGIFQGDALSPQWFCLALNPLSRMLNTSKYGYMLKKDKRNLHKVSHLMYVDDIKLYAPTITQLRQLISITETFSKDIGMEFGLDKCKIQKNSKEDLPGIELEDGRLLKTLDEGETYKYLGIMQKRQQEHKKVKVQLTQAFQERLRSIVKTKLSGKNTTQAINAYAVPVLTYSFGIIKWSNTELEQLQRKMRTIQRRAGQLHPATAIERQTLPREEGGRGQADLKDLHDKQIQSMRQYFQLKSPRSPLIQAIIQADANYTPLNLCSTEERVLETANEQKLRTWAGKPLHGRHYNDLQQPHVDKKASNSWLAKGTLQPETEGFMLAIQDQVIATRNNQKFIQRKDIESDKCRHCHAASETIQHVMAGCKILAQSDYKHRHDQVAKIVHQKLAANAGFLTEKCPYYKYEPETVHENETHKLYWDRAIITDKTVPHNRPDITLVDKSNKTTYLIDIAVPNTNNIQTTYTTKITKYQDLRHEVRDIWGMEKILIIPLVISATGIVPKTLATNLEILNIDPNTYIEIQKATILNTCHIVRKFLDMAH

SEQ ID NO: 22268 - protein, 1176 aa, Dysdera silvatica
MNHNENMNGASVVSLLNQNRVRVLSRGASSKNMQQSLLGGVGGCSGASNCTATRTNTAQSALQPSIGATTRAERPRQRMSWTIDMNTYIMRTYYTITKLETDMTNYRPTLHAKFAQQYPHLDISIERITTQRRNIITRNLLAEPILQRLRDEVANDLANTSTSVANPEAPASSAREPLQPSIEEERRDVEKMEEGFQCALAEYEGSDAATRPRIPRQPASWKLCKATKILNEHTLPLHLQNHNSLHEIHTAMYHPFRYSKNEPLTEKQKPFLPWQVRLEKRIEELRSSIGRITQYMQGNRSKKLVRKVKMALKRNRIHTRHEEPNKHISEYLDTLKQKLGVYARRLRRYKDYTNKKQQNMQFQANQKAFYRKLRETPANKDKYEAPKPAEIETFWKTLWSNEVQHKSAPWIQQEMEATRGIEEMEYTGITIEELQQVIQRTHNWKAPGIDGIHNFWYKKFTSAHGPLAKELTAIIEDPSKMPEFLCKGITYLLPKDQDTSNPAKYRPITCLNTLYKILTGCISEKISRHSESNNLMTEEQKGCQKGTLGCKEQLTIDSVILEQARKQKRKLNTAYIDYKKAFDSVPHSWLLEILSIYKVHPSIIRFLQSSMKQWRTRLQLNTPDSKIETAEIPIRRGIFQGDALSPQWFCLALNPLSRMLNTSKYGYMLKKDKRNLHKVSHLMYVDDIKLYAPTITQLRQLISITETFSKDIGMEFGLDKCKIQKNSKEDLPGIELEDGRLLKTLDEGETYKYLGIMQKRQQEHKKVKVQLTQAFQERLRSIVKTKLSGKNTTQAINAYAVPVLTYSFGIIKWSNTELEQLQRKMRTIQRRAGQLHPATAIERQTLPREEGGRGQADLKDLHDKQIQSMRQYFQLKSPRSPLIQAITQADANYTPLNLCSTEERVLETANEQKLRTWAGKPLHGRHYNDLQQPHVDKKASNSWLAKGTLQPETEGFMLAIQDQVIATRNNQKFIQRKDIESDKCRHCHAASETIQHVMAGCKILAQSDYKHRHDQVAKIVHQKLAANAGFLTEKCPYYKFEPETVHDNETNKLYWDRAIITDKTVPHNRPDITLVDKSNKTTYLIDIAVPNTNNIQTTYTTKITKYQDLRHEVRDIWGMEKILIIPLVISATGIVPKTLATNLEILNIDPNTYIEIQKATILNTCHIVRKFLDMAH

SEQ ID NO: 22269 - protein, 881 aa, Dysdera silvatica
MQGNRGKKLVRKVKMALKRNRIHTRHEEPNKHISEYLDTLKQKLGVYARRLRRYKDCTNRKQQNMQFQANQKAFYRKLRETPANKDKYEAPKPAEIETFWKTLWSNEVQHKSAPWIQQEMEATRGIEEMEYTGITIEELQQVIQRTHNWKAPGIDGIHNFWYKKFTSAHGPLAKELTAIIEDPSKMPEFLCKGITYLLPKDQDTSDPAKYRPITCLNTLYKILTGCISEKISRHSESNNLMAEEQKGCQKGTLGCKEQLTIDSVILEQARKQKRKLNTAYIDYKKAFDSVPHSWLLEILSIYKVHPSIIRFLQSSMKQWRTRLQLNTPDSKIETAEIPIRRGIFQGDALSPQWFCLALNPLSRMLNASKYGYMLKKDKRNLHKVSHLMYVDDIKLYAPTITQLRQLISITETFSKDIGMEFGLDKCKIQKNSKEDLPGIELEDGRLLKTLDEGETYKYLGIMQKRQQEHKKVKVQLTQAFQERLRSIVKTKLSGKNTTQAINAYAVPVLTYSFGIIKWSNTELEQLQRKMRTIQRRAGQLHPATAIERQTLPREEGGRGQADLKDLHDKQIQSMRQYFQLKSPRSPLIQAIIQADANYTPLNLCSTEERVLETANEQKLRTWAGKPLHGRHYNDLQQPHVDKKASNSWLAKGTLQPETEGFMLAIQDQVIATRNNQKFIQRKDIESDKCRHCHAASETIQHVMAGCKILAQSDYKHRHDQVAKIVHQKLAANAGFLTEKCPYYKYEPETVHENETHKLYWDRAIITDKTVPHNRPDITLVDKSNKTTYLIDIAVPNTNNIQTTYTTKITKYQDLRHEVRDIWGMEKILIIPLVISATGIVPKTLATNLEILNIDPNTYIEIQKATILNTCHIVRKFLDMAH

SEQ ID NO: 22270 - protein, 999 aa, Dysdera silvatica
MTNIVRSLYPTPLATLVLKHHIYIHVHVQRLRDEVANDLANTSTSVANPEAPAIGAREPLQPSIEEEERRDVEKMEEGFQCALAEYEGSDAATRPRIPRQPASWKLCKATKILNEHTLPLHLQNHNSLHEIHTAIYCAAVAASRANGYEVRNEGRSNRGNKAQPPWQVRLQKRIEELRSSIGRITQYMQGNRGKKLVRKVKMALKRNRIHTRHEEPNKHISEYLDTLKQKLSVYARRLRRYKDYTNRKQQNMQFQANQKAIYRKLRETPANQDKYEAPKPAEIETFWKTLWSNEVQHKSAPWIQQEMEATRGIEEMEYTGITIEELQQVIQRTHNWKASGIDGCISEKISRHSESNNLMAEEQKGCQKGTLGCKEQLTIDSVILEQARKQKRKLNTAYIDYKKAFDSVPHSWLLEILSIYKVHPSIIRFLQSSMKQWRTRLQLNTPDSKIETAEIPIRRGIFQGDALSPQWFCLALNPLSRMLNTSKYGYMLKKDKRNLHKVSHLMYVDDIKLYAPTITQLRQLISITETFSKDIGMEFGLDKCKIQKNSKEDLPGIELEDGRLLKTLDEGETYKYLGIMQKRQQEHKKVKVQLTQAFQERLRSIVKTKLSGKNTTQAINAYAVPVLTYSFGIIKWSNTELEQLQRKMRTIQRRAGQLHPATAIERQTLPREEGGRGQADLKDLHDKQIQSMRQYFQLKSPRSPLIQAIIQADANYTPLNLCSTEERVLETANEQKLRTWAGKPLHGRHYNDLQQPHVDKKASNSWLAKGTLQPETEGFMLAIQDQVIATRNNQKFIQRKDIESDKCRHCHAASETIQHVMAGCKILAQSDYKHRHDQVAKIVHQKLAANAGFLTEKCPYYKYEPETVHENETHKLYWDRAIITDKTVPHNRPDITLVDKSNKTTYLIDIAVPNTNNIQTTYTTKITKYQDLRHEVRDIWGMEKILIIPLVISATGIVPKTLATNLEILNIDPNTYIEIQKATILNTCHIVRKFLDMAH

SEQ ID NO: 22271 - protein, 1186 aa, Dysdera silvatica
MNHNENMNGASVVSLLNQNRVRVLSRGASSKNMQQSLLGGVGGCSGASNCTATRTNTAQSALQPSIGATTRAERPRQRMSWTIDMNTYIMRTYYTITKLETDMTNYRPTLHAKFAQQYPHLDISIERITTQRRNIITRNLLAEPILQRLRDEVANDLANTSTSVANPEAPASSAREPLQPSIEEEERRDVEKMEEGFQCALAEYEGSDAATRPRIPRQPASWKLCKATKILNEHTLPLHLQNHNSLQEIHTAIYCAAVAASRANGYEVRNEGRSNRGNKAQPPWQVRLEKRIEELRSSIGRITQYMQGNRGKKLVRKVKMALKRNRIHTRHEEPNKHISEYLDTLKQKLGVYARRLRRYKDCTNKKQQNMQFQANQKAFYRKLRETPANKDKYEAPKPAEIETFWKTLWSNEVQHKSAPWIQQEMEATRGIEEMEYTGITIEELQQVIQRTHNWKAPGIDGIHNFWYKKFTSAHGPLAKELTAIIEDPSKMPEFLCKGITYLLPKDQDTSNPAKYRPITCLNTLYKILTGCISEKISRHSESNNLMTEEQKGCQKGTLGCKEQLTIDSVILEQARKQKRKLNTAYIDYKKAFDSVPHSWLLEILSIYKVHPSIIRFLQSSMKQWRTRLQLNTPDSKIETAEIPIRRGIFQGDALSPQWFCLALNPLSRMLNTSKYGYMLKKDKRNLHKVSHLMYVDDIKLYAPTITQLRQLISITETFSKDIGMEFGLDKCKIQKNSKEDLPGIELEDGRLLKTLDEGETYKYLGIMQKRQQEHKKVKVQLTQAFQERLRSIVKTKLSGKNTTQAINAYAVPVLTYSFGIIKWTNTELEQLQRKMRTIQRRAGQLHPATAIERQTLPREEGGRGQADLKDLHDKQIQSMRQYFQLKSPRSPLIQAIIQADANYTPLNLCSTEERVLETANEQKLRTWAGKPLHGRHYNDLQQPHVDKKASNSWLAKGTLQPETEGFMLAIQDQVIATRNNQKFIQRKDIESDKCRHCHAASETIQHVMAGCKILAQSDYKHRHDQVAKIVHQKLAANAGFLTEKCPYYKYEPETVHENETHKLYWDRAIITDKTVPHNRPDITLVDKSNKTTYLIDIAVPNTNNIQTTYTTKITKYQDLRHEVRDIWGMEKIFIIPLVISATGIVPKTLATNLEILNIDPNTYIEIQKATILNTCHIVRKFLDMAH

SEQ ID NO: 22272 - protein, 1103 aa, Dysdera silvatica
MSWTIDMNTYIMRTYYTITKLETDMTNYRPTLHAKFAQQYPHLDISIERITTQRRNIITRNLLAEPILQRLRDEVANNLTNTPTNEANLEAESTSVRKPPQPDMEDVEKMEEGFQCALAEYEGSDATTRPRIPHQPASWKLCKATKILNEHTLPLHLQNHNSLQEIHTAIYCAAVAASRANGYEVRNEGRSNRGNKAQPPWQVRLEKRIEELRSSIGRITQYMQGNRGKKLVRKVKMALKRNRIHTRHEEPNKHISEYLDTLKQKLGVYARRLRRYKDYTNKKQQNMQFQANQKAFYRKLRETPANKDKYEAPKPAEIETFWKTLWSNEVQHKSAPWIQQEMEATRGIEEMEYTGITIEELQQVIQRTHNWKAPGIDGIHNFWYKKFTSAHGPLAKELTAIIEDPSKMPEFLCKGITYLLPKDQDTSNPAKYRPITCLNTLYKILTGCISEKISRHSESNNLMTEEQKGCQKGTLGCKEQLTIDSVILEQARKQKRKLNTAYIDYKKAFDSVPHSWLLEILSIYKVHPSIIRFLQSSMKQWRTRLQLNTPDSKIETAEIPIRRGIFQGDALSPQWFCLALNPLSRMLNTSKYGYMLKKDKRNLHKVSHLMYVDDIKLYAPTITQLRQLISITETFSKDIGMEFGLDKCKIQKNSKEDLPGIELEDGRLLKTLDEGETYKYLGIMQKRQQEHKKVKVQLTQAFQERLRSIVKTKLSGKNTTQAINAYAVPVLTYSFGIIKWSNTELEQLQRKMRTIQRRAGQLHPATAIERQTLPREEGGRGQADLKDLHDKQIQSMRQYFQLKSPRSPLIQAIIQADANYTPLNLCSTEERVLETANEQKLRTWAGKPLHGRHYNDLQQPHVDKKASNSWLAKGTLQPETEGFMLAIQDQVIATRNNQKFIQRKDIESDKCRHCHAASETIQHVMAGCKILAQSDYKHRHDQVAKIVHQKLAANAGFLTEKCPYYKYEPETVHENETHKLYWDRAIITDKTVPHNRPDITLVDKSNKTTYLIDIAVPNTNNIQTTYTTKITKYQDLRHEVRDIWGMEKILIIPLVISATGIVPKTLATNLEILNIDPNTYIEIQKATILNTCHIVRKFLDMAH

SEQ ID NO: 22273 - protein, 1165 aa, Dysdera silvatica
MNHNENMNGASVVALLNQNRVRALSRGARSKNMQQSLLGGVGGCSGASNCTATRTNRAHSALQPSIGATTRAERARQRMSWTIDMNTYIMRTYYTITKLETDMTSYRPTLHAKFAQQYPHLDISIERITTQRRNIITRNLLAEPILQRLRDEVANDLANTSTSVANPEVPEAPAIGAREPLQTSIEQEERRDVEKMEEGFQCALADYEGSDATTRPRIPRQPASWKLCKATKILNEHTLPLHLQKHNSLQEIHTAIYCAAVAASRANRYEVRNESRSNRGNKAQPPWQVRLEKRIEELRSSIGRITQYMQGNRGKKLVRKVKMALKRNRIHTRHEEPNKHISEYLDTLKQKLGVYARRLRKYKEFANRKQQNKKFQTNQKAFCRKLQETSASQDKYEAPKPAVIETFWKTLWSNEVQHKSAPWIQQEMEATRGIEEMEYTGITIEELQQVIQRTHNWKASGIDGMHNFWYKKFTSAHVPLAKELTAIIEDPSEMPEFLCKGITYLLPKDQDTSNPAKYRPITCLNTLYKILTGCISEKISRHSESNNLMTEEQKGCQKGTLGCKEQLTIDSVILEQARKQKRKLNTAYIDYKKAFDSVPHSWLLEILSIYKVHPSIIRFLQSSMKQWRTRLQLNTPDSKIETAEIPIRRGIFQGDALSPQWFCLALNPLSRMLNTSKYGYMLKKDKRNLHKVSHLMYVDDIKLYAPTITQLRQLISITETFSKDIGMEFGLDKCKIQKNSKEDLPGIELEDGRLLKTLDEGETYKYLGIMQKRQQEHKKVKVQLTQAFQERLRSIVKTKLSGKNTTQAINAYAVPVLTYSFGIIKWSNTELEQLQRKMRTIQRRAGQLHPATAIERQTLPREEGGRGQADLKDLHDKQIQSMRQYFQLKSPRSPLIQAIIQADANYTPLNLCSTEERVLETANEQKLRTWAGKPLHGRHYNDLQQPHVDKKASNSWLAKGTLQPETEGFMLAIQDQVIATRNNQKFIQRKDIESDKCRHCHAASETIQHVTAGCKILAQSDYKHRHDQVAKIVHQKLAANAGFLTEKCPYYKYEPETVHENETHKLYWDRAIITDKTVPHNRPDITLVDKSNKTTYLIDIAVPNTNNIQTTYTTKITKYQDLRHEVRDIWGMEKILIIPLVISATGIVPKTLATNLEILNIDPNT

SEQ ID NO: 22274 - protein, 994 aa, Dysdera silvatica
MEEDFQCSLAEYEGSDAATRPRIPRQPASWKLCKATKILNEHTLPLHLQNHNSLHEIHTAIYCATVAASRANGYEVRNEGRSNRGNKAQPPWQVRLQKRIEELRSSIGRITQYMQGNRGKKLVRKVKMALKRNRIHTRHEEPNKHISEYLDTLKQKLGVYARRLRRYKDCTNKKQQNMQFQANQKAFYRKLRETPANKDKYEAPKPAEIETFWKTLWSNEVQHKSAPWIQQEMEATRGIEEMEYTGITIEELQQVIQRTHNWKAPGIDGIHNFWYKKFTSAHGPLAKELTAIIEDPSKMPEFLCKGITYLLPKDQDTSNPAKYRPITCLNTLYKILTGCISEKISRHSESNNLMTEEQKGCQKGTLGCKEQLTIDSVILEQARKQKRKLNTAYIDYKKAFDSVPHSWLLEILSIYKVHPSIIRFLQSSMKQWRTRLQLNTPDSKIETAEIPIRRGIFQGDALSPQWFCLALNPLSRMLNTSKYGYMLKKDKRNLHKVSHLMYVDDIKLYAPTITQLRQLISITETFSKDIGMEFGLDKCKIQKNSKEDLPGIELEDGRLLKTLDEGETYKYLGIMQKRQQEHKKVKVQLTQAFQERLRSIVKTKLSGKNTTQAINAYAVPVLTYSFGIIKWSNTELEQLQRKMRTIQRRAGQLHPATAIERQTLPREEGGRGQADLKDLHDKQIQSMRQYFQLKSPRSPLIQAIIQADANYTPLNLCSTEERVLETANEQKLRTWAGKPLHGRHYNDLQQPHVDKKASNSWLAKGTLQPETEGFMLAIQDQVIATRNNQKFIQRKDIESDKCRHCHAASETIQHVMAGCKILAQSDYKHRHDQVAKIVHQKLAANAGFLTEKCPYYKYEPETVHENETHKLYWDRAIITDKTVPHNRPDITLVDKSNKTTYLIDIAVPNTNNIQTTYTTKITKYQDLRHEVRDIWGMEKIFIIPLVISATGIVPKTLATNLEILNIDPNTYIEIQKATILNTCHIVRKFLDMAH

SEQ ID NO: 22275 - protein, 994 aa, Dysdera silvatica
MEEGFQCALAEYEGSDAATRPRIPRQPASWKLCKATKILNEHTLPLHLQKHNSLQEIHTAIYCATVAASRVNGYEVRNEDRNNRGSKTQPPWQVRLEKRIEELRRSIGRITQYMQGNRSKKLVRKVKMALKRNRIHTRHEEPNKHISEYLDTLKQKLGVYARRLRRYKDCTNRKQQNMQFQANQKAFYRKLQETSASQDKYEAPKPAVIETFWKTLWSNEVQHKSAPWIQQEMEATRGIEEMEYTGITIEELQQVIQRTHNWKAPGIDGIHNFWYKKFTSAHGPLAKELTAIIEDPSKMPEFLCKGITYLLPKDQDTSNPAKYRPITCLNTLYKILTGCISEKISRHSESNNLMTEEQKGCQKGTLGCKEQLTIDSVILEQARKQKRKLNTAYIDYKKAFDSVPHSWLLEILSIYKVHPSIIRFLQSSMKQWRTRLQLNTPDSKIESAEIPIRRGIFQGDALSPQWFCLALNPLSRMLNTSKYGYMLKKDKRNLHKVSHLMYVDDIKLYAPTITQLRQLISITETFSKDIGMEFGLDKCKIQKNSKEDLPGIELEDGRLLKTLDEGETYKYLGIMQKRQQEHKKVKVQLTQAFQERLRSIVKTKLSGKNTTQAINAYAVPVLTYSFGIIKWSNTELEQLQRKMRTIQRRAGQLHPATAIERQTLPREEGGRGQADLKDLHDKQIQSMRQYFQLKSPRSPLIQAIIQADANYTPLNLCSTEERVLETANEQKLRTWAGKPLHGRHYNDLQQPHVDKKASNSWLAKGTLQPETEGFMLAIQDQVIATRNNQKFIQRKDIESDKCRHCHAASETIQHVMAGCKILAQSDYKHRHDQVAKIVHQKLAANAGFLTEKCPYYKYEPETVHENETHKLYWDRAIITDKTVPHNRPDITLVDKSNKTTYLIDIAVPNTNNIQTTYTTKITKYQDLRHEVRDIWGMEKIFIIPLVISATGIVPKTLATNLEILNIDPNTYIEIQKATILNTCHIVRKFLDMAH

SEQ ID NO: 22276 - protein, 1185 aa, Dysdera silvatica
MNHNENMNGASVVALLNQNRIRTLSRGVCSKNMQQSLLGGAGSCSGAYNCTATRTNRAHSALQPSIGATTRAERARQRMSWTIDMNTYIMRTYYTITKLETDMTNYRPTLHAKFAQQYPHLDISIERITTQRRNIITRNLLAQPILQRLRDEVANDLVNTSTSVANPEPPVSSPREPLQTSIEEERRDVEKMEEGFQCALAEYEGSDAAARPRIPRQPEYWKLCAATKILNEHTLPLHLQKHNSLQEIHTAIYCATVAASRVNGYEVRNEDRNNRGSKAQPPWQVRLEKRIEELRSSIGRITQYMQGNRSKKLVRKVKMALKRNRIHTRHEEPNKHISEYLDTLKQKLGVYARRLRRYKDCTNRKQQNMQFQANQKAFYRKLRETPANKDKYESPQPAVIETFWKTLWSNEVQHKSAPWIQQEMEATRGIEEMEYTGITIEELQQVIQRTHNWKAPGIDGIHNFWYKKFTSAHGPLAKELTAIIEDPSKMPEFLCKGITYLLPKDQDTSNPAKYRPITCLNTLYKILTGCISEKISRHSESNNLMAEEQKGCQKGTLGCKEQLTIDSVILEQARKQKRKLNTAYIDYKKAFDSVPHSWLLEILSIYKVHPSIIRFLQSSMKQWRTRLQLNTPDSKIESAEIPIRRGIFQGDALSPQWFCLALNPLSRMLNTSKYGYMLKKDKRNLHKVSHLMYVDDIKLYAPTITQLRQLISITETFSKDIGMEFGLDKCKIQKNSKEDLPGIELEDGRLLKTLDEGETYKYLGIMQKRQQEHKKVKVQLTQAFQERLRSIVKTKLSGKNTTQAINAYAVPVLTYSFGIIKWSNTELEQLQRKMRTIQRRAGQLHPATAIERQTLPREEGGRGQADLKDLHDKQIQSMRQYFQLKSPRSPLIQAIIQADANYTPLNLCSTEERVLETANEQKLRTWAGKPLHGRHYNDLQQPHVDKKASNSWLAKGTLQPETEGFMLAIQDQVIATRNNQKFIQRKDIESDKCRHCHAASETIQHVMAGCKILAQSDYKHRHDQVAKIVHQKLAANAGFLTEKCPYYKYEPETVHENETHKLYWDRAIITDKTVPHNRPDITLVDKSNKTTYLIDIAVPNTNNIQTTYTTKITKYQDLRHEVRDIWGMEKILIIPLVISATGIVPKTLATNLEILNIDPNTYIEIQKATILNTCHIVRKFLDMAH

SEQ ID NO: 22277 - protein, 988 aa, Dysdera silvatica
MNHNENMNGASVVSLLNQNRVRVLSRGASSKNMQQSLLGGVGGCSGASNCTATRTNTAQSALQPSIGATTRAERPRQRMSWTIDMNTYIMRTYYTITKLETDMTNYRPTLHAKFAQQYPHLDISIERITTQRRNIITRNLLAEPILQRLRDEVANDLANTSTSVANPEAPASSAREPLQPSIEEERRDVEKMEEGFQCALAEYEGSDAATRPRIPRQPASWKLCKATKILNEHTLPLHLQNHNSLQEIHTAIYCAAVAASRVNGYEVRNEGRSNRGNKAQPPWQVRLEKRIEELRSSIGRITQYMQGNRSKKLVRKVKMALKRNRIHTRHEEPNKHISEYLDTLKQKLGVYARRLRRYKDHKYQQLTIDSVILEQARKQKRKLNTAYIDYKKAFDSVPHSWLLEILSIYKVHPSIIRFLQSSMKQWRTRLQLNTPDSKIETAEIPIRRGIFQGDALSPQWFCLALNPLSRMLNTSKYGYMLKKDKRNLHKVSHLMYVDDIKLYAPTITQLRQLISITETFSKDIGMEFGLDKCKIQKNSKEDLPGIELEDGRLLKTLDEGETYKYLGIMQKRQQEHKKVKVQLTQAFQERLRSIVKTKLSGKNTTQAINAYAVPVLTYSFGIIKWSNTELEQLQRKMRTIQRRAGQLHPATAIERQTLPREEGGRGQADLKDLHDKQIQSMRQYFQLKSPRSPLIQAIIQADANYTPLNLCSTEERVLETANEQKLRTWAGKPLHGRHYNDLQQPHVDKKASNSWLAKGTLQPETEGFMLAIQDQVIATRNNQKFIQRKDIESDKCRHCHAASETIQHVMAGCKILAQSDYKHRHDQVAKIVHQKLAANAGFLTEKCPYYKYEPETVHENETHKLYWDRAIITDKTVPHNRPDITLVDKSNKTTYLIDIAVPNTNNIQTTYTTKITKYQDLRHEVRDIWGMEKIFIIPLVISATGIVPKTLATNLEILNIDPNTYIEIQKATILNTCHIVRKFLDMAH

SEQ ID NO: 22278 - protein, 1157 aa, Dysdera silvatica
MNHNENMNGASVVSLLNQNRVRTLSRGASSKNMQQSLLGGVGGCSGASNCTATRTNTAQSALQPSIGATTRAERPRQRMSWTIDMNTYIMRTYYTITKLETDMTNYRPTLHAKFAQQYPHLDISIERITTQRRNIITRNLLAEPILQRLRDEVANDLANTSTSVANPEAPASSAREPLQPSIEEEERRDVEKMEEGFQCALAEYEGSDAATRPRIPRQPASWKLCKATKILNEHTLPLHLQNHNSLQEIHTAIYCAAVAASRANGYEVRNEGRSNRGNKAQPPWQVRLEKRIEELRSSIGRITQYMQGNRGKKLVRKVKMALKRNRIHTRHEEPNKHISEYLDTLKQKLGVYARRLRRYKDYTNKKQQNMQFQANQKAFYRKLRETPANKDKYEAPKPAEIETFWKTLWSNEVQHKSAPWIQQEMEATRGIEEMEYTGITIEELQQVIQRTHNWKAPGIDGIHNFWYKKFTSAHGPCRPTSNPAKYRPITCLNTLYKILTGCISEKISRHSESNNLMTEEQKGCQKGTLGCKEQLTIDSVILEQARKQKRKLNTAYIDYKKAFDSVPHSWLLEILSIYKVHPSIIRFLQSSMKQWRTRLQLNTPDSKIETAEIPIRRGIFQGDALSPQWFCLALNPLSRMLNTSKYGYMLKKDKRNLHKVSHLMYVDDIKLYAPTITQLRQLISITETFSKDIGMEFGLDKCKIQKNSKEDLPGIELEDGRLLKTLDEGETYKYLGIMQKRQQEHKKVKVQLTQAFQERLRSIVKTKLSGKNTTQAINAYAVPVLTYSFGIIKWSNTELEQLQRKMRTIQRRAGQLHPATAIERQTLPREEGGRGQADLKDLHDKQIQSMRQYFQLKSPRSPLIQAIIQADANYTPLNLCSTEERVLETANEQKLRTWAGKPLHGRHYNDLQQPHVDKKASNSWLAKGTLQPETEGFMLAIQDQVIATRNNQKFIQRKDIESDKCRHCHAASETIQHVMAGCKILAQSDYKHRHDQVAKIVHQKLAANAGFLTEKCPYYKYEPETVHENETHKLYWDRAIITDKTVPHNRPDITLVDKSNKTTYLIDIAVPNTNNIQTTYTTKITKYQDLRHEVRDIWGMEKILIIPLVISATGIVPKTLATNLEILNIDPNTYIEIQKATILNTCHIVRKFLDMAH

SEQ ID NO: 22279 - protein, 1186 aa, Dysdera silvatica
MNHNENMNGASVVALLNQNRVRVLSRGASSKNMQQSLLGGVGGCSGASNCTATRTNTAQSALQPSIGATTRAERPRQRMSWTIDMNTYIMRTYYTITKLETDMTNYRPTLHAKFAQQYPHLDISIERITTQRRNIITRNLLAEPILQRLRDEVANDLANTSTSVANPEAPASSAREPLQPSIEEEERRDVEKMEEGFQCALAEYEGSDAATRPRIPRQPASWKLCKATKILNEHTLPLHLQNHNSLQEIHTAIYCAAVAASRANGYEVRNEGRSNRGNKAQPPWQVRLQKRIEELRSSIGRITQYMQGNRGKKLVRKVKMALKRNRIHTRHEEPNKHISEYLDTLKQKLGVYARRLRRYKDYTNKKQQNMQFQANQKAFYRKLRETPANKDKYEAPKPAEIETFWKTLWSNEVQHKSAPWIQQEMEATRGIEEMEYTGITIEELQQVIQRTHNWKAPGIDGIHNFWYKKFTSAHGPLAKELTAIIEDPSKMPEFLCKGITYLLPKDQDTSNPAKYRPITCLNTLYKILTGCISEKISRHSESNNLMTEEQKGCQKGTLGCKEQLTIDSVILEQARKQKRKLNTAYIDYKKAFDSVPHSWLLEILSIYKVHPSIIRFLQSSMKQWRTRLQLNTPDSKIETAEIPIRRGIFQGDALSPQWFCLALNPLSRMLNTSKYGYMLKKDKRNLHKVSHLMYVDDIKLYAPTITQLRQLISITETFSKDIGMEFGLDKCKIQKNSKEDLPGIELEDGRLLKTLDEGETYKYLGIMQKRQQEHKKVKVQLTQAFQERLRSIVKTKLSGKNTTQAINAYAVPVLTYSFGIIKWSNTELEQLQRKMRTIQRRAGQLHPATAIERQTLPREEGGRGQADLKDLHDKQIQSMRQYFQLKSPRSPLIQAIIQADANYTPLNLCSTEERVLETANEQKLRTWAGKPLHGRHYNDLQQPHVDKKASNSWLAKGTLQPETEGFMLAIQDQVIATRNNQKFIQRKDIESDKCRHCHAASETIQHVMAGCKILAQSDYKHRHDQVAKIVHQKLAANAGFLTEKCPYYKYEPETVHENETHKLYWDRAIITDKTVPHNRPDITLVDKSNKTTYLIDIAVPNTNNIQTTYTTKITKYQDLRHEVRDIWGMEKILIIPLVISATGIVPKTLATNLEILNIDPNTYIEIQKATILNTCHIVRKFLDMAH

SEQ ID NO: 22280 - protein, 994 aa, Dysdera silvatica
MEEGFQCALAEYEGSDAATRPRIPRQPASWKLCKATKILNEHTLPLHLQNHNSLQEIHTAIYCAAVAASRANGYEVRNEGRSNRGNKAQPPWQVRLEKRIEELRSSIGRITQYMQGNRSKKLVRKVKMALKRNRIHTRHEEPNKHISEYLDTLKQKLGVYARRLRRYKDYTNRKQQNMQFQANQKAFYRKLRETPANKDKYEAPKPAEIETFWKTLWSNEVQHKSAPWIQQEMEATRGIEEMEYTGITIEELQQVIQRTHNWKAPGIDGIHNFWYKKFTSAHGPLAKELTAIIEDPSKMPEFLCKGITYLLPKDQDTSNPAKYRPITCLNTLYKILTGCISEKISRHSESNNLMTEEQKGCQKGTLGCKEQLTIDSVILEQARKQKRKLNTAYIDYKKAFDSVPHSWLLEILSIYKVHPSIIRFLQSSMKQWRTRLQLNTPDSKIETAEIPIRRGIFQGDALSPQWFCLALNPLSRMLNTSKYGYMLKKDKRNLHKVSHLMYVDDIKLYAPTITQLRQLISITETFSKDIGMEFGLDKCKIQKNSKEDLPGIELEDGRLLKTLDEGETYKYLGIMQKRQQEHKKVKVQLTQAFQERLRSIVKTKLSGKNTTQAINAYAVPVLTYSFGIIKWSNTELEQLQRKMRTIQRRAGQLHPATAIERQTLPREEGGRGQADLKDLHDKQIQSMRQYFQLKSPRSPLIQAIIQADANYTPLNLCSTEERVLETANEQKLRTWAGKPLHGRHYNDLQQPHVDKKASNSWLAKGTLQPETEGFMLAIQDQVIATRNNQKFIQRKDIESDKCRHCHAASETIQHVMAGCKILAQSDYKHRHDQVAKIVHQKLAANAGFLTEKCPYYKYEPETVHENETHKLYWDRAIITDKTVPHNRPDITLVDKSNKTTYLIDIAVPNTNNIQTTYTTKITKYQDLRHEVRDIWGMEKILIIPLVISATGIVPKTLATNLEILNIDPNTYIEIQKATILNTCHIVRKFLDMAH

SEQ ID NO: 22281 - protein, 1191 aa, Dysdera silvatica
MSHVQESQLLEFRRIFRILYIYIYRVRTLSRGVRSKNMQQSLLGGAGGCSGASNCTATRTNTAQSALQPNTGTTTRAERPRQRMSWTIDMNTYIMRTYYTITKLETDMTNYRPTLHAKFAQQYPHLDISIERITTQRRNIITRNLLAEPILQRLRDEVANDLANTSTSVANPEAPASSAREPLQPSIEEEERRDVEKMEEGFQCALAEYEGSDAATRPRIPRQPASWKLCKATKILNEHTLPLHLQNHNSLHEIHTAIYCAAIAASRANGCEVRNEGRSNRGNKAQPPWQVRLEKRIEELRSSIGRITQYMQGNRGKKLVRKVKMALKRNRIHTRHEEPNKHISEYLDTLKQKLGVYARRLRRYKDCTNKKQQNMQFQANQKAFYRKLRETPANQDKYEAPKPAEIETFWKTLWSNEVQHKSAPWIQQEMEATRGIEEMEYTGITIEELQQVIQRTHNWKAPGIDGIHNFWYKKFTSAHGPLAKELTAIIEDPSKMPEFLCKGITYLLPKDQDTSNPAKYRPITCLNTLYKILTGCISEKISRHSESNNLMTEEQKGCQKRTLGCKEQLTIDSVILEQARKQKRKLNTAYIDYKKAFDSVPHSWLLEILSIYKVHPSIIRFLQSSMKQWRTRLQLNTPDSKIETAEIPIRRGIFQGDALSPQWFCLALNPLSRMLNTSKYGYMLKKDKRNLHKVSHLMYVDDIKLYAPTITQLRQLISITETFSKDIGMEFGLDKCKIQKNSKEDLPGIELEDGRLLKTLDEGETYKYLGIMQKRQQEHKKVKVQLTQAFQERLRSIVKTKLSGKNTTQAINAYAVPVLTYSFGIIKWSNTELEQLQRKMRTIQRRAGQLHPATAIERQTLPREEGGRGQADLKDLHDKQIQSMRQYFQLKSPRSPLIQAIIQADANYTPLNLCSTEERVLETANEQKLRTWAGKPLHGRHYNDLQQPHVDKKASNSWLAKGTLQPETEGFMLAIQDQVIATRNNQKFIQRKDIESDKCRHCHAASETIQHVMAGCKILAQSDYKHRHDQVAKIVHQKLAANAGFLTEKCPYYKYEPETVHENETHKLYWDRAIITDKTVPHNRPDITLVDKSNKTTYLIDIAVPNTNNIQTTYTTKITKYQDLRHEVRDIWGMEKILIIPLVISATGIVPKTLATNLEILNIDPNTYIEIQKATILNTCHIVRKFLDMAH

SEQ ID NO: 22282 - protein, 881 aa, Dysdera silvatica
MQGNRGKKLVRKVKMALKRNRMHTRHEEPNKHIAEYLDTLKQKLGVYARRLRRYKDCTNKKQQNMQFQANQKAFYRKLQETPANKDKYEAPKPAVIETFWKTLWSNEVQHKSAPWIQQEMEATRGIEEMEYTGITIEELQQVIQRTHNWKAPGIDGIHNFWYKKFTSIHGPLAKELTAIIEDPSEMPEFLCKGITYLLPKDQDKSNPAKYRPITCLNTLYKILTGCISEKISRHSESNNLMTEEQKGCQKGTLGCKEQLTIDSVILEQARKQKRKLNTAYIDYKKAFDSVPHSWLLEILSIYKVHPSIIRFLQSSMKQWRTRLQLNTPDSKIKTAEIPIRRGIFQGDALSPQWFCLALNPLSRMLNTSKYGYMLKKDKRNLHKVSHLMYVDDIKLYAPTITQLRQLISITETFSKDIGMEFGLDKCKIQKNSKEDLPGIELEDGRLLKTLDEGETYKYLGIMQKRQQEHKKVKVQLTQAFQERLRSIVKTKLSGKNTTQAINAYAVPVLTYSFGIIKWSNTELEQLQRKMRTIQRRAGQLHPATAIERQTLPREEGGRGQADLKDLHDKQIQSMRQYFQLKSPRSPLIQAIIQADANYTPLNLCSTEERVLETANEQKLRTWAGKPLHGRHYNDLQQPHVDKKASNSWLAKGTLQPETEGFMLAIQDQVIATRNNQKFIQRKDIESDKCRHCHAASETIQHVMAGCKILAQSDYKHRHDQVAKIVHQKLAANAGFLTEKCPYYKYEPETVHENETHKLYWDRAIITDKTVPHNRPDITLVDKSNKTTYLIDIAVPNTNNIQTTYTTKITKYQDLRHEVRDIWGMEKILIIPLVISATGIVPKTLATNLEILNIDPNTYIEIQKATILNTCHIVRKFLDMAH

SEQ ID NO: 22283 - protein, 881 aa, Dysdera silvatica
MQGNRSKKLVRKVKMALKRNRIHTRHEEPNKHISEYLDTLKQKLGVYARRLRRYKDYTNRKQQNMQFQANQKAFYRKLRETPANKDKYEAPKPAEIETFWKTLWSNEVQHKSAPWIQQEMEATRGIEEMEYTGITIEELQQVIQRTHNWKAPGIDGIHNFWYKKFTSAHGPLAKELTAIIEDPSKMPEFLCKGITYLLPKDQDTSNPAKYRPITCLNTLYKILTGCISEKISRHSESNNLMTEEQKGCQKGTLGCKEQLTIDSVILEQARKQKRKLNTAYIDYKKAFDSVPHSWLLEILSIYKVHPSIIRFLQSSMKQWRTRLQLNTPDSKIETAEIPIRRGIFQGDALSPQWFCLALNPLSRMLNTSKYGYMLKKDKRNLHKVSHLMYVDDIKLYAPTITQLRQLISITETFSKDIGMEFGLDKCKIQKNSKEDLPGIELEDGRLLKTLDEGETYKYLGIMQKRQQEHKKVKVQLTQAFQERLRSIVKTKLSGKNTTQAINAYAVPVLTYSFGIIKWSNTELEQLQRKMRTIQRRAGQLHPATAIERQTLPREEGGRGQADLKDLHDKQIQSMRQYFQLKSPRSPLIQAIIQADANYTPLNLCSTEERVLETANEQKLRTWAGKPLHGRHYNDLQQPHVDKKASNSWLAKGTLQPETEGFMLAIQDQVIATRNNQKFIQRKDIESDKCRHCHAASETIQHVTAGCKILAQSDYKHRHDQVAKIVHQKLAANAGFLTEKCPYYKYEPETVHENETHKLYWDRAIITDKTVPHNRPDITLVDKSSKTTYLIDIAVPNTNNIQTTYTTKITKYQDLRHEVRDIWGMEKILIIPLVISATGIVPKTLATNLEILNIDPNTYIEIQKATILNTCHIVRKFLDMAH

SEQ ID NO: 22284 - protein, 994 aa, Dysdera silvatica
MEEGFQCALAEYEGSDAATRPRIPRQPASWKLCKATKILNEHTLPLHLQNHNSLHEIHTAIYCAAIAASRANGYEVRNEGRNNRGNKAQPPWQVRLEKRIKELRSSIGRITQYMQGNRGKKLVRKVKMALKRNRIHTRHEEPNKHISEYLDTLKQKLGVYARRLRRYKDCTNKKQQNMQFQANQKAFYRKLRETPANKDKYEAPKPAEIETFWKTLWSNEVQHKSAPWIQQEMEATRGIEEMEYTGITIEELQQVIQRTHNWKAPGIDGIHNFWYKKFTSAHGPLAKELTAIIEDPSKMPEFLCKGITYLLPKDQDTSNPAKYRPITCLNTLYKILTGCISEKISRHSESNNLMTEEQKGCQKGTLGCKEQLTIDSVILEQARKQKRKLNTAYIDYKKAFDSVPHSWLLEILSIYKVHPSIIRFLQSSMKQWRTRLQLNTPDSKIETAEIPIRRGIFQGDALSPQWFCLALNPLSRMLNTSKYGYMLKKDKRNLHKVSHLMYVDDIKLYAPTITQLRQLISITETFSKDIGMEFGLDKCKIQKNSKEDLPGIELEDGRLLKTLDEGETYKYLGIMQKRQQEHKKVKVQLTQAFQERLRSIVKTKLSGKNTTQAINAYAVPVLTYSFGIIKWSNTELEQLQRKMRTIQRRAGQLHPATAIERQTLPREEGGRGQADLKDLHDKQIQSMRQYFQLKSPRSPLIQAIIQADANYTPLNLCSTEERVLETANEQKLRTWAGKPLHGRHYNDLQQPHVDKKASNSWLAKGTLQPETEGFMLAIQDQVIATRNNQKFIQRKDIESDKCRHCHAASETIQHVMAGCKILAQSDYKHRHDQVAKIVHQKLAANAGFLTEKCPYYKYEPETVHENETHKLYWDRAIITDKTVPHNRPDITLVDKSNKTTYLIDIAVPNTNNIQTTYTTKITKYQDLRHEVRDIWGMEKIFIIPLVISATGIVPKTLATNLEILNIDPNTYIEIQKATILNTCHIVRKFLDMAH

SEQ ID NO: 22285 - protein, 1116 aa, Dysdera silvatica
MDNRYEHLHHAHLLYDYKAGNRHDKLQTHTSRQIRTTVPTLHAKFAQQYPHLDISIERITTQRRNIITRNLLAEPILQRLRDEVANDLANTSTSVANPEAPASSAREPLQPSIEEERRDVEKMEEGFQCALAEYEGSDAATRPRIPRQPASWKLCKATKILNEHTLPLHLQNHNSLQEIHTAIYCAAVAASRANGYEVRNEGRSNRGNKAQPPWQVRLEKRIEELRSSIGRITQYMQGNRGKKLVRKVKMALKRNRIHTRHEEPNKHISEYLDTLKQKLGVYARRLRRYKDYTNKKQQNMQFQANQKAFYRKLRETPANKDKYEAPKPAEIETFWKTLWSNEVQHKSAPWIQQEMEATRGIEEMEYTGITIEELQQVIQRTHNWKAPGIDGIHNFWYKKFTSAHGPLAKELTAIIEDPSKMPEFLCKGITYLLPKDQDTSNPAKYRPITCLNTLYKILTGCISEKISRHSESNNLMTEEQKGCQKGTLGCKEQLTIDSVILEQARKQKRKLNTAYIDYKKAFDSVPHSWLLEILSIYKVHPSIIRFLQSSMKQWRTRLQLNTPDSKIETAEIPIRRGIFQGDALSPQWFCLALNPLSRMLNTSKYGYMLKKDKRNLHKVSHLMYVDDIKLYAPTITQLRQLISITETFSKDIGMEFGLDKCKIQKNSKEDLPGIELEDGRLLKTLDEGETYKYLGIMQKRQQEHKKVKVQLTQAFQERLRSIVKTKLSGKNTTQAINAYAVPVLTYSFGIIKWSNTELEQLQRKMRTIQRRAGQLHPATAIERQTLPREEGGRGQADLKDLHDKQIQSMRQYFQLKSPRSPLIQAIIQADANYTPLNLCSTEERVLETANEQKLRTWAGKPLHGRHYNDLQQPHVDKKASNSWLAKGTLQPETEGFMLAIQDQVIATRNNQKFIQRKDIESDKCRHCHAASETIQHVMAGCKILAQSDYKHRHDQVAKIVHQKLAANAGFLTEKCPYYKYEPETVHENETHKLYWDRAIITDKTVPHNRPDITLVDKSNKTTYLIDIAVPNTNNIQTTYTTKITKYQDLRHEVRDIWGMEKILIIPLVISATGIVPKTLATNLEILNIDPNTYIEIQKATILNTCHIVRKFLDMAH

SEQ ID NO: 22286 - protein, 1108 aa, Dysdera silvatica
MSWTIDMNTYIMRTYYTITKLETDMTNYRPTLHAKFAQQYPHLDISIERITTQRRNIITRNLLAEPILQRLRDEVANDLANTSTSVANPEAPAIGAREPLQPSIEEEERRDVEKMEEGFQCALAEYEGSDAATRPRIPRQPASWKLCKATKILNEHTLPLHLQNHNSLQEIHTAIYCAAVAASRANGYEVRNEGRSNRGNKAQPPWQVRLEKRIEELRSSIGRITQYMQGNRSKKLVRKVKMALKRNRIHTRHEEPNKHISEYLDTLKQKLGVYARRLRRYKDYTNRKQQNMQFQANQKAFYRKLRETPANKDKYEAPKPAEIETFWKTLWSNEVQHKSAPWIQQEMEATRGIEEMEYTGITIEELQQVIQRTHNWKAPGIDGIHNFWYKKFTSAHGPLAKELTAIIEDPSKMPEFLCKGITYLLPKDQDTSNPAKYRPITCLNTLYKILTGCISEKISRHSESNNLMTEEQKGCQKGTLGCKEQLTIDSVILEQARKQKRKLNTAYIDYKKAFDSVPHSWLLEILSIYKVHPSIIRFLQSSMKQWRTRLQLNTPDSKIETAEIPIRRGIFQGDALSPQWFCLALNPLSRMLNTSKYGYMLKKDKRNLHKVSHLMYVDDIKLYAPTITQLRQLISITETFSKDIGMEFGLDKCKIQKNSKEDLPGIELEDGRLLKTLDEGETYKYLGIMQKRQQEHKKVKVQLTQAFQERLRSIVKTKLSGKNTTQAINAYAVPVLTYSFGIIKWSNTELEQLQRKMRTIQRRAGQLHPATAIERQTLPREEGGRGQADLKDLHDKQIQSMRQYFQLKSPRSPLIQAIIQADANYTPLNLCSTEERVLETANEQKLRTWAGKPLHGRHYNDLQQPHVDKKASNSWLAKGTLQPETEGFMLAIQDQVIATRNNQKFIQRKDIESDKCRHCHAASETIQHVMAGCKILAQSDYKHRHDQVAKIVHQKLAANAGFLTEKCPYYKYEPETVHENETHKLYWDRAIITDKTVPHNRPDITLVDKSNKTTYLIDIAVPNTNNIQTTYTTKITKYQDLRHEVRDIWGMEKILIIPLVISATGIVPKTLATNLEILNIDPNTYIEIQKATILNTCHIVRKFLDMAH

SEQ ID NO: 22287 - protein, 944 aa, Dysdera silvatica
MWDCLVCYDCSIPVKLVCFVLMHGLWLIFVVRAFFCQKASIRCQFLVDYFRYLIVSMFGRYFAGLRYLDQSYIVYIYIYMYIYMIHTRHEEPNKHISEYLDTLKQKLGVYARRLRRYKDYTNKKQQNMQFQANQKAFYRKLRETPANKDKYEAPKPAEIETFWKTLWSNEVQHKSAPWIQQEMEATRGIEEMEYTGITIEELQQVIQRTHNWKAPGIDGIHNFWYKKFTSAHGPLAKELTAIIEDPSKMPEFLCKGITYLLPKDQDTSNPAKYRPITCLNTLYKILTGCISEKISRHSESNNLMTEEQKGCQKGTLGCKEQLTIDSVILEQARKQKRKLNTAYIDYKKAFDSVPHSWLLEILSIYKVHPSIIRFLQSSMKQWRTRLQLNTPDSKIETAEIPIRRGIFQGDALSPQWFCLALNPLSRMLNTSKYGYMLKKDKRNLHKVSHLMYVDDIKLYAPTITQLRQLISITETFSKDIGMEFGLDKCKIQKNSKEDLPGIELEDGRLLKTLDEGETYKYLGIMQKRQQEHKKVKVQLTQAFQERLRSIVKTKLSGKNTTQAINAYAVPVLTYSFGIIKWSNTELEQLQRKMRTIQRRAGQLHPATAIERQTLPREEGGRGQADLKDLHDKQIQSMRQYFQLKSPRSPLIQAIIQADANYTPLNLCSTEERVLETANEQKLRTWAGKPLHGRHYNDLQQPHVDKKASNSWLAKGTLQPETEGFMLAIQDQVIATRNNQKFIQRKDIESDKCRHCHAASETIQHVMAGCKILAQSDYKHRHDQVAKIVHQKLAANAGFLTEKCPYYKYEPETVHENETHKLYWDRAIITDKTVPHNRPDITLVDKSNKTTYLIDIAVPNTNNIQTTYTTKITKYQDLRHEVRDIWGMEKILIIPLVISATGIVPKTLATNLEILNIDPNTYIEIQKATILNTCHIVRKFLDMAH

SEQ ID NO: 22288 - protein, 983 aa, Dysdera silvatica
MNHNENMNGASVVSLLNQNRVRTLSRGARSKNMQQSLLGGAGSCSGASNCTATRTNTAQSALQPSIGATTRAERPRQRMSWTIDMNTYIMRTYYTITKLETDMTNYRPTLHAKFAQQYPHLDISIERITTQRRNIITRNLLAEPILQRLRDEVANDLANTSTSVANPEAPASSAREPLQPSIEQEERRDVEKMEEGFQCALAEYEGSDAATRPRIPRQPASWKLCKATKILNEHTLPLHLQNHNSLQEIHTAIYCAAVAASRANGYEVRNEGPLAKELTAIIEDPSKMPEFLCKGITYLLPKDQDTSNPAKYRPITCLNTLYKILTGCISEKISRHSESNNLMAEEQKGCQKGTLGCKEQLTIDSVILEQARKQKRKLNTAYIDYKKAFDSVPHSWLLEILSIYKVHPSIIRFLQSSMKQWRTRLQLNTPDSKIETAEIPIRRGIFQGDALSPQWFCLALNPLSRMLNTSKYGYMLKKDKRNLHKVSHLMYVDDIKLYAPTITQLRQLISITETFSKDIGMEFGLDKCKIQKNSKEDLPGIELEDGRLLKTLDEGETYKYLGIMQKRQQEHKKVKVQLTQAFQERLRSIVKTKLSGKNTTQAINAYAVPVLTYSFGIIKWSNTELEQLQRKMRTIQRRAGQLHPATAIERQTLPREEGGRGQADLKDLHDKQIQSMRQYFQLKSPRSPLIQAIIQADANYTPLNLCSTEERVLETANEQKLRTWAGKPLHGRHYNDLQQPHVDKKASNSWLAKGTLQPETEGFMLAIQDQVIATRNNQKFIQRKDIESDKCRHCHAASETIQHVMAGCKILAQSDYKHRHDQVAKIVHQKLAANAGFLTEKCPYYKYEPETVHENETHKLYWDRAIITDKTVPHNRPDITLVDKSNKTTYLIDIAVPNTNNIQTTYTTKITKYQDLRHEVRDIWGMEKILIIPLVISATGIVPKTLATNLEILNIDPNTYIEIQKATILNTCHIVRKFLDMAH

SEQ ID NO: 22289 - protein, 1107 aa, Dysdera silvatica
MSWTIDMNTYIMRTYYTITKLETDMTNYRPTLHAKFAQQYPHLDISIERITTQRRNIITRNLLAEPILQRLRDEVANDLANTSTSVANPEAPASSAREPLQPSIEEERRDVEKMEEGFQCALAEYEGSDAATRPRIPRQPASWKLCKATKILNEHTLPLHLQNHNSLQEIHTAIYCAAVAASRANGYEVRNEGRSNRGNKAQPPWQVRLEKRIEELRSSIGRITQYMQGNRGKKLVRKVKMALKRNRIHTRHEEPNKHISEYLDTLKQKLGVYARRLRRYKDYTNKKQQNMQFQANQKAFYRKLRETPANKDKYEAPKPAEIETFWKTLWSNEVQHKSAPWIQQEMEATRGIEEMEYTGITIEELQQVIQRTHNWKAPGIDGIHNFWYKKFTSAHGPLAKELTAIIEDPSKMPEFLCKGITYLLPKDQDTSNPAKYRPITCLNTLYKILTGCISEKISRHSESNNLMTEEQKGCQKGTLGCKEQLTIDSVILEQARKQKRKLNTAYIDYKKAFDSVPHSWLLEILSIYKVHPSIIRFLQSSMKQWRTRLQLNTPDSKIETAEIPIRRGIFQGDALSPQWFCLALNPLSRMLNTSKYGYMLKKDKRNLHKVSHLMYVDDIKLYAPTITQLRQLISITETFSKDIGMEFGLDKCKIQKNSKEDLPGIELEDGRLLKTLDEGETYKYLGIMQKRQQEHKKVKVQLTQAFQERLRSIVKTKLSGKNTTQAINAYAVPVLTYSFGIIKWSNTELEQLQRKMRTIQRRAGQLHPATAIERQTLPREEGGRGQADLKDLHDKQIQSMRQYFQLKSPRSPLIQAIIQADANYTPLNLCSTEERVLETANEQKLRTWAGKPLHGRHYNDLQQPHVDKKASNSWLAKGTLQPETEGFMLAIQDQVIATRNNQKFIQRKDIESDKCRHCHAASETIQHVMAGCKILAQSDYKHRHDQVAKIVHQKLAANAGFLTEKCPYYKYEPETVHENETHKLYWDRAIITDKTVPHNRPDITLVDKSNKTTYLIDIAVPNTNNIQTTYTTKITKYQDLRHEVRDIWGMEKILIIPLVISATGIVPKTLATNLEILNIDPNTYIEIQKATILNTCHIVRKFLDMAH

SEQ ID NO: 22290 - protein, 1117 aa, Dysdera silvatica
MDNRYEHLHHAHLLYDYKARNRHDKLQTHTSRQIRTTVPTLHAKFAQQYPHLDISIERITTQRRNIITRNLPAEPILQRLRDEVANDLANTSTSVANPEAPAVSAREPLQPIIEEEERRDVEKMEEGFQCALAEYEGPDAATRPRIPRQPASWKLCKATKIPNEHTLPLHLQNHNSLQEIHTAIYCAAIAASRANGYEVRNEGRNNRGNKAQPPWQVRLQKRIEELRRSIGRITQYMQGNRSRKLVRKVKMALKRNRMHTRHEEPNKHISEYLDTLKQKLGVYARRLRRYKDCTNKKQQNMQFQANQKAFYRKLQETPANKDKYEAPKPAVIETFWKTLWSNEVQHKSAPWIQQEMEATRGIEEMEYTGITIEELQQVIQRTHNWKAPGTDGIHNFWYKKFTSIHGPLAKELTAIIEDPSEMPEFLCKGITYLLPKDQDKSNPAKYRPITCLNTLYKILTGCISEKISRHSESNNLMTEEQKGCQKGTLGCKEQLTIDSVILEQARKQKRKLNTAYIDYKKAFDSVPHSWLLEILSIYKVHPSIIRFLQSSMKQWRTRLQLNTPDSKIETAEIPIRRGIFQGDALSPQWFCLALNPLSRMLNTSKYGYMLKKDKRNLHKVSHLMYVDDIKLYAPTITQLRQLISITETFSKDIGMEFGLDKCKIQKNSKEDLPGIEFEDGRLLKILDEGETYKYLGIMQKRQQEHKKVKVQLTQAFQERLRSIVKTKLSGKNTTQAINAYAVPVLTYSFGIIKWTNTELEQLQRKMRTIQRRAGQLHPATAIERQTLPREEGGRGQADLKDLHDKQIQSMRQYFQLKSPRSPLIQAIIQADANYTPLNLCNTEERVLETANEQKLRTWAGKPLHGRHYNDLQQPHVDKKASNSWLAKGTLQPETEGFMLAIQDQVIATRNNQKFIQRKDIESDKCRHCHAASGTIQHVMAGCKILAQSDYKHRHDQVAKIVHQKLAANAGFLTEKCPYYKYEPETVHENETHKLYWDRAIITDKTVPHNRPDITLVDKSNKTTYLIDIAVPNTNNIQTTYITKITKYQDLRHEVRDIWGMEKILIIPLVISATGIVPKTLATNLEILNIDPNTYIEIQKATILNTCHIVRKFLDMAH

SEQ ID NO: 22291 - protein, 977 aa, Dysdera silvatica
MALCPSQSLFPPRMGEENFFLYIYIYIYIHLQNHNFLREIHTAIYCATVAASRVNGYEVRNEDRNNRGSKAQPPWQVRLEKRIEELRSSIGRITQYMQGNRGKKLVRKVKMALKRNRIHTRHEEPNKHISEYLDTLKQKLGVYARRLRRYKDCTNKKQQNMQFQANQKAFYRKLRETPANKDKYEAPKPAEIETFWKTLWSNEVQHKSAPWIQQEMEATRGIEEMEYTGITIEELQQVIQRTHNWKAPGIDGIHNFWYKKFTSAHGPLAKELTAIIEDPSKMPEFLCKGITYLLPKDQDTSNPAKYRPITCLNTLYKILTGCISEKISRHSESNNLMTEEQKGCQKGTLGCKEQLTIDSVILEQARKQKRKLNTAYIDYKKAFDSVPHSWLLEILSIYKVHPSIIRFLQSSMKQWRTRLQLNTPDSKIETAEIPIRRGIFQGDALSPQWFCLALNPLSRMLNASKYGYMLKKDKRNLHKVSHLMYVDDIKLYAPTITQLRQLISITETFSKDIGMEFGLDKCKIQKNSKEDLPGIELEDGRLLKTLDEGETYKYLGIMQKRQQEHKKVKVQLTQAFQERLRSIVKTKLSGKNTTQAINAYAVPVLTYSFGIIKWSNTELEQLQRKMRTIQRRAGQLHPATAIERQTLPREEGGRGQADLKDLHDKQIQSMRQYFQLKSPRSPLIQAIIQADANYTPLNLCSTEERVLETANEQKLRTWAGKPLHGRHYNDLQQPHVDKKASNSWLAKGTLQPETEGFMLAIQDQVIATRNNQKFIQRKDIESDKCRHCHAASETIQHVMAGCKILAQSDYKHRHDQVAKIVHQKLAANAGFLTEKCPYYKYEPETVHENETHKLYWDRAIITDKTVPHNRPDITLVDKSNKTTYLIDIAVPNTNNIQTTYTTKITKYQDLRHEVRDIWGMEKIFIIPLVISATGIVPKTLATNLEILNIDPNTYIEIQKATILNTCHIVRKFLDMAH

SEQ ID NO: 22292 - protein, 1186 aa, Dysdera silvatica
MNHNENMNGASVVSLLNQNRVRVLSRGASSKNMQQSLLGGVGGCSGASNCTATRTNTAQSALQPSIGATTRAERPRQRMSWTIDMNTYIMRTYYTITKLETDMTNYRPTLHAKFAQQYPHLDISIERITTQRRNIITRNLLAEPILQRLRDEVANDLANTSTSVANPEAPASSAREPLQPSIEEEERRDVEKMEEGFQCALAEYEGSDAATRPRIPRQPASWKLCKATKILNEHTLPLHLQNHNSLHEIHTAIYCATVAASRANGCEVRNEGRSNRGNKAQPPWQVRLQKRIEELRSSIGRITQYMQGNRSKKLVRKVKMALKRNRIHTRHEEPNKHISEYLDTLKQKLGVYARRLRRYKDYTNRKQQNMQFQTNQKAFYRKLQETPANQDKYETPKPAEIETFWKTLWSNEVQHKSAPWIQQEMEAARGIEEMEYTGITIEELQQVIQRTHNWKAPGIDGIHNFWYKKFTSAHGPLAKELTAIIEDPSKMPEFLCKGITYLLPKDQDTSNPAKYRPITCLNTLYKILTGCISEKISRHSESNNLMTEEQKGCQKGTLGCKEQLTIDSVILEQARKQKRKLNTAYIDYKKAFDSVPHSWLLEILSIYKVHPSIIRFLQSSMKQWRTRLQLNTPDSKIETAEIPIRRGIFQGDALSPQWFCLALNPLSRMLNTSKYGYMLKKDKRNLHKVSHLMYVDDIKLYAPTITQLRQLISITETFSKDIGMEFGLDKCKIQKNSKEDLPGIELEDGRLLKTLDEGETYKYLGIMQKRQQEHKKVKVQLTQAFQERLRSIVKTKLSGKNTTQAINAYAVPVLTYSFGIIKWSNTELEQLQRKMRTIQRRAGQLHPATAIERQTLPREEGGRGQADLKDLHDKQIQSMRQYFQLKSPRSPLIQAIIQADANYTPLNLCSTEERVLETANEQKLRTWAGKPLHGRHYNDLQQPHVDKKASNSWLAKGTLQPETEGFMLAIQDQVIATRNNQKFIQRKDIESDKCRHCHAASETIQHVMAGCKILAQSDYKHRHDQVAKIVHQKLAANAGFLTEKCPYYKYEPETVHENETHKLYWDRAIITDKTVPHNRPDITLVDKSNKTTYLIDIAVPNTNNIQTTYTTKITKYQDLRHEVRDIWGMEKIFIIPLVISATGIVPKTLATNLEILNIDPNTYIEIQKATILNTCHIVRKFLDMAH

SEQ ID NO: 22293 - protein, 881 aa, Dysdera silvatica
MQGNRSKKLVRKVKMALKRNRIHTRHEEPNKHISEYLDTLKQKLGVYARRLRRYKDYTNKKQQNMQFQANQKAFYRKLRETPANKDKYEAPKPAEIETFWKTLWSNEVQHKSAPWIQQEMEATRGIEEMEYTGITIEELQQVIQRTHNWKAPGIDGIHNFWYKKFTSAHGPLAKELTAIIEDPSKMPEFLCKGITYLLPKDQDTSNPAKYRPITCLNTLYKILTGCISEKISRHSESNNLMTEEQKGCQKGTLGCKEQLTIDSVILEQARKQKRKLNTAYIDYKKAFDSVPHSWLLEILSIYKVHPSIIRFLQSSMKQWRTRLQLNTPDSKIETAEIPIRRGIFQGDALSPQWFCLALNPLSRMLNASKYGYMLKKDKRNLHKVSHLMYVDDIKLYAPTITQLRQLISITETFSKDIGMEFGLDKCKIQKNSKEDLPGIELEDGRLLKTLDEGETYKYLGIMQKRQQEHKKVKVQLTQAFQERLRSIVKTKLSGKNTTQAINAYAVPVLTYSFGIIKWTNTELEQLQRKMRTIQRRAGQLHPATAIERQTLPREEGGRGQADLKDLHDKQIQSMRQYFQLKSPRSPLIQAIIQADANYTPLNLCSTEERVLETANEQKLRTWAGKPLHGRHYNDLQQPHVDKKASNSWLAKGTLQPETEGFMLAIQDQVIATRNNQKFIQRKDIESDKCRHCHAASETIQHVMAGCKILAQSDYKHRHDQVAKIVHQKLAANAGFLTEKCPYYKYEPETVHENETHKLYWDRAIITDKTVPHNRPDITLVDKSNKTTYLIDIAVPNTNNIQTTYTTKITKYQDLRHEVRDIWGMEKILIIPLVISATGIVPKTLATNLEILNIDPNTYIEIQKATILNTCHIVRKFLDMAH

SEQ ID NO: 22294 - protein, 1208 aa, Dysdera silvatica
MDNTIYKDIKIYIYIYISDSDDMNHNENMNGASVVALLNQNRVRVLSRGASSKNMQQSLLGGVGGCSGASNCTATRTNTAQSALQPSIGATTRAERPRQRMSWTIDMNTYIMRTYYTITKLETDMTNYRPTLHAKFAQQYPHLDISIERITTQRRNIITRNLLAEPILQRLRDEVANDLANTSTSVANPEAPASSAREPLQPSIEEEERRDVEKMEEGFQCALAEYEGSDAATRPRIPRQPASWKLCKATKILNEHTLPLHLQNHNSLQEIHTAIYCAAVAASRANGYEVRNEGRSNRGNKAQPPWQVRLEKRIEELRSSIGRITQYMQGNRSKKLVRKVKMALKRNRIHTRHEEPNKHISEYLDTLKQKLGVYARRLRRYKDYTNRKQQNMQFQANQKAFYRKLRETPANKDKYEAPKPAEIETFWKTLWSNEVQHKSAPWIQQEMEATRGIEEMEYTGITIEELQQVIQRTHNWKAPGIDGIHNFWYKKFTSAHGPLAKELTAIIEDPSKMPEFLCKGITYLLPKDQDTSNPAKYRPITCLNTLYKILTGCISEKISRHSESNNLMTEEQKGCQKGTLGCKEQLTIDSVILEQARKQKRKLNTAYIDYKKAFDSVPHSWLLEILSIYKVHPSIIRFLQSSMKQWRTRLQLNTPDSKIETAEIPIRRGIFQGDALSPQWFCLALNPLSRMLNTSKYGYMLKKDKRNLHKVSHLMYVDDIKLYAPTITQLRQLISITETFSKDIGMEFGLDKCKIQKNSKEDLPGIELEDGRLLKTLDEGETYKYLGIMQKRQQEHKKVKVQLTQAFQERLRSIVKTKLSGKNTTQAINAYAVPVLTYSFGIIKWSNTELEQLQRKMRTIQRRAGQLHPATAIERQTLPREEGGRGQADLKDLHDKQIQSMRQYFQLKSPRSPLIQAIIQADANYTPLNLCSTEERVLETANEQKLRTWAGKPLHGRHYNDLQQPHVDKKASNSWLAKGTLQPETEGFMLAIQDQVIATRNNQKFIQRKDIESDKCRHCHAASETIQHVMAGCKILAQSDYKHRHDQVAKIVHQKLAANAGFLTEKCPYYKYEPETVHENETHKLYWDRAIITDKTVPHNRPDITLVDKSNKTTYLIDIAVPNTNNIQTTYTTKITKYQDLRHEVRDIWGMEKILIIPLVISATGIVPKTLATNLEILNIDPNTYIEIQKATILNTCHIVRKFLDMAH

SEQ ID NO: 22295 - protein, 994 aa, Dysdera silvatica
MEEGFQCALAEYEGSDAATRPRRPRQPASWKLCKATKILNEHTLPLHLQNHNSLQEIHTAIYCAAIEASRANGYEVRNEGRSNRGNKAQPPWQVRLEKRIEELRRSIGRITQYMQGNRGKKLVRKVKMALKRNRMHTRHEEPNKHISEYLDTLKQKLGVYARRLRRYKDCTNKKQQNMQFQANQKAFYRKLQETPANKDKYEAPKPAVIETFWKTLWSNEVQHKSAPWIQQEMEATRGIEEMEYTGITIEELQQVIQRTHNWKAPGIDGIHNFWYKKFTSAHGPLAKELTAIIEDPSEMPEFLCKGITYLLPKDQDTSNPAKYRPITCLNTLYKILTGCISEKISRHSESNNLMTEEQKGCQKGTLGCKEQLTIDSVILEQARKQKRKLNTAYIDYKKAFDSVPHSWLLEILSIYKVHPSIIRFLQSSMKQWRTRLQLNTPDSKIKTAEIPIRRGIFQGDALSPQWFCLALNPLSRMLNTSKYGYMLKKDKRNLHKVSHLMYVDDIKLYAPTITQLRQLISITETFSKDIGMEFGLDKCKIQKNSKEDLPGIELEDGRLLKTLDEGETYKYLGIMQKRQQEHKKVKVQLTQAFQERLRSIVKTKLSGKNTTQAINAYAVPVLTYSFGIIKWSNTELEQLQRKMRTIQRRAGQLHPATAIERQTLPREEGGRGQADLKDLHDKQIQSMRQYFQLKSPRSPLIQAIIQADANYTPLNLCSTEERVLETANEQKLRTWAGKPLHGRHYNDLQQPHVDKKASNSWLAKGTLQPETEGFMLAIQDQVIATRNNQKFIQRKDIESDKCRHCHAASETIQHVMAGCKILAQSDYKHRHDQVAKIVHQKLAANAGFLTEKCPYYKYEPETVHENETHKLYWDRAIITDKTVPHNRPDITLVDKSNKTTYLIDIAVPNTNNIQTTYTTKITKYQDLRHEVRDIWGMEKILIIPLVISATGIVPKTLATNLEILNIDPNTYIEIQKATILNTCHIVRKFLDMAH

SEQ ID NO: 22296 - protein, 1194 aa, Dysdera silvatica
MSIKEVIYIYIYISDSDDMNHNENMNGASVVALLNQNRVRVLSRGASSKNMQQSLLGGVGGCSGASNCTATRTNTAQSALQPSIGATTRAERPRQRMSWTIDMNTYIMRTYYTITKLETDMTNYRPTLHAKFAQQYPHLDISIERITTQRRNIITRNLLAEPILQRLRDEVANDLANTSTSVANPEAPAIGAREPLQPSIEEEERRDVEKMEEGFQCALAEYEGSDAATRPRIPRQPASWKLCKATKILNEHTLPLHLQNHNSLQEIHTAIYCAAVAASRANGYEVRNEGRSNRGNKAQPPWQVRLEKRIEELRSSIGRITQYMQGNRGKKLVRKVKMALKRNRIHTRHEEPNKHISEYLDTLKQKLGVYARRLRRYKDYTNKKQQNMQFQANQKAFYRKLRETPANKDKYEAPKPAEIETFWKTLWSNEVQHKSAPWIQQEMEATRGIEELQQVIQRTHNWKAPGIDGIHNFWYKKFTSAHGPLAKELTAIIEDPSKMPEFLCKGITYLLPKDQDTSNPAKYRPITCLNTLYKILTGCISEKISRHSESNNLMTEEQKGCQKGTLGCKEQLTIDSVILEQARKQKRKLNTAYIDYKKAFDSVPHSWLLEILSIYKVHPSIIRFLQSSMKQWRTRLQLNTPDSKIETAEIPIRRGIFQGDALSPQWFCLALNPLSRMLNTSKYGYMLKKDKRNLHKVSHLMYVDDIKLYAPTITQLRQLISITETFSKDIGMEFGLDKCKIQKNSKEDLPGIELEDGRLLKTLDEGETYKYLGIMQKRQQEHKKVKVQLTQAFQERLRSIVKTKLSGKNTTQAINAYAVPVLTYSFGIIKWSNTELEQLQRKMRTIQRRAGQLHPATAIERQTLPREEGGRGQADLKDLHDKQIQSMRQYFQLKSPRSPLIQAIIQADANYTPLNLCSTEERVLETANEQKLRTWAGKPLHGRHYNDLQQPHVDKKASNSWLAKGTLQPETEGFMLAIQDQVIATRNNQKFIQRKDIESDKCRHCHAASETIQHVMAGCKILAQSDYKHRHDQVAKIVHQKLAANAGFLTEKCPYYKYEPETVHENETHKLYWDRAIITDKTVPHNRPDITLVDKSNKTTYLIDIAVPNTNNIQTTYTTKITKYQDLRHEVRDIWGMEKILIIPLVISATGIVPKTLATNLEILNIDPNTYIEIQKATILNTCHIVRKFLDMAH

SEQ ID NO: 22297 - protein, 869 aa, Dysdera silvatica
MQGNRSKKLVRKVKMALKRNRIHTRHEEPNKHISEYLDTLKQKLGVYARRLRRYKDYTNRKQQNMQFQANQKAFYRKLRETPANKDKYEAPKPAEIETFWKTLWSNEVQHKSAPWIQQEMEATRGIEEMEYTGITIEELQQVIQRTHNWKAPGIDGIHNFWYKKFTSAHGPLAKELTAIIEDPSKMPEFLCKGITYLLPKDQDTSNPAKYRPITCLNTLYKILTGCISEKISRHSESNNLMTEEQKGCQKGTLGCKEQLTIDSVILEQARKQKRKLNTAYIDYKKAFDSVPHSWLLEILSIYKVHPSIIRFLQSSMKQWRTRLQLNTPDSKIETAEIPIRRGIFQGDALSPQWFCLALNPLSRMLNTSKYGYMLKKDKRNLHKVSHLMYVDDIKLYAPTITQLRQLISITETFSKDIGMEFGLDKCKIQKNSKEDLPGIELEDGRLLKTLDEGETYKYLGIMQKRQQEHKKVKVQLTQAFQERLRSIVKTKLSGKNTTQAINAYAVPVLTYSFGIIKWSNTELEQLQRKMRTIQRRAGQLHPATAIERQTLPREEGGRGQADLKDLHDKQIQSMRQYFQLKSPRSPLIQAIIQADANYTPLNLCSTEERVLETANEQKLRTWAGKPLHGRHYNDLQQPHVDKKASNSWLAKGTLQPETEGFMLAIQDQVIATRNNQKFIQRKDIESDKCRHCHAASETIQHVMAGCKILAQSDYKHRHDQVAKIVHQKLAANAGFLTEKCPYYKYEPETVHENETHKLYWDRAIITDKTVPHNRPDITLVDKSNKTTYLIDIAVPNTNNIQTTYTTKITKYQDLRHEVRDIWGMEKILIIPLVISATGIVPKTLATNLEILNIDPNTCHIVRKFLDMAH

SEQ ID NO: 22298 - protein, 836 aa, Dysdera silvatica
MQGNRGKKLVRKVKMALKRNRMHTRHEEPNKHIAEYLDTLKQKLGVYARRLRRYKDCTNKKQQNMQFQANQKAFYRKLQETPANKDKYEAPKPAVIETFWKTLWSNEVQHKSAPWIQQEMEATRGIEEMEYTGITIEELQQVIQRTHNWKAPGTDGIHNFWYKKFTSIHGPLAKELTAIIEDPSEMPEFLCKGITYLLPKDQDKSNPAKYRPITCLNTLYKILTGCISEKISRHSESNNLMTEEQKGCQKGTLGCKEQLTIDSVILEQARKQKRKLNTAYIDYKKAFDSVPHSWLLEILSIYKVHPSIIRFLQSSMKQWRTRLQLNTPDSKIKTAEIPIRRGIFQGDALSPQWFCLALNPLSRMLNTSKYGYMLKKDKRNLHKVSHLMYVDDIKLYAPTITQLRQLISITETFSKDIGMEFGLDKCKIQKNSKEDLPGIELEDGRLLKTLDEGETYKYLGIMQKRQQEHKKVKVQLTQAFQERLRSIVKTKLSGKNTTQAINAYAVPVLTYSFGIIKWSNTELEQLQRKMRTIQRRAGQLHPATAIERQTLPREEGGRGQADLKDLHDKQIQSMRQYFQLKSPRSPLIQAIIQADANYTPLNLCSTEERVLETANEQKLRTWAGKPLHGRHYNDLQQPHVDKKASNSWLAKGTLQPETEGFMLAIQDQVIATRNNQKFIQRKDIESDKCRHCHAASETIQHVMAGCKILAQSDYKHRHDQVAKIVHQKLAANAGFLTEKCPYYKYEPETVHENETHKLYWDRAIITDKTVPHNRPDITLVDKSNKTTYLIDIAVPNTNNIQTTYTTKITKYQDLRHEVRDIWGMEKILIIPFIHLR

SEQ ID NO: 22299 - protein, 950 aa, Dysdera silvatica
MATLYIYILLQEIHTAIYCATVAASRVNGYEVRNEDRNNRGSKAQPPWQVRLEKRIEELRSSIGRITQYMQGNRSKKLVRKVKMALKRNRIHTRHEEPNKHISEYLDTLKQKLGVYARRLRRYKDCTNRKQQNMQFQANQKAFYRKLRETPANKDKYEAPKPAVIETFWKTLWSNEVQHKSAPWIQQEMEATRGIEEMEYTGITIEELQQVIQRTHNWKAPGIDGIHNFWYKKFTSAHGPLAKELTAIIEDPSKMPEFLCKGITYLLPKDQDTSNPAKYRPITCLNTLYKILTGCISEKISRHSESNNLMAEEQKGCQKGTLGCKEQLTIDSVILEQARKQKRKLNTAYIDYKKAFDSVPHSWLLEILSIYKVHPSIIRFLQSSMKQWRTRLQLNTPDSKIESAEIPIRRGIFQGDALSPQWFCLALNPLSRMLNTSKYGYMLKKDKRNLHKVSHLMYVDDIKLYAPTITQLRQLISITETFSKDIGMEFGLDKCKIQKNSKEDLPGIELEDGRLLKTLDEGETYKYLGIMQKRQQEHKKVKVQLTQAFQERLRSIVKTKLSGKNTTQAINAYAVPVLTYSFGIIKWSNTELEQLQRKMRTIQRRAGQLHPATAIERQTLPREEGGRGQADLKDLHDKQIQSMRQYFQLKSPRSPLIQAIIQADANYTPLNLCSTEERVLETANEQKLRTWAGKPLHGRHYNDLQQPHVDKKASNSWLAKGTLQPETEGFMLAIQDQVIATRNNQKFIQRKDIESDKCRHCHAASETIQHVMAGCKILAQSDYKHRHDQVAKIVHQKLAANAGFLTEKCPYYKYEPETVHENETHKLYWDRAIITDKTVPHNRPDITLVDKSNKTTYLIDIAVPNTNNIQTTYTTKITKYQDLRHEVRDIWGMEKILIIPLVISATGIVPKTLATNLEILNIDPNTYIEIQKATILNTCHIVRKFLDMAH

SEQ ID NO: 22300 - protein, 911 aa, Dysdera silvatica
MHINKISKKSCKRIGKLRRFRDGCKKKYYCVYKLCSKKLVRKVKMALKRNRIHTRHEEPNKHISEYLDTLKQKLGVYARRLRRYKDYTNKKQQNMQFQANQKAFYRKLRETPANKDKYEAPKPAEIETFWKTLWSNEVQHKSAPWIQQEMEATRGIEEMEYTGITIEELQQVIQRTHNWKAPGIDGIHNFWYKKFTSAHGPLAKELTAIIEDPSKMPEFLCKGITYLLPKDQDTSNPAKYRPITCLNTLYKILTGCISEKISRHSESNNLMTEEQKGCQKGTLGCKEQLTIDSVILEQARKQKRKLNTAYIDYKKAFDSVPHSWLLEILSIYKVHPSIIRFLQSSMKQWRTRLQLNTPDSKIETAEIPIRRGIFQGDALSPQWFCLALNPLSRMLNTSKYGYMLKKDKRNLHKVSHLMYVDDIKLYAPTITQLRQLISITETFSKDIGMEFGLDKCKIQKNSKEDLPGIELEDGRLLKTLDEGETYKYLGIMQKRQQEHKKVKVQLTQAFQERLRSIVKTKLSGKNTTQAINAYAVPVLTYSFGIIKWSNTELEQLQRKMRTIQRRAGQLHPATAIERQTLPREEGGRGQADLKDLHDKQIQSMRQYFQLKSPRSPLIQAIIQADANYTPLNLCSTEERVLETANEQKLRTWAGKPLHGRHYNDLQQPHVDKKASNSWLAKGTLQPETEGFMLAIQDQVIATRNNQKFIQRKDIESDKCRHCHAASETIQHVMAGCKILAQSDYKHRHDQVAKIVHQKLAANAGFLTEKCPYYKYEPETVHENETHKLYWDRAIITDKTVPHNRPDITLVDKSNKTTYLIDIAVPNTNNIQTTYTTKITKYQDLRHEVRDIWGMEKILIIPLVISATGIVPKTLATNLEILNIDPNTYIEIQKATILNTCHIVRKFLDMAH

SEQ ID NO: 22301 - protein, 1053 aa, Dysdera silvatica
MYIYINLLAQPILQRLRDEVANDLVNTSTSVANPEAPAIGAREPLQTSIEEEERRDVEKMEEGFQCALAEYEGSDAAARPRIPRQPEYWKLCAATKILNEHTLPLHLQKHNSLQEIHTAIYCAAVAASRANGYEVRNESRSNRGNKAQPPWQVRLEKRIEELRSSIGRITQYMQGNRGKKLVRKVKMALKRNRIHTRHEEPNKHISEYLDTLKQKLGVYARRLRRYKDYTNRKQQNMQFQANQKAFYRKLRETPANKDKYEAPKPAEIETFWKTLWSNEVQHKSAPWIQQEMEATRGIEEMEYTGITIEELQQVIQRTHNWKAPGIDGIHNFWYKKFTSAHGPLAKELTAIIEDPSKMPEFLCKGITYLLPKDQDTSNPAKYRPITCLNTLYKILTGCISEKISRHSESNNLMAEEQKGCQKGTLGCKEQLTIDSVILEQARKQKRKLNTAYIDYKKAFDSVPHSWLLEILSIYKVHPSIIRFLQSSMKQWRTRLQLNTPDSKIETAEIPIRRGIFQGDALSPQWFCLALNPLSRMLNASKYGYMLKKDKRNLHKVSHLMYVDDIKLYAPTITQLRQLISITETFSKDIGMEFGLDKCKIQKNSKEDLPGIELEDGRLLKTLDEGETYKYLGIMQKRQQEHKKVKVQLTQAFQERLRSIVKTKLSGKNTTQAINAYAVPVLTYSFGIIKWSNTELEQLQRKMRTIQRRAGQLHPATAIERQTLPREEGGRGQADLKDLHDKQIQSMRQYFQLKSPRSPLIQAIIQADANYTPLNLCSTEERVLETANEQKLRTWAGKPLHGRHYNDLQQPHVDKKASNSWLAKGTLQPETEGFMLAIQDQVIATRNNQKFIQRKDIESDKCRHCHAASETIQHVMAGCKILAQSDYKHRHDQVAKIVHQKLAANAGFLTEKCPYYKYEPETVHENETHKLYWDRAIITDKTVPHNRPDITLVDKSNKTTYLIDIAVPNTNNIQTTYTTKITKYQDLRHEVRDIWGMEKILIIPLVISATGIVPKTLATNLEILNIDPNTYIEIQKATILNTCHIVRKFLDMAH

SEQ ID NO: 22302 - protein, 1185 aa, Dysdera silvatica
MNHNENMNGASVVSLLNQNRVRTLSRGASSKNMQQSLLGGVGGCSGASNCTATRTNTAQSALQPSIGATTRAERPRQRMSWTIDMNTYIMRTYYTITKLETDMTNYRPTLHAKFAQQYPHLDISIERITTQRRNIITRNLLAEPILQRLRDEVANDLANTSTSVANPEAPAIGAREPLQPSIEQEERRDVEKMEEGFQCALAEYEGSDAATRPRIPRQPASWKLCKATKILNEHTLPLHLQNHNSLQEIHTAIYCAAVAASRANGYEVRNEGRSNRGNKAQPPWQVRLEKRIEELRSSIGRITQYMQGNRGKKLVRKVKMALKRNRIHTRHEEPNKHISEYLDTLKQKLGVYARRLRRYKDYTNKKQQNMQFQANQKAFYRKLRETPANKDKYEAPKPAEIETFWKTLWSNEVQHKSAPWIQQEMEATRGIEEMEYTGITIEELQQVIQRTHNWKAPGIDGIHNFWYKKFTSAHGPLAKELTAIIEDPSKMPEFLCKGITYLLPKDQDTSNPAKYRPITCLNTLYKILTGCISEKISRHSESNNLMTEEQKGCQKGTLGCKEQLTIDSVILEQARKQKRKLNTAYIDYKKAFDSVPHSWLLEILSIYKVHPSIIRFLQSSMKQWRTRLQLNTPDSKIETAEIPIRRGIFQGDALSPQWFCLALNPLSRMLNTSKYGYMLKKDKRNLHKVSHLMYVDDIKLYAPTITQLRQLISITETFSKDIGIEFGLDKCRIQKNSKEDLPGIEVKDRRLLKILDEGETYKYLGVMQKRQQEHKKVKVQLTQAFQERLRSIVKTKLSGKNTTQAINAYALPVLTYSFGIIKWTNTELEQLQRKMRTIQRRAGQLHPATAIERQTLPREEGGRGQADLKDLHDKQIQSMRQYFQLKSPRSPLIQATVLADANYTPLNLCNTEERVLEAANEQKLRSWAGKPLHGRHYNDLQQPHVDKKASNSWLAKGTLQPETEGFMLAIQDQVIATRNNQKFIQRKDIESDKCRHCHAASETIQHVMAGCKILAQSDYKHRHDQVAKIVHQKLAANAGFLTEKCPYYKYEPETVHENETHKLYWDRAIITDKTVPHNRPDITLVDKSNKTTYLIDIAVPNTNNIQTTYTTKITKYQDLRHEVRDIWGMEKILIIPRYSSHGIVPKTLATNLEILNIDPNTYIEIQKATILNTCHIVRKFLDMAH

SEQ ID NO: 22303 - protein, 1005 aa, Dysdera silvatica
MEDEERRDVEKMEEGFQCALAEYEGSDAATRPRIPHQPASWKLCKATKILNEHTLPLHLQNHNSLQEIHTAIYCATVAASRANGYEVRNEGRSNRGNKAQPPWQVRLQKRIEELRSSIGRITQYMQGNRSKKLVRKVKMALKRNRIHTRHEEPNKHISEYLDTLKQKLGVYARRLRRYKDYTNRKQQNMQFQANQKAFYRKLRETPANKDKYEAPKPAEIETFWKTLWSNEVQHKSAPWIQQEMEATRGIEEMEYTGITIEELQQVIQRTHNWKAPGIDGIHNFWYKKFTSAHGPLAKELTAIIEDPSKMPEFLCKGITYLLPKDQDTSNPAKYRPITCLNTLYKILTGCISEKISRHSESNNLMAEEQKGCQKGTLGCKEQLTIDSVILEQARKQKRKLNTAYIDYKKAFDSVPHSWLLEILSIYKVHPSIIRFLQSSMKQWRTRLQLNTPDSKIETAEIPIRRGIFQGDALSPQWFCLALNPLSRMLNTSKYGYMLKKDKRNLHKVSHLMYVDDIKLYAPTITQLRQLISITETFSKDIGMEFGLDKCKIQKNSKEDLPGIELEDGRLLKTLDEGETYKYLGIMQKRQQEHKKVKVQLTQAFQERLRSIVKTKLSGKNTTQAINAYAVPVLTYSFGIIKWSNTELEQLQRKMRTIQRRAGQLHPATAIERQTLPREEGGRGQADLKDLHDKQIQSMRQYFQLKSPRSPLIQAIIQADANYTPLNLCSTEERVLETANEQKLRTWAGKPLHGRHYNDLQQPHVDKKASNSWLAKGTLQPETEGFMLAIQDQVIATRNNQKFIQRKDIESDKCRHCHAASETIQHVMAGCKILAQSDYKHRHDQVAKIVHQKLAANAGFLTEKCPYYKYEPETVHENETHKLYWDRAIITDKTVPHNRPDITLVDKSNKTTYLIDIAVPNTNNIQTTYTTKITKYQDLRHEVRDIWGMEKIFIIPLVISATGIVPKTLATNLEILNIDPNTYIEIQKATILNTCHIVRKFLDMAH

SEQ ID NO: 22304 - protein, 1186 aa, Dysdera silvatica
MNHNENMNGESVVALLNQNRIRTLSRGVCSKNMQQSLLGGAGSCSGAYNCTATRTNRAHSALQPSIGATTRAERARQRMSWTIDMNTYIMRTYYTITKLETDMTNYRPTLHAKFAQQYPQLDISIERITTQRRNIITRNLLAEPILQRLRDEVANDLANTSTSLANPEAPASSAREPLQTSIEEEERRDVENMEEGFQCALAEYEGSDAATRPRIPRQPASWKLCKATKILNEYTLPLHLQNHNSLQEIHTAIYCAAIAASRANGYKVRNEGRNNRGNKAQPPWQMRLQKRIEELRRSIGRITQYMQGNRGKKLVRKVKMALKRNRTHTRHEEPNKHISEYLDTLKQKLGVYARRLRRYKDCTNKKQQNMQFQANQKAFYRKLQETPANKDKYEAPKPAVIETFWKTLWSNEVQHKSAPWIQQEMEATRGIEEMEYTGITIEELQQVIQRTHNWKAPGIDGIHNFWYKKFTSIHGPLAKELTAIIEDPSKMPEFLCKGITYLLPKDQDTSNPAKYRPITCLNTLYKILTGCISEKISRHSESNNLMTEEQKGCQKGTLGCKEQLTIDSVILEQARKQKRKLNTAYIDYKKAFDSVPHSWLLEILSIYKVHPSIIRFLQSSMKQWRTRLQLNTPDSKIETAEIPIRRGIFQGDALSPQWFCLALNPLSRMLNTSKYGYMLKKDKRNLHKLSHLMYVDDIKLYAPTITQLRQLISITETFSKDIGMEFGLDKCKIQENRKEDLPGIEFEDGRLLKILDEGETYKYLGIMQKRQQEHKKVKVQLTQAFQERLRSIVKTKLSGKNTTQAINAYAVPVLTYSFGIIKWTNTELEQLQRKMRTIQRRAGQLQPATSIERQTLPLEEGGRGQADLKDLHDKQIQSMRQYFQLKSPRSPLIQAIIQADANYTPLNLCNTEERVLETANEQKLRTWAGKPLHGRHYNDLQQPHVDKKASNSWLAKGTLQPETEGFMLAIQDQVIATRNNQKFIQRKDIESDKCRHCHAASETIQHVMAGCKILAQSDYKHRHDQVAKIVHQKLAANAGFLTEKCPYYKYEPETVHENETHKLYWDRAIITDKTVPHNRPDITLVDKSNKTTYLIDIAVPNTNNIQTTYITKITKYQDLRHEVRDIWGMEKILIIPLVISATGIVPKTLATNLEILNIDPNTYIEIQKATILNTCHIVRKFLDMAH

SEQ ID NO: 22305 - protein, 1186 aa, Dysdera silvatica
MNHNENMNGESVVALLNQNRIRTLSRGVCSKNMQQSLLGGAGSCSGAYNCTATRTNRAHSALQPSIGATTRAERARQRMSWTIDMNTYIMRTYYTITKLETDMTNYRPTLHSKFAQQYPHLDISIERITTQRRNIITRNLLAESILQRLRDEVANDLANTSTSAANPEPPVSSPREPLQTSIEQEERRDVEKMEEGFQCALADYEGSDTATRPRIPRQPASWKLCKAAKILNEHTLPLHLQNHNSLQEIYTAIYCAAVAASRANGYEVRNEGRNNRRNKAQPPWQVRLEKRIEELRRSIGRITQYMQGNRGKKLVRKVKMALKRNRMHTRHEEPNKHISEYLDTLKQKLGVYARRLRRYKDCTNKKQQNMQFQANQKAFYRKLQETPANKDKYEAPKPAVIETFWKTLWSNEVQHKSAPWIQQEMEATRGIEEMEYTGITIEELQQVIQRTHNWKAPGIDGIHNFWYKKFTSIHGPLAKELTAIIEDPSEMPEFLCKGITYLLPKDQDKSNPAKYRPITCLNTLYKILTGCISEKISRHSESNNLMTEEQKGCQKGTLGCKEQLTIDSVILEQARKQKRKLNTAYIDYKKAFDSVPHSWLLEILSIYKVHPSIIRFLQSSMKQWRTRLQLNTPDSKIETAEIPIRRGIFQGDALSPQWFCLALNPLSRMLNTSKYGYMLKKDKRNLHKVSHLMYVDDIKLYAPTITQLRQLISITETFSKDIGMEFGLDKCKIQKNSKEDLPGIELEDGRLLKTLDEGETYKYLGIMQKRQQEHKKVKVQLTQAFQERLRSIVKTKLSGKNTTQAINAYAVPVLTYSFGIIKWSNTELEQLQRKMRTIQRRAGQLHPATAIERQTLPREEGGRGQADLKDLHDKQIQSMRQYFQLKSPRSPLIQAIIQADANYTPLNLCSTEERVLETANEQKLRTWAGKPLHGRHYNDLQQPHVDKKASNSWLAKGTLQPETEGFMLAIQDQVIATRNNQKFIQRKDIESDKCRHCHAASETIQHVMAGCKILAQSDYKHRHDQVAKIVHQKLAANAGFLTEKCPYYKYEPETVHENETHKLYWDRAIITDKTVPHNRPDITLVDKSNKTTYLIDIAVPNTNNIQTTYTTKITKYQDLRHEVRDIWGMEKILIIPLVISATGIVPKTLATNLEILNIDPNTYIEIQKATILNTCHIVRKFLDMAH

SEQ ID NO: 22306 - protein, 881 aa, Dysdera silvatica
MQGNRGKKLVRKVKMALKRNRIHTRHEEPNKHISEYLDTLKQKLGVYARRLRRYKDCTNKKQQNMQFQANQKAFYRKLRETPANKDKYEAPKPAEIETFWKTLWSNEVQHKSAPWIQQEMEATRGIEEMEYTGITIEELQQVIQRTHNWKAPGIDGIHNFWYKKFTSAHGPLAKELTAIIEDPSKMPEFLCKGITYLLPKDQDTSNPAKYRPITCLNTLYKILTGCISEKISRHSESNNLMTEEQKGCQKGTLGCKEQLTIDSVILEQARKQKRKLNTAYIDYKKAFDSVPHSWLLEILSIYKVHPSIIRFLQSSMKQWRTRLQLNTPDSKIETAEIPIRRGIFQGDALSPQWFCLALNPLSRMLNASKYGYMLKKDKRNLHKVSHLMYVDDIKLYAPTITQLRQLISITETFSKDIGMEFGLDKCKIQKNSKEDLPGIELEDGRLLKTLDEGETYKYLGIMQKRQQEHKKVKVQLTQAFQERLRSIVKTKLSGKNTTQAINAYAVPVLTYSFGIIKWSNTELEQLQRKMRTIQRRAGQLHPATAIERQTLPREEGGRGQADLKDLHDKQIQSMRQYFQLKSPRSPLIQAIIQADANYTPLNLCSTEERVLETANEQKLRTWAGKPLHGRHYNDLQQPHVDKKASNSWLAKGTLQPETEGFMLAIQDQVIATRNNQKFIQRKDIESDKCRHCHAASETIQHVMAGCKILAQSDYKHRHDQVAKIVHQKLAANAGFLTEKCPYYKYEPETVHENETHKLYWDRAIITDKTVPHNRPDITLVDKSNKTTYLIDIAVPNTNNIQTTYTTKITKYQDLRHEVRDIWGMEKILIIPLVISATGIVPKTLATNLEILNIDPNTYIEIQKATILNTCHIVRKFLDMAH

SEQ ID NO: 22307 - protein, 1186 aa, Dysdera silvatica
MNHNQNMNGESVVALLNQNRIRTLSRGVCSKNMQQSLLGGAGSCSGAYNCTATRTNTAQSALQPSIGATTRAERPRQRMSWTIDMNTYIMRTYYTITKLETDMTNYRPTLHAKFAQQYPHLDISIERITTQRRNIITRNLLAEPILQRLRDEVANDLANTSTSVANPEAPAIGAREPLQPSIEEEERRDVEKMEEGFQCALAEYEGSDAATRPRIPRQPASWKLCKATKILNEHTLPLHLQNHNSLQEIHTAIYCAAVAASRANGYEVRNEGRSNRGNKAQPPWQVRLQKRIEELRSSIGRITQYMQGNRGKKLVRKVKMALKRNRIHTRHEEPNKHISEYLDTLKQKLGVYARRLRRYKDYTNKKQQNMQFQANQKAFYRKLRETPANKDKYEAPKPAEIETFWKTLWSNEVQHKSAPWIQQEMEATRGIEEMEYTGITIEELQQVIQRTHNWKAPGIDGIHNFWYKKFTSAHGPLAKELTAIIEDPSKMPEFLCKGITYLLPKDQDTSNPAKYRPITCLNTLYKILTGCISEKISRHSESNNLMTEEQKGCQKGTLGCKEQLTIDSVILEQARKQKRKLNTAYIDYKKAFDSVPHSWLLEILSIYKVHPSIIRFLQSSMKQWRTRLQLNTPDSKIETAEIPIRRGIFQGDALSPQWFCLALNPLSRMLNTSKYGYMLKKDKRNLHKVSHLMYVDDIKLYAPTITQLRQLISITETFSKDIGMEFGLDKCKIQKNSKEDLPGIELEDGRLLKTLDEGETYKYLGIMQKRQQEHKKVKVQLTQAFQERLRSIVKTKLSGKNTTQAINAYAVPVLTYSFGIIKWSNTELEQLQRKMRTIQRRAGQLHPATAIERQTLPREEGGRGQADLKDLHDKQIQSMRQYFQLKSPRSPLIQAIIQADANYTPLNLCSTEERVLETANEQKLRTWAGKPLHGRHYNDLQQPHVDKKASNSWLAKGTLQPETEGFMLAIQDQVIATRNNQKFIQRKDIESDKCRHCHAASETIQHVMAGCKILAQSDYKHRHDQVAKIVHQKLAANAGFLTEKCPYYKYEPETVHENETHKLYWDRAIITDKTVPHNRPDITLVDKSNKTTYLIDIAVPNTNNIQTTYTTKITKYQDLRHEVRDIWGMEKILIIPLVISATGIVPKTLATNLEILNIDPNTYIEIQKATILNTCHIVRKFLDMAH

SEQ ID NO: 22308 - protein, 1186 aa, Dysdera silvatica
MNHNENMNGASVVSLLNQNRVRTLSRGASSKNMQQSLLGGVGGCSGASNCTATRTNTAQSALQPSIGATTRAERPRQRMSWTIDMNTYIMRTYYTITKLETDMTNYRPTLHAKFAQQYPHLDISIERITTQRRNIITRNLLAEPILQRLRDEVANDLANTSTSVANPEAPAIGAREPLQPSIEEEERRDVEKMEEGFQCALAEYEGSDAATRPRIPRQPASWKLCKATKILNEHTLPLHLQNHNSLQEIHTAIYCAAVAASRANGYEVRNEGRSNRGNKAQPPWQVRLEKRIEELRSSIGRITQYMQGNRGKKLVRKVKMALKRNRIHTRHEEPNKHISEYLDTLKQKLGVYARRLRRYKDYTNKKQQNMQFQANQKAFYRKLRETPANKDKYEAPKPAEIETFWKTLWSNEVQHKSAPWIQQEMEATRGIEEMEYTGITIEELQQVIQRTHNWKAPGIDGIHNFWYKKFTSAHGPLAKELTAIIEDPSKMPEFLCKGITYLLPKDQDTSNPAKYRPITCLNTLYKILTGCISEKISRHSESNNLMTEEQKGCQKGTLGCKEQLTIDSVILEQARKQKRKLNTAYIDYKKAFDSVPHSWLLEILSIYKVHPSIIRFLQSSMKQWRTRLQLNTPDSKIETAEIPIRRGIFQGDALSPQWFCLALNPLSRMLNTSKYGYMLKKDKRNLHKVSHLMYVDDIKLYAPTITQLRQLISITETFSKDIGMEFGLDKCKIQKNSKEDLPGIELEDGRLLKTLDEGETYKYLGIMQKRQQEHKKVKVQLTQAFQERLRSIVKTKLSGKNTTQAINAYAVPVLTYSFGIIKWSNTELEQLQRKMRTIQRRAGQLHPATAIERQTLPREEGGRGQADLKDLHDKQIQSMRQYFQLKSPRSPLIQAIIQADANYTPLNLCSTEERVLETANEQKLRTWAGKPLHGRHYNDLQQPHVDKKASNSWLAKGTLQPETEGFMLAIQDQVIATRNNQKFIQRKDIESDKCRHCHAASETIQHVMAGCKILAQSDYKHRHDQVAKIVHQKLAANAGFLTEKCPYYKYEPETVHENETHKLYWDRAIITDKTVPHNRPDITLVDKSNKTTYLIDIAVPNTNNIQTTYTTKITKYQDLRHEVRDIWGMEKIFIIPLVISATGIVPKTLATNLEILNIDPNTYIEIQKATILNTCHIVRKFLDMAH

SEQ ID NO: 22309 - protein, 1120 aa, Dysdera silvatica
MDNRYEHLHHAHLLYDYKAGNRHDKLQTHTSRQIRTTVPTLHAKFEQQYPHLDISIERITTQSRNIITRNLLAEPILQRLRDEVANDLANTSTSVANPEVPEAPAIGAREPLQTSIEQEERRDVEKMEEGFQCALADYEGSDVATRPRIPRQPASWKLCKATKILNEYTLPLHLQKHNSLQEIHTAIYCAAVAASRANRYEVRNESRSNRGNKAQPPWQVRLEKRIEELRSSIGRITQYMQGNRGKKLVRKVKMALKRNRIHTRHEEPNKHISEYLDTLKQKLGVYARRLRRYKDCTNKKQQNMQFQANQKAFYRKLRETPANKDKYEAPKPAVIETFWKTLWSNEVQHKSAPWIQQEMEATRGIEEMEYTGITIEELQQVIQRTHNWKAPGIDGIHNFWYKKFTSAHGPLAKELTAIIEDPSKMPEFLCKGITYLLPKDQDTSNPAKYRPITCLNTLYKILTGCISEKISRHSESNNLMAEEQKGCQKGTLGCKEQLTIDSVILEQARKQKRKLNTAYIDYKKAFDSVPHSWLLEILSIYKVHPSIIRFLQSSMKQWRTRLQLNTPDSKIETAEIPIRRGIFQGDALSPQWFCLALNPLSRMLNTSKYGYMLKKDKRNLHKVSHLMYVDDIKLYAPTITQLRQLISITETFSKDIGMEFGLDKCKIQKNSKEDLPGIELEDGRLLKTLDEGETYKYLGIMQKRQQEHKKVKVQLTQAFQERLRSIVKTKLSGKNTTQAINAYAVPVLTYSFGIIKWSNTELEQLQRKMRTIQRRAGQLHPATAIERQTLPREEGGRGQADLKDLHDKQIQSMRQYFQLKSPRSPLIQAIIQADANYTPLNLCSTEERVLETANEQKLRTWAGKPLHGRHYNDLQQPHVDKKASNSWLAKGTLQPETEGFMLAIQDQVIATRNNQKFIQRKDIESDKCRHCHAASETIQHVMAGCKILAQSDYKHRHDQVAKIVHQKLAANAGFLTEKCPYYKYEPETVHENETHKLYWDRAIITDKTVPHNRPDITLVDKSNKTTYLIDIAVPNTNNIQTTYTTKITKYQDLRHEVRDIWGMEKILIIPLVISATGIVPKTLATNLEILNIDPNTYIEIQKATILNTCHIVRKFLDMAH

SEQ ID NO: 22310 - protein, 1108 aa, Dysdera silvatica
MSWTIDMNTYIMRTYYTITKLETDMTNYRPTLHAKFAQQYPHLDISIERITTQRRNIITRNLLAEPILQRLRDEVANDLANTSTSVANPEAPASSAREPLQPSIEEEERRDVEKMEEGFQCALAEYEGSDAATRPRIPRQPASWKLCKATKILNEHTLPLHLQNHNSLQEIHTAIYCAAVAASRANGYEVRNEGRNNRGNKAQPPWQVRLEKRIEELRSSIGRITQYMQGNRGKKLVRKVKMALKRNRIHTRHEEPNKHISEYLDTLKQKLGVYARRLRRYKDCTNKKQQNMQFQANQKAFYRKLRETPANKDKYEAPKPAEIETFWKTLWSNEVQHKSAPWIQQEMEATRGIEEMEYTGITIEELQQVIQRTHNWKAPGIDGIHNFWYKKFTSAHGPLAKELTAIIEDPSKMPEFLCKGITYLLPKDQDTSNPAKYRPITCLNTLYKILTGCISEKISRHSESNNLMAEEQKGCQKGTLGCKEQLTIDSVILEQARKQKRKLNTAYIDYKKAFDSVPHSWLLEILSIYKVHPSIIRFLQSSMKQWRTRLQLNTPDSKIETAEIPIRRGIFQGDALSPQWFCLALNPLSRMLNASKYGYMLKKDKRNLHKVSHLMYVDDIKLYAPTITQLRQLISITETFSKDIGMEFGLDKCKIQKNSKEDLPGIELEDGRLLKTLDEGETYKYLGIMQKRQQEHKKVKVQLTQAFQERLRSIVKTKLSGKNTTQAINAYAVPVLTYSFGIIKWSNTELEQLQRKMRTIQRRAGQLHPATAIERQTLPREEGGRGQADLKDLHDKQIQSMRQYFQLKSPRSPLIQAIIQADANYTPLNLCSTEERVLETANEQKLRTWAGKPLHGRHYNDLQQPHVDKKASNSWLAKGTLQPETEGFMLAIQDQVIATRNNQKFIQRKDIESDKCRHCHAASETIQHVMAGCKILAQSDYKHRHDQVAKIVHQKLAANAGFLTEKCPYYKYEPETVHENETHKLYWDRAIITDKTVPHNRPDITLVDKSNKTTYLIDIAVPNTNNIQTTYTTKITKYQDLRHEVRDIWGMEKILIIPLVISATGIVPKTLATNLEILNIDPNTYIEIQKATILNTCHIVRKFLDMAH

SEQ ID NO: 22311 - protein, 903 aa, Dysdera silvatica
MASETSKSIEEFRGSIGRITQYMQGNRGKKLVRKVKMALKRNRIHTRHEEPNKHISEYLDTLKQKLGVYARRLRRYKDYTNKKQQNMQFQANQKAFYRKLRETPANKDKYEAPKPAEIETFWKTLWSNEVQHKSAPWIQQEMEATRGIEEMEYTGITIEELQQVIQRTHNWKAPGIDGIHNFWYKKFTSAHGPLAKELTAIIEDPSKMPEFLCKGITYLLPKDQDTSNPAKYRPITCLNTLYKILTGCISEKISRHSESNNLMTEEQKGCQKGTLGCKEQLTIDSVILEQARKQKRKLNTAYIDYKKAFDSVPHSWLLEILSIYKVHPSIIRFLQSSMKQWRTRLQLNTPDSKIETAEIPIRRGIFQGDALSPQWFCLALNPLSRMLNTSKYGYMLKKDKRNLHKVSHLMYVDDIKLYAPTITQLRQLISITETFSKDIGMEFGLDKCKIQKNSKEDLPGIELEDGRLLKTLDEGETYKYLGIMQKRQQEHKKVKVQLTQAFQERLRSIVKTKLSGKNTTQAINAYAVPVLTYSFGIIKWSNTELEQLQRKMRTIQRRAGQLHPATAIERQTLPREEGGRGQADLKDLHDKQIQSMRQYFQLKSPRSPLIQAIIQADANYTPLNLCSTEERVLETANEQKLRTWAGKPLHGRHYNDLQQPHVDKKASNSWLAKGTLQPETEGFMLAIQDQVIATRNNQKFIQRKDIESDKCRHCHAASETIQHVMAGCKILAQSDYKHRHDQVAKIVHQKLAANAGFLTEKCPYYKYEPETVHENETHKLYWDRAIITDKTVPHNRPDITLVDKSNKTTYLIDIAVPNTNNIQTTYTTKITKYQDLRHEVRDIWGMEKIFIIPLVISATGIVPKTLATNLEILNIDPNTYIEIQKATILNTCHIVRKFLDMAH

SEQ ID NO: 22312 - protein, 1113 aa, Dysdera silvatica
MYITLESTTCHNHTTILLYIYTITKLETDLTNYRPTLHAKFAQQYPHLDISIERITTQRRNIITRNLLAEPILQRLRDEVANDLVNTSTSVANPEAPVSSPREPLQTSIEEEERRDVEKMEEGFQCALAEYEGSDAATRPRIPRQPASWKLCKATKILNEHTLPLHLQNHNSLQEIHTAIYCAAVAASRANGYEVRNEGRSNRGNKAQPPWQVRLQKRIEELRSSIGRITQYMQGNRGKKLVRKVKMALKRNRIHTRHEEPNKHISEYLDTLKQKLGVYARRLRRYKDYTNRKQQNMQFQANQKAFYRKLRETPANKDKYEAPKPAEIETFWKTLWSNEVQHKSAPWIQQEMEATRGIEEMEYTGITIEELQQVIQRTHNWKAPGIDGIHNFWYKKFTSAHGPLAKELTAIIEDPSKMPEFLCKGITYLLPKDQDTSNPAKYRPITCLNTLYKILTGCISEKISRHSESNNLMTEEQKGCQKGTLGCKEQLTIDSVILEQARKQKRKLNTAYIDYKKAFDSVPHSWLLEILSIYKVHPSIIRFLQSSMKQWRTRLQLNTPDSKIETAEIPIRRGIFQGDALSPQWFCLALNPLSRMLNTSKYGYMLKKDKRNLHKVSHLMYVDDIKLYAPTITQLRQLISITETFSKDIGMEFGLDKCKIQKNSKEDLPGIELEDGRLLKTLDEGETYKYLGIMQKRQQEHKKVKVQLTQAFQERLRSIVKTKLSGKNTTQAINAYAVPVLTYSFGIIKWSNTELEQLQRKMRTIQRRAGQLHPATAIERQTLPREEGGRGQADLKDLHDKQIQSMRQYFQLKSPRSPLIQAIIQADANYTPLNLCSTEERVLETANEQKLRTWAGKPLHGRHYNDLQQPHVDKKASNSWLAKGTLQPETEGFMLAIQDQVIATRNNQKFIQRKDIESDKCRHCHAASETIQHVMAGCKILAQSDYKHRHDQVAKIVHQKLAANAGFLTEKCPYYKYEPETVHENETHKLYWDRAIITDKTVPHNRPDITLVDKSNKTTYLIDIAVPNTNNIQTTYTTKITKYQDLRHEVRDIWGMEKILIIPLVISATGIVPKTLATNLEILNIDPNTYIEIQKATILNTCHIVRKFLDMAH

SEQ ID NO: 22313 - protein, 997 aa, Dysdera silvatica
MNKFQFIVALIIYIYISARMQQRPRIPRQPASWKLCKATKILNEHTLPLHLQNHNSLQEIHTAIYCAAVAASRANGYEVRNEGRSNRGNKAQPPWQVRLQKRIEELRSSIGRITQYMQGNRGKKLVRKVKMALKRNRIHTRHEEPNKHISEYLDTLKQKLGVYARRLRRYKDYTNKKQQNMQFQANQKAFYRKLRETPANKDKYEAPKPAEIETFWKTLWSNEVQHKSAPWIQQEMEATRGIEEMEYTGITIEELQQVIQRTHNWKAPGIDGIHNFWYKKFTSAHGPLAKELTAIIEDPSKMPEFLCKGITYLLPKDQDTSNPAKYRPITCLNTLYKILTGCISEKISRHSESNNLMTEEQKGCQKGTLGCKEQLTIDSVILEQARKQKRKLNTAYIDYKKAFDSVPHSWLLEILSIYKVHPSIIRFLQSSMKQWRTRLQLNTPDSKIETAEIPIRRGIFQGDALSPQWFCLALNPLSRMLNTSKYGYMLKKDKRNLHKVSHLMYVDDIKLYAPTITQLRQLISITETFSKDIGMEFGLDKCKIQKNSKEDLPGIELEDGRLLKTLDEGETYKYLGIMQKRQQEHKKVKVQLTQAFQERLRSIVKTKLSGKNTTQAINAYAVPVLTYSFGIIKWSNTELEQLQRKMRTIQRRAGQLHPATAIERQTLPREEGGRGQADLKDLHDKQIQSMRQYFQLKSPRSPLIQAIIQADANYTPLNLCSTEERVLETANEQKLRTWAGKPLHGRHYNDLQQPHVDKKASNSWLAKGTLQPETEGFMLAIQDQVIATRNNQKFIQRKDIESDKCRHCHAASETIQHVMAGCKILAQSDYKHRHDQVAKIVHQKLAANAGFLTEKCPYYKYEPETVHENETHKLYWDRAIITDKTVPHNRPDITLVDKSNKTTYLIDIAVPNTNNIQTTYTTKITKYQDLRHEVRDIWGMEKILIIPLVISATGIVPKTLATNLEILNIDPNTYIEIQKATILNTCHIVRKFLDMAH

SEQ ID NO: 22314 - protein, 1051 aa, Dysdera silvatica
MLVGIYHHHIQPSLLAEPILQRLRDEVANDLVNTSTSVANPEAPAIGAREPLQPSIEEEERRDVEKMEEGFQCALAEYEGSDAATRPRIPRQPASWKLCKATKILNEHTLPLHLQNHNSLQEIHTAIYCAAVAASRANGYEVRNEGRSNRGNKAQPPWQVRLQKRIEELRSSIGRITQYMQGNRGKKLVRKVKMALKRNRIHTRHEEPNKHISEYLDTLKQKLGVYARRLRRYKDYTNKKQQNMQFQANQKAFYRKLRETPANKDKYEAPKPAEIETFWKTLWSNEVQHKSAPWIQQEMEATRGIEEMEYTGITIEELQQVIQRTHNWKAPGIDGIHNFWYKKFTSAHGPLAKELTAIIEDPSKMPEFLCKGITYLLPKDQDTSNPAKYRPITCLNTLYKILTGCISEKISRHSESNNLMTEEQKGCQKGTLGCKEQLTIDSVILEQARKQKRKLNTAYIDYKKAFDSVPHSWLLEILSIYKVHPSIIRFLQSSMKQWRTRLQLNTPDSKIETAEIPIRRGIFQGDALSPQWFCLALNPLSRMLKKDKRNLHKVSHLMYVDDIKLYAPTITQLRQLISITETFSKDIGMEFGLDKCKIQKNSKEDLPGIELEDGRLLKTLDEGETYKYLGIMQKRQQEHKKVKVQLTQAFQERLRSIVKTKLSGKNTTQAINAYAVPVLTYSFGIIKWSNTELEQLQRKMRTIQRRAGQLHPATAIERQTLPREEGGRGQADLKDLHDKQIQSMRQYFQLKSPRSPLIQAIIQADANYTPLNLCSTEERVLETANEQKLRTWAGKPLHGRHYNDLQQPHVDKKASNSWLAKGTLQPETEGFMLAIQDQVIATRNNQKFIQRKDIESDKCRHCHAASETIQHVMAGCKILAQSDYKHRHDQVAKIVHQKLAANAGFLTEKCPYYKYEPETVHENETHKLYWDRAIITDKTVPHNRPDITLVDKSNKTTYLIDIAVPNTNNIQTTYTTKITKYQDLRHEVRDIWGMEKILIIPLVISATGIVPKTLATNLEILNIDPNTYIEIQKATILNTCHIVRKFLDMAH

SEQ ID NO: 22315 - protein, 881 aa, Dysdera silvatica
MQGNRSKKLVRKVKMALKRNRIHTRHEEPNKHISEYLDTLKQKLGVYARRLRRYKDCTNRKQQNMQFQANQKAFYRKLQETSASQDKYEAPKPAVIETFWKTLWSNEVQHKSAPWIQQEMEATRGIEEMEYTGITIEELQQVIQRTHNWKAPGIDGIHNFWYKKFTSAHGPLAKELTAIIEDPSKMPEFLCKGITYLLPKDQDTSNPAKYRPITCLNTLYKILTGCISEKISRHSESNNLMAEEQKGCQKGTLGCKEQLTIDSVILEQARKQKRKLNTAYIDYKKAFDSVPHSWLLEILSIYKVHPSIIRFLQSSMKQWRTRLQLNTPDSKIETAEIPIRRGIFQGDALSPQWFCLALNPLSRMLNTSKYGYMLKKDKRNLHKVSHLMYVDDIKLYAPTITQLRQLISITETFSKDIGMEFGLDKCKIQKNSKEDLPGIELEDGRLLKTLDEGETYKYLGIMQKRQQEHKKVKVQLTQAFQERLRSIVKTKLSGKNTTQAINAYAVPVLTYSFGIIKWSNTELEQLQRKMRTIQRRAGQLHPATAIERQTLPREEGGRGQADLKDLHDKQIQSMRQYFQLKSPRSPLIQAIIQADANYTPLNLCSTEERVLETANEQKLRTWAGKPLHGRHYNDLQQPHVDKKASNSWLAKGTLQPETEGFMLAIQDQVIATRNNQKFIQRKDIESDKCRHCHAASETIQHVMAGCKILAQSDYKHRHDQVAKIVHQKLAANAGFLTEKCPYYKYEPETVHENETHKLYWDRAIITDKTVPHNRPDITLVDKSNKTTYLIDIAVPNTNNIQTTYTTKITKYQDLRHEVRDIWGMEKILIIPLVISATGIVPKTLATNLEILNIDPNTYIEIQKATILNTCHIVRKFLDMAH

SEQ ID NO: 22316 - protein, 1186 aa, Dysdera silvatica
MNHNQNMNGESVVALLNQNRIRTLSRGVCSKNMQQSLLGGAGSCSGAYNCTATRTNRAHSALQPSIGATTRAERARQRMSWTIDMNTYIMRTYYTITKLETDMTNYRPTLHAKFAQQYPHLDISIERITTQRRNIITRNLLAEPILQRLRDEVANDLSNTSTSVANPEAPAVSAREPLQPSIEEEERRDVEKMEEGFQCALAEYEGSDAATRPRIPRQPASWKLCKATKILNEHTLPLHLQNHNSLQEIHTAIYCAAIAASRANGYEVRNEGRNNRGNKAQPPWQVRLQKRIEELRRSIGRITQYMQGNRSRKLVRKVKMALKRNRMHTRHEEPNKHIAEYLDTLKQKLGVYARRLRRYKDCTNKKQQNMQFQANQKAFYRKLQETPANKDKYEAPKPAVIETFWKTLWSNEVQHKSAPWIQQEMEATRGIEEMEYTGITIEELQQVIQRTHNWKAPGIDGIHNFWYKKFTSIHGPLAKELTAIIEDPSEMPEFLCKGITYLLPKDQDKSNPAKYRPITCLNTLYKILTGCISEKISRHSESNNLMTEEQKGCQKGTLGCKEQLTIDSVILEQARKQKRKLNTAYIDYKKAFDSVPHSWLLEILSIYKVHPSIIRFLQSSMKQWRTRLQLNTPDSKIKTAEIPIRRGIFQGDALSPQWFCLALNPLSRMLNTSKYGYMLKKDKRNLHKVSHLMYVDDIKLYAPTITQLRQLISITETFSKDIGMEFGLDKCKIQKNSKEDLPGIEFEDGRLLKILDEGETYKYLGIMQKRQQEHKKVKVQLTQAFQERLRSIVKTKLSGKNTTQAINAYAVPVLTYSFGIIKWTNTELEQLQRKMRTIQRRAGQLHPATAIERQTLPREEGGRGQADLKDLHDKQIQSMRQYFQLKSPRSPLIQAIIQADANYTPLNLCSTEERVLETANEQKLRTWAGKPLHGRHYNDLQQPHVDKKASNSWLAKGTLQPETEGFMLAIQDQVIATRNNQKFIQRKDIESDKCRHCHAASETIQHVMAGCKILAQSDYKHRHDQVAKIVHQKLAANAGFLTEKCPYYKYEPETVHENETHKLYWDRAIITDKTVPHNRPDITLVDKSNKTTYLIDIAVPNTNNIQTTYTTKITKYQDLRHEVRDIWGMEKILIIPLVISATGIVPKTLATNLEILNIDPNTYIEIQKATILNTCHIVRKFLDMAH

SEQ ID NO: 22317 - protein, 1148 aa, Dysdera silvatica
MNHNENMNGASVVSLLNQNRVRTLSRGASSKNMQQSLLGGVGGCSGASNCTATRTNTAQSALQPSIGATTRAERPRQRMSWTIDMNTYIMRTYYTITKLETDMTNYRPTLHAKFAQQYPHLDISIERITTQRRNIITRNLLAEPILQRLRDEVANDLANTSTSVANPEAPAIGAREPLQPSIEEEERRDVEKMEEGFQCALAEYEGSDAATRPRIPRQPASWKLCKATKILNEHTLPLHLQNHNSLHEIHTAIYCAAIAASRANGYEVRNEGRNNRGNKAQPPWQVRLEKRIKELRSSIGRITQYMQGNRGKKLVRKVKMALKRNRIHTRHEEPNKHISEYLDTLKQKLGVYARRLRRYKDCTNKKQQNMQFQANQKAFYRKLRETPANKDKYEAPKPAEIETFWKTLWSNEVQHKSAPWIQQEMEATRGIEEMEYTGITIEELQQVIQRTHNWKAPGIDGIHNFRYKKFTSDPAKYRPITCLNTLYKILTGCISEKISRHSESNNLMAEEQKGCQKRTLGCKEQLTIDSVILEQARKQKRKLNTAYIDYKKAFDSVPHSWLLEILSIYKVHPSIIRFLQSSMKQWRTRLQLNTPYRKIETAEIPIRRGIFQGDALSPQWFCLALNPLSRMLNTSKYGYMLKKDKRNLHKVSHLMYVDDIKLYAPTITQLRQLISITETFSKDLGMEFGLDKCKIQKNGKEHLPGIELEDGRLLKTLDEGKTYKYLGVIQTQQQEHIKFKAQLTQAFQEGLRSIAKTKLSGKNTTQAINAYAVPVLTYSFGIIKWSNTELEQLQWKMRTTQRIAGQLHPATTIERQTLPREEGGRGQADLKDLHDKQIQSMRQYFQLKSPRSPLIQATVLADANYTPLNLCNTEERVLEAANEQKLRSWAGKPLHGRHYNDLQQPHVDKKASNSWLAKGTLQPETEGFMLAIQDQVIATRNNQKFIQRKDIESDKCRHCHAASETIQHVMAGCKILAQSDYKHRHDQVAKIVHQKLAANAGFLTEKCPYYKYEPETVHENETHKLYWDRAIITDKTVPHNRPDITLVDKSNKTTYLIDIAVPNTNNIQTTYTTKITKYQDLRHEVRDIWGMEKIFIIPLVISATGIVPKTLATNLGILNIDPNTYIEIQKATILNTCHIVRKFLDMAH

SEQ ID NO: 22318 - protein, 1164 aa, Dysdera silvatica
MNHNENMNGASVVSLLNQNRVRVLSRGASSKNMQQSLLGGVGGCSGASNCTATRTNTAQSALQPSIGATTRAERPRQRMSWTIDMNTYIMRTYYTITKLETDMTNYRPTLHAKFAQQYPHLDISIERITTQRRNIITRNLLAEPILQRLRDEVANDLANTSTSVANPEAPAIGAREPLQPSIEEEERRDVEKMEEGFQCALAEYEGSDAATRPRIPRQPASWKLCKATKILNEHTLPLHLQNHNSLQEIHTAIYCAAVAASRANGYEVRNEGRSNRGNKAQPPWQVRLEKRIEELRSSIGRITQYMQGNRSKKLVRKVKMALKRNRIHTRHEEPNKHISEYLDTLKQKLGVYARRLRRYKDYTNRKQQNMQFQANQKAFYRKLRETPANKDKYEAPKPAEIETFWKTLWSNEVQHKSAPWIQQEMEATRGIEEMEYTGITIEELQQVIQRTHNWKAPGIDGIHNFWYKKFTSAHGPLAKELTAIIEDPSKMPEFLCKGITYLLPKDQDTSNPAKYRPITCLNTLYKILTGCISEKISRHSESNNLMTEEQKGCQKGTLGCKEQLTIDSVILEQARKQKRKLNTAYIDYKKAFDSVPHSWLLEILSIYKVHPSIIRFLQSSMKQWRTRLQLNTPDSKIETAEIPIRRGIFQGDALSPQWFCLALNPLSRMLNTSKYGYMLKKDKRNLHKVSHLMYVDDIKLYAPTITQLRQLISITETFSKDIGMEFGLDKCKIQKNSKEDLPGIELEDGRLLKTLDEGETYKYLGIMQKRQQEHKKVKVQLTQAFQERLRSIVKTKLSGKNTTQAINAYAVPVLTYSFGIIKWSNTELEQLQRKMRTIQRRAGQLHPATAIERQTLPREEGGRGQADLKDLHDKQIQSMRQYFQLKSPRSPLIQAIIQADANYTPLNLCSTEERVLETANEQKLRTWAGKPLHGRHYNDLQQPHVDKKASNSWLAKGTLQPETEGFMLAIQDQVIATRNNQKFIQRKDIESDKCRHCHAASETIQHVMAGCKILAQSDYKHRHDQVAKIVHQKLAANAGFLTEKCPYYKYEPETVHENETHKLYWDRAIITDKTVPHNRPDITLVDKSNKTTYLIDIAVPNTNNIQTTYTTKITKYQDLRHEVRDIWGMEKILIIPFIHLSNWDSTKNACDEFGDTQHSPKHLH

SEQ ID NO: 22319 - protein, 881 aa, Dysdera silvatica
MQGNRGKKLVRKVKMALKRNRIHTRHEEPNKHISEYLDTLKQKLGVYARRLRRYKDYTNKKQQNMQFQANQKAFYRKLRETPANKDKYEAPKPAEIETFWKTLWSNEVQHKSAPWIQQEMEATRGIEEMEYTGITIEELQQVIQRTHNWKAPGIDGIHNFWYKKFTSAHGPLAKELTAIIEDPSKMPEFLCKGITYLLPKDQDTSNPAKYRPITCLNTLYKILTGCISEKISRHSESNNLMTEEQKGCQKGTLGCKEQLTIDSVILEQARKQKRKLNTAYIDYKKAFDSVPHSWLLEILSIYKVHPSIIRFLQSSMKQWRTRLQLNTPDSKIETAEIPIRRGIFQGDALSPQWFCLALNPLSRMLNTSKYGYMLKKDKRNLHKVSHLMYVDDIKLYAPTITQLRQLISITETFSKDIGMEFGLDKCKIQKNSKEDLPGIELEDGRLLKTLDEGETYKYLGIMQKRQQEHKKVKVQLTQAFQERLRSIVKTKLSGKNTTQAINAYAVPVLTYSFGIIKWSNTELEQLQRKMRTIQRRAGQLHPATAIERQTLPREEGGRGQADLKDLHDKQIQSMRQYFQLKSPRSPLIQAIIQADANYTPLNLCSTEERVLETANEQKLRTWAGKPLHGRHYNDLQQPHVDKKASNSWLAKGTLQPETEGFMLAIQDQVIATRNNQKFIQRKDIESDKCRHCHAASETIQHVMAGCKILAQSDYKHRHDQVAKIVHQKLAANAGFLTEKCPYYKYEPETVHENETHKLYWDRAIITDKTVPHNRPDITLVDKSNKTTYLIDIAVPNTNNIQTTYTTKITKYQSTRHEVQVIWSMEKIFIIPLVISATGIVPKTLATNLGILNIDPNTYIEIQKATILNTCHIVRKFLDMAH

SEQ ID NO: 22320 - protein, 1108 aa, Dysdera silvatica
MSWTIDMNTYIMRTYYTITKLETDMTNYRPTLHAKFAQQYPHLDISIERITTQRRNIITRNLLAEPILQRLRDEVANDLANTSTSVANPEAPASSAREPLQPSIEEEERRDVEKMEEGFQCALAEYEGSDAATRPRIPRQPASWKLCKATKILNEHTLPLHLQNHNSLQEIHTAIYCAAVAASRANGYEVRNEGRSNRGNKAQPPWQVRLQKRIEELRSSIGRITQYMQGNRSKKLVRKVKMALKRNRIHTRHEEPNKHISEYLDTLKQKLGVYARRLRRYKDYTNKKQQNMQFQANQKAFYRKLRETPANKDKYEAPKPAEIETFWKTLWSNEVQHKSAPWIQQEMEATRGIEEMEYTGITIEELQQVIQRTHNWKAPGIDGIHNFWYKKFTSAHGPLAKELTAIIEDPSKMPEFLCKGITYLLPKDQDTSNPAKYRPITCLNTLYKILTGCISEKISRHSESNNLMTEEQKGCQKGTLGCKEQLTIDSVILEQARKQKRKLNTAYIDYKKAFDSVPHSWLLEILSIYKVHPSIIRFLQSSMKQWRTRLQLNTPDSKIETAEIPIRRGIFQGDALSPQWFCLALNPLSRMLNTSKYGYMLKKDKRNLHKVSHLMYVDDIKLYAPTITQLRQLISITETFSKDIGMEFGLDKCKIQKNSKEDLPGIELEDGRLLKTLDEGETYKYLGIMQKRQQEHKKVKVQLTQAFQERLRSIVKTKLSGKNTTQAINAYAVPVLTYSFGIIKWSNTELEQLQRKMRTIQRRAGQLHPATAIERQTLPREEGGRGQADLKDLHDKQIQSMRQYFQLKSPRSPLIQAITQADANYTPLNLCSTEERVLETANEQKLRTWAGKPLHGRHYNDLQQPHVDKKASNSWLAKGTLQPETEGFMLAIQDQVIATRNNQKFIQRKDIESDKCRHCHAASETIQHVMAGCKILAQSDYKHRHDQVAKIVHQKLAANAGFLTEKCPYYKYEPETVHENETHKLYWDRAIITDKTVPHNRPDITLVDKSNKTTYLIDIAVPNTNNIQTTYTTKITKYQDLRHEVRDIWGMEKILIIPLVISATGIVPKTLATNLEILNIDPNTYIEIQKATILNTCHIVRKFLDMAH

SEQ ID NO: 22321 - protein, 994 aa, Dysdera silvatica
MEEGFQCALAEYEGSDAATRPRIPRQPASWKLCKATKILNEHTLPLHLQKHNSLQEIHTAIYCAAVAASRANGYEVRNEGRSNRGNKAQPPWQVRLQKRIEELRSSIGRITQYMQGNRSKKLVRKVKMALKRNRIHTRHEEPNKHISEYLDTLKQKLSVYARRLRRYKDYTNRKQQNKKFQTNQKAFYRKLQETSASQDKYETPKPAEIETFWKTLWSNEVQHKSAPWIQQEMEATRGIEEMEYTGITIEELQQVIQRTHNWKAPGIDGIHNFWYKKFTSAHGPLAKELTVIIEDPSKMPEFLCKGITYLLPKDQDTSNPAKYRPITCLNTLYKILTGCISEKISRHSESNNLMTEEQKGCQKGTLGCKEQLTIDSVILEQARKQKRKLNTAYIDYKKAFDSVPHSWLLEILSIYKVHPSIIRFLQSSMKQWRTRLQLNTPDSKIETAEIPIRRGIFQGDALSPQWFCLALNPLSRMLNTSKYGYMLKKDKRNLHKVSHLMYVDDIKLYAPTITQLRQLISITETFSKDIGMEFGLDKCKIQKNSKEDLPGIELEDGRLLKTLDEGETYKYLGIMQKRQQEHKKVKVQLTQAFQERLRSIVKTKLSGKNTTQAINAYAVPVLTYSFGIIKWTNTELEQLQRKMRTIQRRAGQLHPATSIERQTLPREEGGRGQADLKDLHDKQIQSMRQYFQLKSPRSPLIQAIIQADANYTPLNLCSTEERVLETANEQKLRTWAGKPLHGRHYNDLQQPHVDKKASNSWLAKGTLQPETEGFMLAIQDQVIATRNNQKFIQKKDIESDKCRHCHAASETIQHVMAGCKILAQSDYKHRHDQVAKIVHQKLAANAGFLTEKCPYYKYEPETVLENETHKLYWDRAIITGKAVPHNRPDITLVDKSDKTTYLIDIAVPNTNNIQTTYTTKITKYQDLRHEVRDIWGMEKIFIIPLVISATGIVPKTLATNLEILNIDPNTYIEIQKATILNTCHIVRKFLDMAH

SEQ ID NO: 22322 - protein, 1005 aa, Dysdera silvatica
MEDEERRDVEKMEEGFQCALAEYEGSDAATRPRIPRQPASWKLCKATKILNEHTLPLHLQNHNSLQEIHTAIYCAAVAASRANGYEVRNEGRSNRGNKAQPPWQVRLQKRIEELRSSIGRITQYMQGNRGKKLVRKVKMALKRNRIHTRHEEPNKHISEYLDTLKQKLGVYARRLRRYKDYTNKKQQNMQFQANQKAFYRKLRETPANKDKYEAPKPAEIETFWKTLWSNEVQHKSAPWIQQEMEATRGIEEMEYTGITIEELQQVIQRTHNWKAPGIDGIHNFWYKKFTSAHGPLAKELTAIIEDPSKMPEFLCKGITYLLPKDQDTSNPAKYRPITCLNTLYKILTGCISEKISRHSESNNLMTEEQKGCQKGTLGCKEQLTIDSVILEQARKQKRKLNTAYIDYKKAFDSVPHSWLLEILSIYKVHPSIIRFLQSSMKQWRTRLQLNTPDSKIETAEIPIRRGIFQGDALSPQWFCLALNPLSRMLNTSKYGYMLKKDKRNLHKVSHLMYVDDIKLYAPTITQLRQLISITETFSKDIGMEFGLDKCKIQKNSKEDLPGIELEDGRLLKTLDEGETYKYLGIMQKRQQEHKKVKVQLTQAFQERLRSIVKTKLSGKNTTQAINAYAVPVLTYSFGIIKWSNTELEQLQRKMRTIQRRAGQLHPATAIERQTLPREEGGRGQADLKDLHDKQIQSMRQYFQLKSPRSPLIQAIIQADANYTPLNLCSTEERVLETANEQKLRTWAGKPLHGRHYNDLQQPHVDKKASNSWLAKGTLQPETEGFMLAIQDQVIATRNNQKFIQRKDIESDKCRHCHAASETIQHVMAGCKILAQSDYKHRHDQVAKIVHQKLAANAGFLTEKCPYYKYEPETVHENETHKLYWDRAIITDKTVPHNRPDITLVDKSNKTTYLIDIAVPNTNNIQTTYTTKITKYQDLRHEVRDIWGMEKILIIPLVISATGIVPKTLATNLEILNIDPNTYIEIQKATILNTCHIVRKFLDMAH

SEQ ID NO: 22323 - protein, 881 aa, Dysdera silvatica
MQGNRSKKLVRKVKMALKRNRIHTRHEEPNKHISEYLDTLKQKLGVYARRLRRYKDYTNKKQQNMQFQANQKAFYRKLRETPANKDKYEAPKPAEIETFWKTLWSNEVQHKSAPWIQQEMEATRGIEEMEYTGITIEELQQVIQRTHNWKAPGIDGIHNFWYKKFTSAHGPLAKELTAIIEDPSKMPEFLCKGITYLLPKDQDTSNPAKYRPITCLNTLYKILTGCISEKISRHSESNNLMTEEQKGCQKGTLGCKEQLTIDSVILEQARKQKRKLNTAYIDYKKAFDSVPHSWLLEILSIYKVHPSIIRFLQSSMKQWRTRLQLNTPDSKIETAEIPIRRGIFQGDALSPQWFCLALNPLSRMLNTSKYGYMLKKDKRNLHKVSHLMYVDDIKLYAPTITQLRQLISITETFSKDIGMEFGLDKCKIQKNSKEDLPGIELEDGRLLKTLDEGETYKYLGIMQKRQQEHKKVKVQLTQAFQERLRSIVKTKLSGKNTTQAINAYAVPVLTYSFGIIKWSNTELEQLQRKMRTIQRRAGQLHPATAIERQTLPREEGGRGQADLKDLHDKQIQSMRQYFQLKSPRSPLIQAIIQADANYTPLNLCSTEERVLETANEQKLRTWAGKPLHGRHYNDLQQPHVDKKASNSWLAKGTLQPETEGFMLAIQDQVIATRNNQKFIQRKDIESDKCRHCHAASETIQHVMAGCKILAQSDYKHRHDQVAKIVHQKLAANAGFLTEKCPYYKYEPETVHENETHKLYWDRAIITDKTVPHNRPDITLVDKSNKTTYLIDIAVPNTNNIQTTYTTKITKYQDLRHEVRDIWGMEKIFIIPLVISATGIVPKTLATNLEILNIDPNTYIEIQKATILNTCHIVRKFLDMAH

SEQ ID NO: 22324 - protein, 1169 aa, Dysdera silvatica
MNHNENMNGASVVALLNQNRIRTLSRGVCSKNMQQSLLGGAGSCSGAYNCTATRTNRAHSALQPNTGTTTRAERPRQRMSWTIDMNTYIMRTYYTITKLETDMTNYRPTLHAKFAQQYPHLDISIERITTQRRNIITRNLLAEPILQRLRDEVANDLANTSTSVANPEAPASSAREPLQTSIEQEERRDVEKMEEGFQCALAEYEGSDAAARPRIPRQPEYWKLCAATKILNEHTLPLHLQKHNSLQEIHTAIYCAAVAASRANGYEVRNEGRSNRGNKAQPPWQVRLEKRIEELRSSIGRITQYMQGNRGKKLVRKVKMALKRNRIHTRHEEPNKHISEYLDTLKQKLGVYARRLRRYKDYTNRKQQNMQFQANQKAFYRKLRETPANKDKYEAPKPAEIETFWKTLWSNEVQHKSAPWIQQEMEATRGIEEMEYTGITIEELQQVIQRTHNWKAPGIDGIHNFWYKKFTSAHGPLAKELTAIIEDPSKMPEFLCKGITYLLPKDQDTSNPAKYRPITCLNTLYKILTGCISEKISRHSESNNLMAEEQKGCQKGTLGCKEQLTIDSVILEQARKQKRKLNTAYIDYKKAFDSVPHSWLLEILSIYKVHPSIIRFLQSSMKQWRTRLQLNTPDSKIETAEIPIRRGIFQGDALSPQWFCLALNPLSRMLNTSKYGYMLKKDKRNLHKVSHLMYVDDIKLYAPTITQLRQLISITETFSKDIGMEFGLDKCKIQKNSKEDLPGIELEDGRLLKTLDEGETYKYLGIMQKRQQEHKKVKVQLTQAFQERLRSIVKTKLSGKNTTQAINAYAVPVLTYSFGIIKWSNTELEQLQRKMRTIQRRAGQLHPATAIERQTLPREEGGRGQADLKDLHDKQIQSMRQYFQLKSPRSPLIQAIIQADANYTPLNLCSTEERVLETANEQKLRTWAGKPLHGRHYNDLQQPHVDKKASNSWLAKGTLQPETEGFMLAIQDQVIATRNNQKFIQRKDIESDKCRHCHAASETIQHVMAGCKILAQSDYKHRHDQVAKIVHQKLAANAGFLTEKCPYYKYEPETVHENETHKLYWDRAIITDKTVPHNRPDITLVDKSNKTTYLIDIAVPNTNNIQTTYTTKITKYQDLRHEVRDIWGMEKIFIIPLVISATGIVPKTLATNLETLNIDPNTYIEIQKA

SEQ ID NO: 22325 - protein, 1103 aa, Dysdera silvatica
MYIYMYVCMYLCASNCTATRTNRAHSALQPSIGATTRAERARQRMSWTIDMNTYIMRTYYTITKLETDMTNYRPTLHAKFAQQYPHLDISIERITTQRRNIITRNLLAQPILQRLRDEVANDLVNTSTSVANPEAPAIGAREPLQTSIEEEERRDVEKMEEGFQCALAEYEGSNAATRPRIPRQPASWKLCKATKILNEHTLPLHLQKHNSLQEIHTAIYCATVAASRVNGYEVRNEDRNNRGNKAQPPWQVRLQKRIEELRSSIGRITQYMQGNRSKKLVRKVKMALKRNRIHTRHEEPNKHISEYLDTLKQKLGVYARRLRRYKDCTNRKQQNMQFQANQKAFYRKLQETSASQDKYEAPKPAVIETFWKTLWSNEVQHKSAPWIQQEMEATRGIEEMEYTGITIEELQQVIQRTHNWKAPGIDGIHNFWYKKFTSAHGPLAKELTAIIEDPSKMPEFLCKGITYLLPKDQDTSNPAKYRPITCLNTLYKILTGCISEKISRHSESNNLMAEEQKGCQKGTLGCKEQLTIDSVILEQARKQKRKLNTAYIDYKKAFDSVPHSWLLEILSIYKVHPSIIRFLQSSMKQWRTRLQLNTPDSKIETAEIPIRRGIFQGDALSPQWFCLALNPLSRMLNTSKYGYMLKKDKRNLHKVSHLMYVDDIKLYAPTITQLRQLISITETFSKDIGMEFGLDKCKIQKNSKEDLPGIELEDGRLLKTLDEGETYKYLGIMQKRQQEHKKVKVQLTQAFQERLRSIVKTKLSGKNTTQAINAYAVPVLTYSFGIIKWSNTELEQLQRKMRTIQRRAGQLHPATAIERQTLPREEGGRGQADLKDLHDKQIQSMRQYFQLKSPRSPLIQAIIQADANYTPLNLCSTEERVLETANEQKLRTWAGKPLHGRHYNDLQQPHVDKKASNSWLAKGTLQPETEGFMLAIQDQVIATRNNQKFIQRKDIESDKCRHCHAASETIQHVMAGCKILAQSDYKHRHDQVAKIVHQKLAANAGFLTEKCPYYKYEPETVHENETHKLYWDRAIITDKTVPHNRPDITLVDKSNKTTYLIDIAVPNTNNIQTTYTTKITKYQDLRHEVRDIKGVWKRSSSSR

SEQ ID NO: 22326 - protein, 1186 aa, Dysdera silvatica
MNHNENMNGASVVSLLNQNRVRVLSRGASSKNMQQSLLGGVGGCSGASNCTATRTNTAQSALQPSIGATTRAERPRQRMSWTIDMNTYIMRTYYTITKLETDMTNYRPTLHAKFAQQYPHLDISIERITTQRRNIITRNLLAEPILQRLRDEVANDLANTSTSVANPEAPASSAREPLQPSIEEEERRDVEKMEEGFQCALAEYEGSDAATRPRIPRQPASWKLCKATKILNEHTLPLHLQNHNSLQEIHTAIYCAAVAASRANGYEVRNEGRSNRGNKAQPPWQVRLEKRIEELRSSIGRITQYMQGNRGKKLVRKVKMALKRNRIHTRHEEPNKHISEYLDTLKQKLGVYARRLRRYKDCTNKKQQNMQFQANQKAFYRKLRETPANKDKYEAPKPAEIETFWKTLWSNEVQHKSAPWIQQEMEATRGIEEMEYTGITIEELQQVIQRTHNWKAPGIDGIHNFWYKKFTSAHGPLAKELTAIIEDPSKMPEFLCKGITYLLPKDQDTSDPAKYRPITCLNTLYKILTGCISEKISRHSESNNLMAEEQKGCQKGTLGCKEQLTIDSVILEQARKQKRKLNTAYIDYKKAFDSVPHSWLLEILSIYKVHPSIIRFLQSSMKQWRTRLQLNTPDSKIESAEIPIRRGIFQGDALSPQWFCLALNPLSRMLNASKYGYMLKKDKRNLHKVSHLMYVDDIKLYAPTITQLRQLISITETFSKDIGMEFGLDKCKIQKNSKEDLPGIELEDGRLLKTLDEGETYKYLGIMQKRQQEHKKVKVQLTQAFQERLRSIVKTKLSGKNTTQAINAYAVPVLTYSFGIIKWSNTELEQLQRKMRTIQRRAGQLHPATAIERQTLPREEGGRGQADLKDLHDKQIQSMRQYFQLKSPRSPLIQAIIQADANYTPLNLCSTEERVLETANEQKLRTWAGKPLHGRHYNDLQQPHVDKKASNSWLAKGTLQPETEGFMLAIQDQVIATRNNQKFIQRKDIESDKCRHCHAASETIQHVMAGCKILAQSDYKHRHDQVAKIVHQKLAANAGFLTEKCPYYKYEPETVHENETHKLYWDRAIITDKTVPHNRPDITLVDKSSKTTYLIDIAVPNTNNIQTTYTTKITKYQDLRHEVRDIWGMEKIFIIPLVISATGIVPKTLATNLEILNIDPNTYIEIQKATILNTCHIVRKFLDMAH

SEQ ID NO: 22327 - protein, 1140 aa, Dysdera silvatica
MKLQLNGHKNVGQEYQNMKIIYIYVYERPRQRMSWTIDMNTYIMRTYYTITKLETDMTNYRPTLHAKFAQQYPHLDISIERITTQRRNIITRNLLAEPILQRLRDEVANDLANTSTSVANPEAPASSAREPLQPSIEEEERRDVEKMEEGFQCALAEYEGSDAATRPRIPRQPASWKLCKATKILNEHTLPLHLQNHNSLQEIHTAIYCAAVAASRANGYEVRNEGRSNRGNKAQPPWQVRLQKRIEELRSSIGRITQYMQGNRGKKLVRKVKMALKRNRIHTRHEEPNKHISEYLDTLKQKLGVYARRLRRYKDYTNKKQQNMQFQANQKAFYRKLRETPANKDKYEAPKPAEIETFWKTLWSNEVQHKSAPWIQQEMEATRGIEEMEYTGITIEELQQVIQRTHNWKAPGIDGIHNFWYKKFTSAHGPLAKELTAIIEDPSKMPEFLCKGITYLLPKDQDTSNPAKYRPITCLNTLYKILTGCISEKISRHSESNNLMTEEQKGCQKGTLGCKEQLTIDSVILEQARKQKRKLNTAYIDYKKAFDSVPHSWLLEILSIYKVHPSIIRFLQSSMKQWRTRLQLNTPDSKIETAEIPIRRGIFQGDALSPQWFCLALNPLSRMLNTSKYGYMLKKDKRNLHKVSHLMYVDDIKLYAPTITQLRQLISITETFSKDIGMEFGLDKCKIQKNSKEDLPGIELEDGRLLKTLDEGETYKYLGIMQKRQQEHKKVKVQLTQAFQERLRSIVKTKLSGKNTTQAINAYAVPVLTYSFGIIKWSNTELEQLQRKMRTIQRRAGQLHPATAIERQTLPREEGGRGQADLKDLHDKQIQSMRQYFQLKSPRSPLIQAIIQADANYTPLNLCSTEERVLETANEQKLRTWAGKPLHGRHYNDLQQPHVDKKASNSWLAKGTLQPETEGFMLAIQDQVIATRNNQKFIQRKDIESDKCRHCHAASETIQHVMAGCKILAQSDYKHRHDQVAKIVHQKLAANAGFLTEKCPYYKYEPETVHENETHKLYWDRAIITDKTVPHNRPDITLVDKSNKTTYLIDIAVPNTNNIQTTYTTKITKYQDLRHEVRDIWGMEKILIIPLVISATGIVPKTLATNLEILNIDPNTYIEIQKATILNTCHIVRKFLDMAH

SEQ ID NO: 22328 - protein, 994 aa, Dysdera silvatica
MEEGFQCALAEYEGSDAATRPRIPRQPASWKLCKATKILNEHTLPLHLQNHNSLQEIHTAIYCAAVAASRANGYEVRNEGRSNRGNKAQPPWQVRLQKRIEELRSSIGRITQYMQGNRSKKLVRKVKMALKRNRIHTRHEEPNKHISEYLDTLKQKLGVYARRLRRYKDYTNRKQQNMQFQANQKAFYRKLRETPANKDKYEAPKPAEIETFWKTLWSNEVQHKSAPWIQQEMEATRGIEEMEYTGITIEELQQVIQRTHNWKAPGIDGIHNFWYKKFTSAHGPLAKELTAIIEDPSKMPEFLCKGITYLLPKDQDTSNPAKYRPITCLNTLYKILTGCISEKISRHSESNNLMTEEQKGCQKGTLGCKEQLTIDSVILEQARKQKRKLNTAYIDYKKAFDSVPHSWLLEILSIYKVHPSIIRFLQSSMKQWRTRLQLNTPDSKIETAEIPIRRGIFQGDALSPQWFCLALNPLSRMLNTSKYGYMLKKDKRNLHKVSHLMYVDDIKLYAPTITQLRQLISITETFSKDIGMEFGLDKCKIQKNSKEDLPGIELEDGRLLKTLDEGETYKYLGIMQKRQQEHKKVKVQLTQAFQERLRSIVKTKLSGKNTTQAINAYAVPVLTYSFGIIKWSNTELEQLQRKMRTIQRRAGQLHPATAIERQTLPREEGGRGQADLKDLHDKQIQSMRQYFQLKSPRSPLIQAITQADANYTPLNLCSTEERVLETANEQKLRTWAGKPLHGRHYNDLQQPHVDKKASNSWLAEGTLQPETEEFMLAIQDQVIATRNNQKFIQRKDIESDKCRHCHAASGTIQHVMAGCKILAQSDYKHRHDQVAKIVHQKLAANAGFLTEKCPYYKYEPETVHGNETHKLYWDRAIITDKTVPHNRPDITLVDKSNKTTYLIAIAEPITNNIQTTYTTKITKYQDLRHEVRDIWGMEKILIIPLVISATGIVPKTLTMNLEILNIDPNTYIEIQKATILNTCHIVRKFLDMAH

SEQ ID NO: 22329 - protein, 1186 aa, Dysdera silvatica
MNHNENMNGASVVSLLNQNRVRVLSRGASSKNMQQSLLGGVGGCSGASNCTATRTNTAQSALQPSIGATTRAERPRQRMSWTIDMNTYIMRTYYTITKLETDMTNYRPTLHAKFAQQYPHLDISIERITTQRRNIITRNLLAEPILQRLRDEVANDLANTSTSVANPEAPASSAREPLQPSIEEEERRDVEKMEEGFQCALAEYEGSDAATRPRIPRQPASWKLCKATKILNEHTLPLHLQNHNSLQEIHTAIYCAAVAASRANGYEVRNEGRSNRGNKAQPPWQVRLEKRIEELRSSIGRITQYMQGNRSKKLVRKVKMALKRNRIHTRHEEPNKHISEYLDTLKQKLGVYARRLRRYKDYTNRKQQNMQFQANQKAFYRKLRETPANKDKYEAPKPAEIETFWKTLWSNEVQHKSAPWIQQEMEATRGIEEMEYTGITIEELQQVIQRTHNWKAPGIDGIHNFWYKKFTSAHGPLAKELTAIIEDPSKMPEFLCKGITYLLPKDQDTSNPAKYRPITCLNTLYKILTGCISEKISRHSESNNLMTEEQKGCQKGTLGCKEQLTIDSVILEQARKQKRKLNTAYIDYKKAFDSVPHSWLLEILSIYKVHPSIIRFLQSSMKQWRTRLQLNTPDSKIETAEIPIRRGIFQGDALSPQWFCLALNPLSRMLNTSKYGYMLKKDKRNLHKVSHLMYVDDIKLYAPTITQLRQLISITETFSKDIGMEFGLDKCKIQKNSKEDLPGIELEDGRLLKTLDEGETYKYLGIMQKRQQEHKKVKVQLTQAFQERLRSIVKTKLSGKNTTQAINAYAVPVLTYSFGIIKWSNTELEQLQRKMRTIQRRAGQLHPATAIERQTLPREEGGRGQADLKDLHDKQIQSMRQYFQLKSPRSPLIQAIIQADANYTPLNLCSTEERVLETANEQKLRTWAGKPLHGRHYNDLQQPHVDKKASNSWLAKGTLQPETEGFMLAIQDQVIATRNNQKFIQRKDIESDKCRHCHAASETIQHVTAGCKILAQSDYKHRHDQVAKIVHQKLAANAGFLTEKCPYYKYEPETVHENETHKLYWDRAIITDKTVPHNRPDITLVDKSSKTTYLIDIAVPNTNNIQTTYTTKITKYQDLRHEVRDIWDMEKILIIPLVISATGIVPKTLATNLEILNIDPNTYIEIQKATILNTCHIVRKFLDMAH

SEQ ID NO: 22330 - protein, 994 aa, Dysdera silvatica
MEEGFQCALAEYEGSDATTRPRIPRQPASWKLCKATKILNEHTLPLHLQNHNSLQEIHTAIYCAAVAASRANGYEVRNEGRSNRGNKAQPPWQVRLEKRIEELRSSIGRITQYMQGNRSKKLVRKVKMALKRNRIHTRHEEPNKHISEYLDTLKQKLGVYARRLRRYKDYTNKKQQNMQFQANQKAFYRKLRETPANKDKYEAPKPAEIETFWKTLWSNEVQHKSAPWIQQEMEATRGIEEMEYTGITIEELQQVIQRTHNWKAPGIDGIHNFWYKKFTSAHGPLAKELTAIIEDPSKMPEFLCKGITYLLPKDQDTSNPAKYRPITCLNTLYKILTGCISEKISRHSESNNLMTEEQKGCQKGTLGCKEQLTIDSVILEQARKQKRKLNTAYIDYKKAFDSVPHSWLLEILSIYKVHPSIIRFLQSSMKQWRTRLQLNTPDSKIETAEIPIRRGIFQGDALSPQWFCLALNPLSRMLNTSKYGYMLKKDKRNLHKVSHLMYVDDIKLYAPTITQLRQLISITETFSKDIGMEFGLDKCKIQKNSKEDLPGIELEDGRLLKTLDEGETYKYLGIMQKRQQEHKKVKVQLTQAFQERLRSIVKTKLSGKNTTQAINAYAVPVLTYSFGIIKWSNTELEQLQRKMRTIQRRAGQLHPATAIERQTLPREEGGRGQADLKDLHDKQIQSMRQYFQLKSPRSPLIQAIIQADANYTPLNLCSTEERVLETANEQKLRTWAGKPLHGRHYNDLQQPHVDKKASNSWLAKGTLQPETEGFMLAIQDQVIATRNNQKFIQRKDIESDKCRHCHAASETIQHVMAGCKILAQSDYKHRHDQVAKIVHQKLAANAGFLTEKCPYYKYEPETVHENETHKLYWDRAIITDKTVPHNRPDITLVDKSNKTTYLIDIAVPNTNNIQTTYTTKITKYQDLRHEVRDIWGMEKILIIPLVISATGIVPKTLATNLEILNIDPNTYIEIQKATILNTCHIVRKFLDMAH

SEQ ID NO: 22331 - protein, 1186 aa, Dysdera silvatica
MNHSNMNGESVVALLNQNRIRTLSRGVCSKNMQQSLLGGAGSCSGAYNCTATRTNRAHSALQPSIGATTRAERARQRMSWTIDMNTYIMRTYYTITKLETDMTNYRPTLHAKFAQQCPHLDISIERITTQRRNIITRNLLADPILQRLRDEVANDLVNTPTSVANPEPSVSSPREPLPPNIEEEEERRDVEKMEEGFQCALAECEGSDAATRPRIPRQPASWKLCKTTKILNEYTLPLHLQNHNSLQEIHTAIYCAAVAASHANGYEVRNEGRSNRGNKAQPPWQMRLQKRIEELRRSIGRITQYMQGNRGKKLVRKVKMALKRNRTHTRHEEPNKHISEYLDTLKQKLGVYARRLRRYKDCTNKKQQNMQFQANQKAFYRKLRETPANKDKYEAPKPAVIETFWKTLWSNEVQHKSAPWIQQEMEATRGIEEMEYTGITIEELQQVIQRTHNWKAPGIDGIHNFWYKKFTSTHGPLAKELTAIIEDPSKMPEFLCKGITYLLPKDQDTSNPAKYRPITCLNTLYKILTGCISEKISRHSESNNLMTEEQKGCQKGTLGCKEQLTIDSVILEQARKQKRKLNTAYIDYKKAFDSVPHSWLLEILSIYKVHPSIIRFLQSSMKQWRTRLQLNTPDSKIETAEIPIRRGIFQGDALSPQWFCLALNPLSRMLNTSKYGYMLKKDKRNLHKVSHLMYVDDIKLYAPTITQLRQLISITETFSKDIGMEFGLDKCKIQENRKEDLPGIEFEDGRLLKTLDEGETYKYLGIMQKRQQEHKKVKVQLTQAFQERLRSIVKTKLSGKNTTQAINAYAVPVLTYSFGIIKWTNTELEQLQRKMRTIQRRAGQLHPATAIERQTLPREEGGRGQADLKDLHDKQIQSMRQYFQLKSPRSPLIQAIIQADANYTPLNLCSTEKRVLETANEQKLRTWAGKPLHGRHYNDLQQPHVDKKASNSWLAKGTLQPETEGFMLAIQDQVIATRNNQKFIQRKDIESDKCRHCHAASETIQHVMAGCKILAQSDYKHRHDQVAKIVHQKLAANAGFLTEKCPYYKYEPETVHENETHKLYWDRAIITDKTVPHNRPDITLVDKSNKTTYLIDIAVPNTNNIQTTYTTKITKYQDLRHEVRDIWGMEKILIIPLVISATGIVPKTLATNLEILNIDPNTYIEIQKATILNTCHIVRKFLDMAH

SEQ ID NO: 22332 - protein, 1189 aa, Dysdera silvatica
MNHNENMNGESVVALLNQNRIRTLSRGVCSKNMQQSLLGGAGSCSGAYNCTATRTNRAHSALQPSIGATTRAERARQRMSWTIDMNTYIMRTYYTITKLETDMTNYRPTLHAKFAQQYPHLDISIGRITTQRRNIITRNLLAESILQRLRDEVANDLANTSTSVANPEVPEAPAIGAREPLQTSIEQEERRDVEKMEEGFQCALADYEGSDAATRPRIPHQPASWKLCKATKILNEYTLPLHLQNHNSLQEIHTAIYCAAVAASRANGYEVMNEGRSNRGNKAQPPWQVRLEKRIEELRRSIGRITQYMQGNRGKKLVRKVKMALKRNRMHTRHEEPNKHISEYLDTLKQKLGVYARRLRRYKDCTNKKQQNMQFQANQKAFYRKLQETPANKDKYEAPKPAVIETFWKTLWSNEVQHKSAPWIQQEMEATRGIEEMEYTGITIEELQQVIQRTHNWKAPGIDGIHNFWYKKFTSIHGPLAKELTAIIEDPSEMPEFLCKGITYLLPKDQDKSNPAKYRPITCLNTLYKILTGCISEKISRHSESNNLMTEEQKGCQKGTLGCKEQLTIDSVILEQARKQKRKLNTAYIDYKKAFDSVPHSWLLEILSIYKVHPSIIRFLQSSMKQWRTRLQLNTPDSKIKTAEIPIRRGIFQGDALSPQWFCLALNPLSRMLNTSKYGYMLKKDKRNLHKVSHLMYVDDIKLYAPTITQLRQLISITETFSKDIGMEFGLDKCKIQKNSKEDLPGIELEDGRLLKTLDEGETYKYLGIMQKRQQEHKKVKVQLTQAFQERLRSIVKTKLSGKNTTQAINAYAVPVLTYSFGIIKWSNTELEQLQRKMRTIQRRAGQLHPATAIERQTLPREEGGRGQADLKDLHDKQIQSMRQYFQLKSPRSPLIQAIIQADANYTPLNLCSTEERVLETANEQKLRTWAGKPLHGRHYNDLQQPHVDKKASNSWLAKGTLQPETEGFMLAIQDQVIATRNNQKFIQRKDIESDKCRHCHAASETIQHVMAGCKILAQSDYKHRHDQVAKIVHQKLAANAGFLTEKCPYYKYEPETVHENETHKLYWDRAIITDKTVPHNRPDITLVDKSNKTTYLIDIAVPNTNNIQTTYTTKITKYQDLRHEVRDIWGMEKILIIPLVISATGIVPKTLATNLEILNIDPNTYIEIQKATILNTCHIVRKFLDMAH

SEQ ID NO: 22333 - protein, 994 aa, Dysdera silvatica
MEEGFQCALAEYEGSDAAARPRIPRQPEYWKLCAATKILNEHTLPLHLQKHNSLQEIHTAIYCAAVAASRANGYEVRNEGRSNRGNKAQPPWQVRLQKRIEELRSSIGRITQYMQGNRGKKLVRKVKMALKRNRIHTRHEEPNKHISEYLDTLKQKLGVYARRLRRYKDYTNRKQQNMQFQANQKAFYRKLRETPANKDKYEAPKPAEIETFWKTLWSNEVQHKSAPWIQQEMEATRGIEEMEYTGITIEELQQVIQRTHNWKAPGIDGIHNFWYKKFTSAHGPLAKELTAIIEDPSKMPEFLCKGITYLLPKDQDTSNPAKYRPITCLNTLYKILTGCISEKISRHSESNNLMAEEQKGCQKGTLGCKEQLTIDSVILEQARKQKRKLNTAYIDYKKAFDSVPHSWLLEILSIYKVHPSIIRFLQSSMKQWRTRLQLNTPDSKIETAEIPIRRGIFQGDALSPQWFCLALNPLSRMLNTSKYGYMLKKDKRNLHKVSHLMYVDDIKLYAPTITQLRQLISITETFSKDIGMEFGLDKCKIQKNSKEDLPGIELEDGRLLKTLDEGETYKYLGIMQKRQQEHKKVKVQLTQAFQERLRSIVKTKLSGKNTTQAINAYAVPVLTYSFGIIKWSNTELEQLQRKMRTIQRRAGQLHPATAIERQTLPREEGGRGQADLKDLHDKQIQSMRQYFQLKSPRSPLIQAIIQADANYTPLNLCSTEERVLETANEQKLRTWAGKPLHGRHYNDLQQPHVDKKASNSWLAKGTLQPETEGFMLAIQDQVIATRNNQKFIQRKDIESDKCRHCHAASETIQHVMAGCKILAQSDYKHRHDQVAKIVHQKLAANAGFLTEKCPYYKYEPETVHENETHKLYWDRAIITDKTVPHNRPDITLVDKSNKTTYLIDIAVPNTNNIQTTYTTKITKYQDLRHEVRDIWGMEKILIIPLVISATGIVPKTLATNLEILNIDPNTYIEIQKATILNTCHIVRKFLDMAH

SEQ ID NO: 22334 - protein, 928 aa, Dysdera silvatica
MASRANGYEVRNEGRSNRGNKAQPPWQVRLQKRIEELRSSIGRITQYMQGNRGKKLVRKVKMALKRNRIHTRHEEPNKHISEYLDTLKQKLGVYARRLRRYKDYTNKKQQNMQFQANQKAFYRKLRETPANKDKYEAPKPAEIETFWKTLWSNEVQHKSAPWIQQEMEATRGIEEMEYTGITIEELQQVIQRTHNWKAPGIDGIHNFWYKKFTSAHGPLAKELTAIIEDPSKMPEFLCKGITYLLPKDQDTSNPAKYRPITCLNTLYKILTGCISEKISRHSESNNLMTEEQKGCQKGTLGCKEQLTIDSVILEQARKQKRKLNTAYIDYKKAFDSVPHSWLLEILSIYKVHPSIIRFLQSSMKQWRTRLQLNTPDSKIETAEIPIRRGIFQGDALSPQWFCLALNPLSRMLNTSKYGYMLKKDKRNLHKVSHLMYVDDIKLYAPTITQLRQLISITETFSKDIGMEFGLDKCKIQKNSKEDLPGIELEDGRLLKTLDEGETYKYLGIMQKRQQEHKKVKVQLTQAFQERLRSIVKTKLSGKNTTQAINAYAVPVLTYSFGIIKWSNTELEQLQRKMRTIQRRAGQLHPATAIERQTLPREEGGRGQADLKDLHDKQIQSMRQYFQLKSPRSPLIQAIIQADANYTPLNLCSTEERVLETANEQKLRTWAGKPLHGRHYNDLQQPHVDKKASNSWLAKGTLQPETEGFMLAIQDQVIATRNNQKFIQRKDIESDKCRHCHAASETIQHVMAGCKILAQSDYKHRHDQVAKIVHQKLAANAGFLTEKCPYYKYEPETVHENETHKLYWDRAIITDKTVPHNRPDITLVDKSNKTTYLIDIAVPNTNNIQTTYTTKITKYQDLRHEVRDIWGMEKILIIPLVISATGIVPKTLATNLEILNIDPNTYIEIQKATILNTCHIVRKFLDMAH

SEQ ID NO: 22335 - protein, 877 aa, Dysdera silvatica
MSKKLVRKVKMALKRNRIHTRHEEPNKHISEYLDTLKQKLGVYARRLRRYKDYTNKKQQNMQFQANQKAFYRKLRETPANKDKYEAPKPAEIETFWKTLWSNEVQHKSAPWIQQEMEATRGIEEMEYTGITIEELQQVIQRTHNWKAPGIDGIHNFWYKKFTSAHGPLAKELTAIIEDPSKMPEFLCKGITYLLPKDQDTSNPAKYRPITCLNTLYKILTGCISEKISRHSESNNLMTEEQKGCQKGTLGCKEQLTIDSVILEQARKQKRKLNTAYIDYKKAFDSVPHSWLLEILSIYKVHPSIIRFLQSSMKQWRTRLQLNTPDSKIETAEIPIRRGIFQGDALSPQWFCLALNPLSRMLNTSKYGYMLKKDKRNLHKVSHLIYVDDIKLYAPTITQLRQLISITETFSKDIGMEFGLDKCKIQKNSKEDLPGIELEDGRLLKTLDEGETYKYLGIMQKRQQEHKKVKVQLTQAFQERLRSIVKTKLSGKNTTQAINAYAVPVLTYSFGIIKWSNTELEQLQRKMRTIQRRAGQLHPATAIERQTLPREEGGRGQADLKDLHDKQIQSMRQYFQLKSPRSPLIQAIIQADANYTPLNLCSTEERVLETANEQKLRTWAGKPLHGRHYNDLQQPHVDKKASNSWLAKGTLQPETEGFMLAIQDQVIATRNNQKFIQRKDIESDKCRHCHAASETIQHVMAGCKILAQSDYKHRHDQVAKIVHQKLAANAGFLTEKCPYYKYEPETVHENETHKLYWDRAIITDKTVPHNRPDITLVDKSNKTTYLIDIAVPNTNNIQTTYTTKITKYQDLRHEVRDIWGMEKIFIIPLVISATGIVPKTLATNLEILNIDPNTYIEIQKATILNTCHIVRKFLDMAH

SEQ ID NO: 22336 - protein, 1186 aa, Dysdera silvatica
MNHNENMNGASVVALLNQNRVRVLSRGASSKNMQQSLLGGVGGCSGASNCTATRTNTAQSALQPSIGATTRAERPRQRMSWTIDMNTYIMRTYYTITKLETDMTNYRPTLHAKFAQQYPHLDISIERITTQRRNIITRNLLAEPILQRLRDEVANDLANTSTSVANPEAPASSAREPLQPSIEEEERRDVEKMEEGFQCALAEYEGSDAATRPRIPRQPASWKLCKATKILNEHTLPLHLQNHNSLQEIHTAIYCAAVAASRANGYEVRNEGRSNRGNKAQPPWQVRLEKRIEELRSSIGRITQYMQGNRSKKLVRKVKMALKRNRIHTRHEEPNKHISEYLDTLKQKLGVYARRLRRYKDYTNRKQQNMQFQANQKAFYRKLRETPANKDKYEAPKPAEIETFWKTLWSNEVQHKSAPWIQQEMEATRGIEEMEYTGITIEELQQVIQRTHNWKAPGIDGIHNFWYKKFTSAHGPLAKELTAIIEDPSKMPEFLCKGITYLLPKDQDTSNPAKYRPITCLNTLYKILTGCISEKISRHSESNNLMTEEQKGCQKGTLGCKEQLTIDSVILEQARKQKRKLNTAYIDYKKAFDSVPHSWLLEILSIYKVHPSIIRFLQSSMKQWRTRLQLNTPDSKIETAEIPIRRGIFQGDALSPQWFCLALNPLSRMLNTSKYGYMLKKDKRNLHKVSHLMYVDDIKLYAPTITQLRQLISITETFSKDIGMEFGLDKCKIQKNSKEDLPGIELEDGRLLKTLDEGETYKYLGIMQKRQQEHKKVKVQLTQAFQERLRSIVKTKLSGKNTTQAINAYAVPVLTYSFGIIKWSNTELEQLQRKMRTIQRRAGQLHPATAIERQTLPREEGGRGQADLKDLHDKQIQSMRQYFQLKSPRSPLIQAITQADANYTPLNLCSTEERVLETANEQKLRTWAGKPLHGRHYNDLQQPHVDKKASNSWLAKGTLQPETEGFMLAIQDQVIATRNNQKFIQRKDIESDKCRHCHAASETIQHVMAGCKILAQSDYKHRHDQVAKIVHQKLAANAGFLTEKCPYYKYEPETVHENETHKLYWDRAIITDKTVPHNRPDITLVDKSNKTTYLIDIAVPNTNNIQTTYTTKITKYQDLRHEVRDIWGMEKIFIIPLVISATGIVPKTLATNLEILNIDPNTYIEIQKATILNTCHIVRKFLDMAH

SEQ ID NO: 22337 - protein, 1153 aa, Dysdera silvatica
MNHNENMNGASVVSLLNQNRVRVLSRGASSKNMQQSLLGGVGGCSGASNCTATRTNTAQSALQPSIGATTRAERPRQRMSWTIDMNTYIMRTYYTITKLETDMTNYRPTLHAKFAQQYPHLDISIERITTQRRNIITRNLLAEPILQRLRDEVANDLANTSTSVANPEAPAIGAREPLQPSIEEEERRDVEKMEEGFQCALAEYEGSDAATRPRIPRQPASWKLCKATKILNEHTLPLHLQNHNSLQEIHTAIYCAAVAASRANGYEVRNEGRSNRGNKAQPPWQVRLEKRIEELRSSIGRITQYMQGNRGKKLVRKVKMALKRNRVHTRHEEPNKHISEYLDTPEDSEDTKTVPTKTNRICNSKQTRKPDISDTHGPMAQHKSAPWIQQEMEATRGIEEMEYTGITIEELQQVIQRTHNWKAPGIDGIHNFWYKKFTSAHGPLAKELTAIIEDPSKMPEFLCKGITYLLPKDQDTSNPAKYRPITCLNTLYKILTGCISEKISRHSESNNLMTEEQKGCQKGTLGCKEQLTIDSVILEQARKQKRKLNTAYIDYKKAFDSVPHSWLLEILSIYKVHPSIIRFLQSSMKQWRTRLQLNTPDSKIETAEIPIRRGIFQGDALSPQWFCLALNPLSRMLNTSKYGYMLKKDKRNLHKVSHLMYVDDIKLYAPTITQLRQLISITETFSKDIGMEFGLDKCKIQKNSKEDLPGIELEDGRLLKTLDEGETYKYLGIMQKRQQEHKKVKVQLTQAFQERLRSIVKTKLSGKNTTQAINAYAVPVLTYSFGIIKWSNTELEQLQRKMRTIQRRAGQLHPATAIERQTLPREEGGRGQADLKDLHDKQIQSMRQYFQLKSPRSPLIQAIIQADANYTPLNLCSTEERVLETANEQKLRTWAGKPLHGRHYNDLQQPHVDKKASNSWLAKGTLQPETEGFMLAIQDQVIATRNNQKFIQRKDIESDKCRHCHAASETIQHVMAGCKILAQSDYKHRHDQVAKIVHQKLAANAGFLTEKCPYYKYEPETVHENETHKLYWDRAIITDKTVPHNRPDITLVDKSNKTTYLIDIAVPNTNNIQTTYTTKITKYQDLRHEVRDIWGMEKILIIPLVISATGIVPKTLATNLEILNIDPNTYIEIQKATILNTCHIVRKFLDMAH

SEQ ID NO: 22338 - protein, 1031 aa, Dysdera silvatica
MITSSIKSVQYTLCFYCASSAREPLQPSIEERRDVEKMEEGFQCALAEYEGSDAATRPRIPRQPASWKLCKATKILNEHTLPLHLQNHNSLQEIHTAIYCAAVAASRANGYEVRNEGRSNRGNKAQPPWQVRLQKRIEELRSSIGRITQYMQGNRSKKLVRKVKMALKRNRIHTRHEEPNKHISEYLDTLKQKLGVYARRLRRYKDYTNRKQQNMQFQANQKAFYRKLRETPANKDKYEAPKPAEIETFWKTLWSNEVQHKSAPWIQQEMEATRGIEEMEYTGITIEELQQVIQRTHNWKAPGIDGIHNFWYKKFTSAHGPLAKELTAIIEDPSKMPEFLCKGITYLLPKDQDTSNPAKYRPITCLNTLYKILTGCISEKISRHSESNNLMTEEQKGCQKGTLGCKEQLTIDSVILEQARKQKRKLNTAYIDYKKAFDSVPHSWLLEILSIYKVHPSIIRFLQSSMKQWRTRLQLNTPDSKIETAEIPIRRGIFQGDALSPQWFCLALNPLSRMLNTSKYGYMLKKDKRNLHKVSHLMYVDDIKLYAPTITQLRQLISITETFSKDIGMEFGLDKCKIQKNSKEDLPGIELEDGRLLKTLDEGETYKYLGIMQKRQQEHKKVKVQLTQAFQERLRSIVKTKLSGKNTTQAINAYAVPVLTYSFGIIKWSNTELEQLQRKMRTIQRRAGQLHPATAIERQTLPREEGGRGQADLKDLHDKQIQSMRQYFQLKSPRSPLIQAIIQADANYTPLNLCSTEERVLETANEQKLRTWAGKPLHGRHYNDLQQPHVDKKASNSWLAKGTLQPETEGFMLAIQDQVIATRNNQKFIQRKDIESDKCRHCHAASETIQHVMAGCKILAQSDYKHRHDQVAKIVHQKLAANAGFLTEKCPYYKYEPETVHENETHKLYWDRAIITDKTVPHNRPDITLVDKSNKTTYLIDIAVPNTNNIQTTYTTKITKYQDLRHEVRDIWGMEKILIIPLVISATGIVPKTLATNLEILNIDPNTYIEIQKATILNTCHIVRKFLDMAH

SEQ ID NO: 22339 - protein, 903 aa, Dysdera silvatica
MFYIYIYRIEELRSSIGRITQYMQGNRSKKLVRKVKMALKRNRIHTRHEEPNKHISEYLDTLKQKLGVYARRLRRYKDYTNKKQQNMQFQANQKAFYRKLRETPANKDKYEAPKPAEIETFWKTLWSNEVQHKSAPWIQQEMEATRGIEEMEYTGITIEELQQVIQRTHNWKAPGIDGIHNFWYKKFTSAHGPLAKELTAIIEDPSKMPEFLCKGITYLLPKDQDTSNPAKYRPITCLNTLYKILTGCISEKISRHSESNNLMTEEQKGCQKGTLGCKEQLTIDSVILEQARKQKRKLNTAYIDYKKAFDSVPHSWLLEILSIYKVHPSIIRFLQSSMKQWRTRLQLNTPDSKIETAEIPIRRGIFQGDALSPQWFCLALNPLSRMLNASKYGYMLKKDKRNLHKVSHLMYVDDIKLYAPTITQLRQLISITETFSKDIGMEFGLDKCKIQKNSKEDLPGIELEDGRLLKTLDEGETYKYLGIMQKRQQEHKKVKVQLTQAFQERLRSIVKTKLSGKNTTQAINAYAVPVLTYSFGIIKWSNTELEQLQRKMRTIQRRAGQLHPATAIERQTLPREEGGRGQADLKDLHDKQIQSMRQYFQLKSPRSPLIQAIIQADANYTPLNLCSTEERVLETANEQKLRTWAGKPLHGRHYNDLQQPHVDKKASNSWLAKGTLQPETEGFMLAIQDQVIATRNNQKFIQRKDIESDKCRHCHAASETIQHVMAGCKILAQSDYKHRHDQVAKIVHQKLAANAGFLTEKCPYYKYEPETVHENETHKLYWDRAIITDKTVPHNRPDITLVDKSNKTTYLIDIAVPNTNNIQTTYTTKITKYQDLRHEVRDIWGMEKILIIPLVISATGIVPKTLATNLEILNIDPNTYIEIQKATILNTCHIVRKFLDMAH

SEQ ID NO: 22340 - protein, 926 aa, Dysdera silvatica
MVEEKNIYIYEGRSNRGNKAQPPWQVRLEKRIEELRSSIGRITQYMQGNRGKKLVRKVKMALKRNRIHTRHEEPNKHISEYLDTLKQKLGVYARRLRRYKDYTNKKQQNMQFQANQKAFYRKLRETPANKDKYEAPKPAEIETFWKTLWSNEVQHKSAPWIQQEMEATRGIEEMEYTGITIEELQQVIQRTHNWKAPGIDGIHNFWYKKFTSAHGPLAKELTAIIEDPSKMPEFLCKGITYLLPKDQDTSNPAKYRPITCLNTLYKILTGCISEKISRHSESNNLMTEEQKGCQKGTLGCKEQLTIDSVILEQARKQKRKLNTAYIDYKKAFDSVPHSWLLEILSIYKVHPSIIRFLQSSMKQWRTRLQLNTPDSKIETAEIPIRRGIFQGDALSPQWFCLALNPLSRMLNTSKYGYMLKKDKRNLHKVSHLMYVDDIKLYAPTITQLRQLISITETFSKDIGMEFGLDKCKIQKNSKEDLPGIELEDGRLLKTLDEGETYKYLGIMQKRQQEHKKVKVQLTQAFQERLRSIVKTKLSGKNTTQAINAYAVPVLTYSFGIIKWSNTELEQLQRKMRTIQRRAGQLHPATAIERQTLPREEGGRGQADLKDLHDKQIQSMRQYFQLKSPRSPLIQAIIQADANYTPLNLCSTEERVLETANEQKLRTWAGKPLHGRHYNDLQQPHVDKKASNSWLAKGTLQPETEGFMLAIQDQVIATRNNQKFIQRKDIESDKCRHCHAASETIQHVMAGCKILAQSDYKHRHDQVAKIVHQKLAANAGFLTEKCPYYKYEPETVHENETHKLYWDRAIITDKTVPHNRPDITLVDKSNKTTYLIDIAVPNTNNIQTTYTTKITKYQDLRHEVRDIWGMEKILIIPLVISATGIVPKTLATNLEILNIDPNTYIEIQKATILNTCHIVRKFLDMAH

SEQ ID NO: 22341 - protein, 1223 aa, Dysdera silvatica
MKNLICSQLTPQQHLVCLWSTTRYPGNVKKAISDSDDMNHNENMNGASVVSLLNQNRVRVLSRGASSKNMQQSLLGGVGGCSGASNCTATRTNTAQSALQPSIGATTRAERPRQRMSWTIDMNTYIMRTYYTITKLETDMTNYRPTLHAKFAQQYPHLDISIERITTQRRNIITRNLLAEPILQRLRDEVANDLVNTSTSVANPEAPVSSPREPLQTSIEQEERRDVEKMEEGFQCALAEYEGSDAATRPRIPRQPASWKLCKATKILNEHTLPLHLQNHNSLQEIHTAIYCAAVAASRANGYEVRNEGRSNRGNKAQPPWQVRLQKRIEELRSSIGRITQYMQGNRGKKLVRKVKMALKRNRIHTRHEEPNKHISEYLDTLKQKLGVYARRLRRYKDYTNKKQQNMQFQANQKAFYRKLRETPANKDKYEAPKPAEIETFWKTLWSNEVQHKSAPWIQQEMEATRGIEEMEYTGITIEELQQVIQRTHNWKAPGIDGIHNFWYKKFTSAHGPLAKELTAIIEDPSKMPEFLCKGITYLLPKDQDTSNPAKYRPITCLNTLYKILTGCISEKISRHSESNNLMTEEQKGCQKGTLGCKEQLTIDSVILEQARKQKRKLNTAYIDYKKAFDSVPHSWLLEILSIYKVHPSIIRFLQSSMKQWRTRLQLNTPDSKIETAEIPIRRGIFQGDALSPQWFCLALNPLSRMLNTSKYGYMLKKDKRNLHKVSHLMYVDDIKLYAPTITQLRQLISITETFSKDIGMEFGLDKCKIQKNSKEDLPGIELEDGRLLKTLDEGETYKYLGIMQKRQQEHKKVKVQLTQAFQERLRSIVKTKLSGKNTTQAINAYAVPVLTYSFGIIKWSNTELEQLQRKMRTIQRRAGQLHPATAIERQTLPREEGGRGQADLKDLHDKQIQSMRQYFQLKSPRSPLIQAIIQADANYTPLNLCSTEERVLETANEQKLRTWAGKPLHGRHYNDLQQPHVDKKASNSWLAKGTLQPETEGFMLAIQDQVIATRNNQKFIQRKDIESDKCRHCHAASETIQHVMAGCKILAQSDYKHRHDQVAKIVHQKLAANAGFLTEKCPYYKYEPETVHENETHKLYWDRAIITDKTVPHNRPDITLVDKSNKTTYLIDIAVPNTNNIQTTYTTKITKYQDLRHEVRDIWGMEKIFIIPLVISATGIVPKTLATNLEILNIDPNTYIEIQKATILNTCHIVRKFLDMAH

SEQ ID NO: 22342 - protein, 1186 aa, Dysdera silvatica
MNHNENMNGASVVSLLNQNRVRVLSRGASSKNMQQSLLGGVGGCSGASNCTATRTNTAQSALQPSIGATTRAERPRQRMSWTIDMNTYIMRTYYTITKLETDMTNYRPTLHAKFAQQYPHLDISIERITTQRRNIITRNLLAEPILQRLRDEVANDLANTSTSVANPEAPASSAREPLQPSIEEEERRDVEKMEEGFQCALAEYEGSDAATRPRIPRQPASWKLCKATKILNEHTLPLHLQNHNSLQEIHTAIYCAAVAASRVNGYEVRNEGRSNRGNKAQPPWQVRLEKRIEELRSSIGRITQYMQGNRSKKLVRKVKMALKRNRIHTRHEEPNKHISEYLDTLKQKLGVYARRLRRYKDYTNRKQQNMQFQANQKAFYRKLRETPANKDKYEAPKPAEIETFWKTLWSNEVQHKSAPWIQQEMEATRGIEEMEYTGITIEELQQVIQRTHNWKAPGIDGIHNFWYKKFTSAHGPLAKELTAIIEDPSKMPEFLCKGITYLLPKDQDTSNPAKYRPITCLNTLYKILTGCISEKISRHSESNNLMTEEQKGCQKGTLGCKEQLTIDSVILEQARKQKRKLNTAYIDYKKAFDSVPHSWLLEILSIYKVHPSIIRFLQSSMKQWRTRLQLNTPDSKIETAEIPIRRGIFQGDALSPQWFCLALNPLSRMLNTSKYGYMLKKDKRNLHKVSHLMYVDDIKLYAPTITQLRQLISITETFSKDIGMEFGLDKCKIQKNSKEDLPGIELEDGRLLKTLDEGETYKYLGIMQKRQQEHKKVKVQLTQAFQERLRSIVKTKLSGKNTTQAINAYAVPVLTYSFGIIKWSNTELEQLQRKMRTIQRRAGQLHPATAIERQTLPREEGGRGQADLKDLHDKQIQSMRQYFQLKSPRSPLIQAIIQADANYTPLNLCSTEERVLETANEQKLRTWAGKPLHGRHYNDLQQPHVDKKASNSWLAKGTLQPETEGFMLAIQDQVIATRNNQKFIQRKDIESDKCRHCHAASETIQHVMAGCKILAQSDYKHRHDQVAKIVHQKLAANAGFLTEKCPYYKYEPETVHENETHKLYWDRAIITDKTVPHNRPDITLVDKSNKTTYLIDIAVPNTNNIQTTYTTKITKYQDLRHEVRDIWGMEKILIIPLVISATGIVPKTLATNLEILNIDPNTYIEIQKATILNTCHIVRKFLDMAH

SEQ ID NO: 22343 - protein, 1109 aa, Dysdera silvatica
MDNRYEHLHHAHLLYDYTITKLETDMTNYRPTPHAKFAQQYPHLDINIERITTQPRNIITRNLLAEPILQRLRDEIANDLANTSTNVANPEAPAVSAREPFQPSIEEEERRDVEKMEEGFQCALAEYEGPDAATRPRIPRQPASWKLCKATKILNEHTLPLHLQNHNSLQEIHTAIYCAAVAASRANGYEVRNEGRNNRGNKAQPPWQVRLQKRIEELRRSIGRITQYMQGNRSRKLVRKVKMALKRNRMHTRHEEPNKHIAEYLDTLKQKLGVYARRLRRYKDCTNKKQQNMQFQANQKAFYRKLQETPANKDKYEAPKPAVIETFWKTLWSNEVQHKSAPWIQQEMEATRGIEEMEYTGITIEELQQVIQRTHNWKAPGTDGIHNFWYKKFTSIHGPLAKELTAIIEDPSEMPEFLCKGITYLLPKDQDKSNPAKYRPITCLNTLYKILTGCISEKISRHSESNNLMTEEQKGCQKGTLGCKEQLTIDSVILEQARKQKRKLNTAYIDYKKAFDSVPHSWLLEILSIYKVHPSIIRFLQSSMKQWRTRLQLNTPDSKIETAEIPIRRGIFQGDALSPQWFCLALNPLSRMLNTSKYGYMLKKDKRNLHKVSHLMYVDDIKLYAPTITQLRQLISITETFSKDIGMEFGLDKCKIQKNSKEDLPGIEFEDGRLLKILDEGETYKYLGIMQKRQQEHKKVKVQLTQAFQERLRSIVKTKLSGKNTTQAINAYAVPVLTYSFGIIKWTNTELEQLQRKMRTIQRRAGQLQPATAIERQTLPREEGGRGQADLKDLHDKQIQSMRQYFQLKSPRSPLIQAIIQADANYTPLNLCNTEERVLETANEQKLRTWAGKPLHGRHYNDLQQPHVDKKASNSWLAKGTLQPETEGFMLAIQDQVIATRNNQKFIQRKDIESDKCRHCHAASETIQHVMAGCKILAQSDYKHRHDQVAKIVHQKLAANAGFLTEKCPYYKYEPETVHENETHKLYWDRAIITDKTVPHNRPDITLVDKSNKTTYLIDIAVPNTNNIQTTYITKITKYQDLRHEVRDIWGMEKILIIPLVISATGIVPKTLATNLEILNIDPNTYIEIQKATILNTCHIVRKFLDMAH

SEQ ID NO: 22344 - protein, 871 aa, Dysdera silvatica
MCVKMALKRNRIHTRHEEPNKHISEYLDTLKQKLGVYARRLRRYKDYTNKKQQNMQFQANQKAFYRKLRETPANKDKYEAPKPAEIETFWKTLWSNEVQHKSAPWIQQEMEATRGIEEMEYTGITIEELQQVIQRTHNWKAPGIDGIHNFWYKKFTSAHGPLAKELTAIIEDPSKMPEFLCKGITYLLPKDQDTSNPAKYRPITCLNTLYKILTGCISEKISRHSESNNLMTEEQKGCQKGTLGCKEQLTIDSVILEQARKQKRKLNTAYIDYKKAFDSVPHSWLLEILSIYKVHPSIIRFLQSSMKQWRTRLQLNTPDSKIETAEIPIRRGIFQGDALSPQWFCLALNPLSRMLNTSKYGYMLKKDKRNLHKVSHLMYVDDIKLYAPTITQLRQLISITETFSKDIGMEFGLDKCKIQKNSKEDLPGIELEDGRLLKTLDEGETYKYLGIMQKRQQEHKKVKVQLTQAFQERLRSIVKTKLSGKNTTQAINAYAVPVLTYSFGIIKWSNTELEQLQRKMRTIQRRAGQLHPATAIERQTLPREEGGRGQADLKDLHDKQIQSMRQYFQLKSPRSPLIQAIIQADANYTPLNLCSTEERVLETANEQKLRTWAGKPLHGRHYNDLQQPHVDKKASNSWLAKGTLQPETEGFMLAIQDQVIATRNNQKFIQRKDIESDKCRHCHAASETIQHVMAGCKILAQSDYKHRHDQVAKIVHQKLAANAGFLTEKCPYYKYEPETVHENETHKLYWDRAIITDKTVPHNRPDITLVDKSNKTTYLIDIAVPNTNNIQTTYTTKITKYQDLRHEVRDIWGMEKILIIPLVISATGIVPKTLATNLEILNIDPNTYIEIQKATILNTCHIVRKFLDMAH

SEQ ID NO: 22345 - protein, 1186 aa, Dysdera silvatica
MNHNENMNGASVVSLLNQNRVRTLSRGASSKNMQQSLLGGVGGCSGASNCTATRTNTAQSALQPSIGATTRAERPRQRMSWTIDMNTYIMRTYYTITKLETDMTNYRPTLHAKFAQQYPHLDISIERITTQRRNIITRNLLAEPILQRLRDEVANDLANTSTSVANPEAPAIGAREPLQPSIEEEERRDVEKMEEGFQCALAEYEGSDAATRPRIPRQPASWKLCKATKILNEHTLPLHLQNHNSLQEIHTAIYCAAVAASRANGYEVRNEGRSNRGNKAQPPWQVRLQKRIEELRSSIGRITQYMQGNRGKKLVRKVKMALKRNRIHTRHEEPNKHISEYLDTLKQKLGVYARRLRRYKDYTNKKQQNMQFQANQKAFYRKLRETPANKDKYEAPKPAEIETFWKTLWSNEVQHKSAPWIQQEMEATRGIEEMEYTGITIEELQQVIQRTHNWKAPGIDGIHNFWYKKFTSAHGPLAKELTAIIEDPSKMPEFLCKGITYLLPKDQDTSNPAKYRPITCLNTLYKILTGCISEKISRHSESNNLMTEEQKGCQKGTLGCKEQLTIDSVILEQARKQKRKLNTAYIDYKKAFDSVPHSWLLEILSIYKVHPSIIRFLQSSMKQWRTRLQLNTPDSKIETAEIPIRRGIFQGDALSPQWFCLALNPLSRMLNTSKYGYMLKKDKRNLHKVSHLMYVDDIKLYAPTITQLRQLISITETFSKDIGMEFGLDKCKIQKNSKEDLPGIELEDGRLLKTLDEGETYKYLGIMQKRQQEHKKVKVQLTQAFQERLRSIVKTKLSGKNTTQAINAYAVPVLTYSFGIIKWSNTELEQLQRKMRTIQRRAGQLHPATAIERQTLPREEGGRGQADLKDLHDKQIQSMRQYFQLKSPRSPLIQAIIQADANYTPLNLCSTEERVLETANEQKLRTWAGKPLHGRHYNDLQQPHVDKKASNSWLAKGTLQPETEGFMLAIQDQVIATRNNQKFIQRKDIESDKCRHCHAASETIQHVMAGCKILAQSDYKHRHDQVAKIVHQKLAANAGFLTEKCPYYKYEPETVHENETHKLYWDRAIITDKTVPHNRPDITLVDKSNKTTYLIDIAVPNTNNIQTTYTTKITKYQDLRHEVRDIWGMEKIFIIPLVISATGIVPKTLATNLEILNIDPNTYIEIQKATILNTCHIVRKFLDMAH

SEQ ID NO: 22346 - protein, 1192 aa, Dysdera silvatica
MMMMMMIYIYQNMNGASVVALLNQNRVRALSRGASSKNMQQSLLGGVGGCSGASNCTATRTNTAQSALQPSIGATTRAERPRQRMSWTIDMNTYIMRTYYTITKLETDMTNYRPTLHAKFAQQYPHLDISIERITTQRRNIITRNLLAEPILQRLRDEVANDLANTSTSVANPEAPASSAREPLQPSIEEEERRDVEKMEEGFQCALAEYEGSDAATRPRIPRQPASWKLCKATKILNEHTLPLHLQNHNSLQEIHTAIYCAAVAASRANGYEVRNEGRSNRGNKAQPPWQVRLEKRIEELRSSIGRITQYMQGNRSKKLVRKVKMALKRNRIHTRHEEPNKHISEYLDTLKQKLGVYARRLRRYKDYTNRKQQNMQFQANQKAFYRKLRETPANKDKYEAPKPAEIETFWKTLWSNEVQHKSAPWIQQEMEATRGIEEMEYTGITIEELQQVIQRTHNWKAPGIDGIHNFWYKKFTSAHGPLAKELTAIIEDPSKMPEFLCKGITYLLPKDQDTSNPAKYRPITCLNTLYKILTGCISEKISRHSESNNLMTEEQKGCQKGTLGCKEQLTIDSVILEQARKQKRKLNTAYIDYKKAFDSVPHSWLLEILSIYKVHPSIIRFLQSSMKQWRTRLQLNTPDSKIETAEIPIRRGIFQGDALSPQWFCLALNPLSRMLNTSKYGYMLKKDKRNLHKVSHLMYVDDIKLYAPTITQLRQLISITETFSKDIGMEFGLDKCKIQKNSKEDLPGIELEDGRLLKTLDEGETYKYLGIMQKRQQEHKKVKVQLTQAFQERLRSIVKTKLSGKNTTQAINAYAVPVLTYSFGIIKWSNTELEQLQRKMRTIQRRAGQLHPATAIERQTLPREEGGRGQADLKDLHDKQIQSMRQYFQLKSPRSPLIQAIIQADANYTPLNLCSTEERVLETANEQKLRTWAGKPLHGRHYNDLQQPHVDKKASNSWLAKGTLQPETEGFMLAIQDQVIATRNNQKFIQRKDIESDKCRHCHAASETIQHVMAGCKILAQSDYKHRHDQVAKIVHQKLAANAGFLTEKCPYYKYEPETVHENETHKLYWDRAIITDKTVPHNRPDITLVDKSNKTTYLIDIAVPNTNNIQTTYTTKITKYQDLRHEVRDIWGMEKILIIPLVISATGIVPKTLATNLEILNIDPNTYIEIQKATILNTCHIVRKFLDMAH

SEQ ID NO: 22347 - protein, 876 aa, Dysdera silvatica
MQGNRGKKLVRKVKMALKRNRIHTRHEEPNKHISEYLDTLKQKLGVYARRLRRYKDYTNKKQQNMQFQANQKAFYRKLRETPANKDKYEAPKPAEIETFWKTLWSNEVQHKSAPWIQQEMEATRGIEEMEYTGITIEELQQVIQRTHNWKAPGIDGIHNFWYKKFTSAHGPLAKELTAIIEDPSKMPEFLCKGITYLLPKDQDTSNPAKYRPITCLNTLYKILTGCISEKISRHSESNNLMAEEQKGCQKGTLGCKEQLTIDSVILEQARKQKRKLNTAYIDYKKAFDSVPHSWLLEILSIYKVHPSIIRFLQSSMKQWRTRLQLNTPDSKIETAEIPIRRGIFQGDALSPQWFCLALNPLSRMLNTSKYGYMLKKDKRNLHKVSHLMYVDDIKLYAPTITQLRQLISITETFSKDIGMEFGLDKCKIQKNSKEDLPGIELEDGRLLKTLDEGETYKYLGIMQKRQQEHKKVKVQLTQAFQERLRSIVKTKLSGKNTTQAINAYAVPVLTYSFGIIKWSNTELEQLQRKMRTIQRRAGQLHPATAIERQTLPREEGGRGQADLKDLHDKQIQSMRQYFQLKSPRSPLIQAIIQADANYTPLNLCSTEERVLETANEQKLRTWAGKPLHGRHYNDLQQPHVDKKASNSWLAKGTLQPETEGFMLAIQDQVIATRNNQKFIQRKDIESDKCRHCHAASETIQHVMAGCKILAQSDYKHRHDQVAKIVHQKLAANAGFLTEKCPYYKYEPETVHENETHKLYWDRAIITDKTVPHNRPDITLVDKSNKTTYLIDIAVPNTNNIQTTYTTKITKYQDLRHEVRDIWGMEKILISATGIVPKTLATNLEILNIDPNTYIEIQKATILNTCHIVRKFLDMAH

SEQ ID NO: 22348 - protein, 1186 aa, Dysdera silvatica
MNHNENMNGASVVTLLNQNRVRALSRGARSKNMQQSLLGGVGGCSGASNCTATRTNTAQSALQPSIGATTRAERPRQRMSWTIDMNTYIMRTYYTITKLETDMTNYRPTLHAKFAQQYPHLDISIERITTQRRNIITRNLLAEPILQRLRDEVANDLANTSTSVANPETPAIGAREPLQTSIEEEERRDVEKMEEGFQCALAEYEGSDAATRPRIPRQPASWKLCAATKILNEHTLPLHLQNHNSLHEIHTAIYCAAIAASRANGYEVRNEGRNNRGNKAQPPWQVRLEKRIKELRSSIGRITQYMQGNRGKKLVRKVKMALKRNRIHTRHEEPNKHISEYLDTLKQKLGVYARRLRRYKDCTNKKQQNMQFQANQKAFYRKLRETPANKDKYEAPKPAEIETFWKTLWSNEVQHKSAPWIQQEMEATRGIEEMEYTGITIEELQQVIQRTHNWKAPGIDGIHNFWYKKFTSAHGPLAKELTAIIEDPSKMPEFLCKGITYLLPKDQDTSNPAKYRPITCLNTLYKILTGCISEKISRHSESNNLMAEEQKGCQKGTLGCKEQLTIDSVILEQARKQKRKLNTAYIDYKKAFDSVPHSWLLEILSIYKVHPSIIRFLQSSMKQWRTRLQLNTPDSKIETAEIPIRRGIFQGDALSPQWFCLALNPLSRMLNTSKYGYMLKKDKRNLHKVSHLMYVDDIKLYAPTITQLRQLISITETFSKDIGMEFGLDKCKIQKNSKEDLPGIELEDGRLLKTLDEGETYKYLGIMQKRQQEHKKVKVQLTQAFQERLRSIVKTKLSGKNTTQAINAYAVPVLTYSFGIIKWSNTELEQLQRKMRTIQRRAGQLHPATAIERQTLPREEGGRGQADLKDLHDKQIQSMRQYFQLKSPRSPLIQAIIQADANYTPLNLCSTEERVLETANEQKLRTWAGKPLHGRHYNDLQQPHVDKKASNSWLAKGTLQPETEGFMLAIQDQVIATRNNQKFIQRKDIESDKCRHCHAASETIQHVMAGCKILAQSDYKHRHDQVAKIVHQKLAANAGFLTEKCPYYKYEPETVHENETHKLYWDRAIITDKTVPHNRPDITLVDKSNKTTYLIDIAVPNTNNIQTTYTTKITKYQDLRHEVRDIWGMEKIFIIPLVISATGIVPKTLATNLEILNIDPNTYIEIQKATILNTCHIVRKFLDMAH

SEQ ID NO: 22349 - protein, 1138 aa, Dysdera silvatica
MLYIYIYIYIYIYIYIYIYIYIWAERPRQRMSWTIDMNTYIMRTYYTITKLETDMTNYRPTLHAKFAQQYPHLDISIERITTQRRNIITRNLLAEPILQRLRDEVANDLANTSTSVANPEAPAIGAREPLQTSIEQEERRDVEKMEEGFQCALAEYEGSDAATRPRIPRQPASWKLCKATKILNEHTLPLHLQNHNSLQEIHTAIYCAAVAASRANGYEVRNEGRSNRGNKAQPPWQVRLQKRIEELRSSIGRITQYMQGNRGKKLVRKVKMALKRNRIHTRHEEPNKHISEYLDTLKQKLGVYARRLRRYKDYTNKKQQNMQFQANQKAFYRKLRETPANKDKYEAPKPAEIETFWKTLWSNEVQHKSAPWIQQEMEATRGIEEMEYTGITIEELQQVIQRTHNWKAPGIDGIHNFWYKKFTSAHGPLAKELTAIIEDPSKMPEFLCKGITYLLPKDQDTSNPAKYRPITCLNTLYKILTGCISEKISRHSESNNLMTEEQKGCQKGTLGCKEQLTIDSVILEQARKQKRKLNTAYIDYKKAFDSVPHSWLLEILSIYKVHPSIIRFLQSSMKQWRTRLQLNTPDSKIETAEIPIRRGIFQGDALSPQWFCLALNPLSRMLNTSKYGYMLKKDKRNLHKVSHLMYVDDIKLYAPTITQLRQLISITETFSKDIGMEFGLDKCKIQKNSKEDLPGIELEDGRLLKTLDEGETYKYLGIMQKRQQEHKKVKVQLTQAFQERLRSIVKTKLSGKNTTQAINAYAVPVLTYSFGIIKWSNTELEQLQRKMRTIQRRAGQLHPATAIERQTLPREEGGRGQADLKDLHDKQIQSMRQYFQLKSPRSPLIQAIIQADANYTPLNLCSTEERVLETANEQKLRTWAGKPLHGRHYNDLQQPHVDKKASNSWLAKGTLQPETEGFMLAIQDQVIATRNNQKFIQRKDIESDKCRHCHAASETIQHVMAGCKILAQSDYKHRHDQVAKIVHQKLAANAGFLTEKCPYYKYEPETVHENETHKLYWDRAIITDKTVPHNRPDITLVDKSNKTTYLIDIAVPNTNNIQTTYTTKITKYQDLRHEVRDIWGMEKILIIPLVISATGIVPKTLATNLEILNIDPNTYIEIQKATILNTCHIVRKFLDMAH

SEQ ID NO: 22350 - protein, 957 aa, Dysdera silvatica
MLNEHTLPLHLQKHNFLREIHTAIYCATVAASRANGYEVRNEGRSNRGNKAQPPWQVRLQKRIEELRSSIGRITQYMQGNRSKKLVRKVKMALKRNRIHTRHEEPNKHISEYLDTLKQKLGVYARRLRRYKDYTNRKQQNMQFQANQKAFYRKLRETPANKDKYEAPKPAEIETFWKTLWSNEVQHKSAPWIQQEMEATRGIEEMEYTGITIEELQQVIQRTHNWKAPGIDGIHNFWYKKFTSAHGPLAKELTAIIEDPSKMPEFLCKGITYLLPKDQDTSNPAKYRPITCLNTLYKILTGCISEKISRHSESNNLMTEEQKGCQKGTLGCKEQLTIDSVILEQARKQKRKLNTAYIDYKKAFDSVPHSWLLEILSIYKVHPSIIRFLQSSMKQWRTRLQLNTPDSKIETAEIPIRRGIFQGDALSPQWFCLALNPLSRMLNTSKYGYMLKKDKRNLHKVSHLMYVDDIKLYAPTITQLRQLISITETFSKDIGMEFGLDKCKIQKNSKEDLPGIELEDGRLLKTLDEGETYKYLGIMQKRQQEHKKVKVQLTQAFQERLRSIVKTKLSGKNTTQAINAYAVPVLTYSFGIIKWSNTELEQLQRKMRTIQRRAGQLHPATAIERQTLPREEGGRGQADLKDLHDKQIQSMRQYFQLKSPRSPLIQAIIQADANYTPLNLCSTEERVLETANEQKLRTWAGKPLHGRHYNDLQQPHVDKKASNSWLAKGTLQPETEGFMLAIQDQVIATRNNQKFIQRKDIESDKCRHCHAASETIQHVMAGCKILAQSDYKHRHDQVAKIVHQKLAANAGFLTEKCPYYKYEPEIVLENETHKLYWDRAIITDKTVPHNPPDIALVDKSGKTTYLIDIAVSNTNNIQTTCTTKITNYQDLRHELRDIWSMEKIFVIPLVISATGIVPKTLATNLEILNIDPNTYIEIQKATILNTCHIVRKFLDMAH

SEQ ID NO: 22351 - protein, 994 aa, Dysdera silvatica
MEEGFQCALAEYEGSDAATRPRIPRQPASWKLCKATKILNEHTLPLHLQKHNSLHEIHTAIYCAAIAASRANGYEVRNEGRNNRGNKAQPPWQVRLEKRIKELRSSIGRITQYMQGNRGKKLVRKVKMALKRNRIHTRHEEPNKHISEYLDTLKQKLGVYARRLRRYKDCTNKKQQNMQFQANQKAFYRKLRETPANKDKYEAPKPAEIETFWKTLWSNEVQHKSAPWIQQEMEATRGIEEMEYTGITIEELQQVIQRTHNWKAPGIDGIHNFWYKKFTSAHGPLAKELTAIIEDPSKMPEFLCKGITYLLPKDQDTSNPAKYRPITCLNTLYKILTGCISEKISRHSESNNLMTEEQKGCQKGTLGCKEQLTIDSVILEQARKQKRKLNTAYIDYKKAFDSVPHSWLLEILSIYKVHPSIIRFLQSSMKQWRTRLQLNTPDSKIETAEIPIRRGIFQGDALSPQWFCLALNPLSRMLNTSKYGYMLKKDKRNLHKVSHLMYVDDIKLYAPTITQLRQLISITETFSKDIGMEFGLDKCKIQKNSKEDLPGIELEDGRLLKTLDEGETYKYLGIMQKRQQEHKKVKVQLTQAFQERLRSIVKTKLSGKNTTQAINAYAVPVLTYSFGIIKWSNTELEQLQRKMRTIQRRAGQLHPATAIERQTLPREEGGRGQADLKDLHDKQIQSMRQYFQLKSPRSPLIQAIIQADANYTPLNLCSTEERVLETANEQKLRTWAGKPLHGRHYNDLQQPHVDKKASNSWLAKGTLQPETEGFMLAIQDQVIATRNNQKFIQRKDIESDKCRHCHAASETIQHVMAGCKILAQSDYKHRHDQVAKIVHQKLAANAGFLTEKCPYYKYEPETVHENETHKLYWDRAIITDKTVPHNRPDITLVDKSNKTTYLIDIAVPNTNNIQTTYTTKITKYQDLRHEVRDIWGMEKILIIPLVISATGIVPKTLATNLEILNIDPNTYIEIQKATILNTCHIVRKFLDMAH

SEQ ID NO: 22352 - protein, 1050 aa, Dysdera silvatica
MVFLLWEPTHTHTHTHTYIYIANTSTSVANPEAPAIGAREPLQTSIEEEERRDVEKMEEGFQCALAEYEGSDAATRPRIPRQPASWKLCKATKILNEHTLPLHLQNHNSLQEIHTAIYCAAVAASRANGYEVRNEGRSNRGNKAQPPWQVRLQKRIEELRSSIGRITQYMQGNRSKKLVRKVKMALKRNRIHTRHEEPNKHISEYLDTLKQKLGVYARRLRRYKDYTNRKQQNMQFQANQKAFYRKLRETPANKDKYEAPKPAEIETFWKTLWSNEVQHKSAPWIQQEMEATRGIEEMEYTGITIEELQQVIQRTHNWKAPGIDGIHNFWYKKFTSAHGPLAKELTAIIEDPSKMPEFLCKGITYLLPKDQDTSNPAKYRPITCLNTLYKILTGCISEKISRHSESNNLMTEEQKGCQKGTLGCKEQLTIDSVILEQARKQKRKLNTAYIDYKKAFDSVPHSWLLEILSIYKVHPSIIRFLQSSMKQWRTRLQLNTPDSKIETAEIPIRRGIFQGDALSPQWFCLALNPLSRMLNTSKYGYMLKKDKRNLHKVSHLMYVDDIKLYAPTITQLRQLISITETFSKDIGMEFGLDKCKIQKNSKEDLPGIELEDGRLLKTLDEGETYKYLGIMQKRQQEHKKVKVQLTQAFQERLRSIVKTKLSGKNTTQAINAYAVPVLTYSFGIIKWSNTELEQLQRKMRTIQRRAGQLHPATAIERQTLPREEGGRGQADLKDLHDKQIQSMRQYFQLKSPRSPLIQAIIQADANYTPLNLCSTEERVLETANEQKLRTWAGKPLHGRHYNDLQQPHVDKKASNSWLAKGTLQPETEGFMLAIQDQVIATRNNQKFIQRKDIESDKCRHCHAASETIQHVMAGCKILAQSDYKHRHDQVAKIVHQKLAANAGFLTEKCPYYKYEPETVHENETHKLYWDRAIITDKTVPHNRPDITLVDKSNKTTYLIDIAVPNTNNIQTTYTTKITKYQDLRHEVRDIWGMEKILIIPLVISATGIVPKTLATNLEILNIDPNTYIEIQKATILNTCHIVRKFLDMAH

SEQ ID NO: 22353 - protein, 994 aa, Dysdera silvatica
MEEGFQCALAEYEGSDAATRPRIPRQPASWKLCKATKILNEHTLPLHLQNHNSLQEIHTAIYCATVAASRANGYEVRNEGRSNRGNKAQPPWQVRLEKRIEELRSSIGRITQYMQGNRGKKLVRKVKMALKRNRIHTRHEEPNKHISEYLDTLKQKLGVYARRLRRYKDYTNKKQQNMQFQANQKAFYRKLRETPANKDKYEAPKPAEIETFWKTLWSNEVQHKSAPWIQQEMEATRGIEEMEYTGITIEELQQVIQRTHNWKAPGIDGIHNFWYKKFTSAHGPLAKELTAIIEDPSKMPEFLCKGITYLLPKDQDTSNPAKYRPITCLNTLYKILTGCISEKISRHSESNNLMTEEQKGCQKGTLGCKEQLTIDSVILEQARKQKRKLNTAYIDYKKAFDSVPHSWLLEILSIYKVHPSIIRFLQSSMKQWRTRLQLNTPDSKIETAEIPIRRGIFQGDALSPQWFCLALNPLSRMLNTSKYGYMLKKDKRNLHKVSHLMYVDDIKLYAPTITQLRQLISITETFSKDIGMEFGLDKCKIQKNSKEDLPGIELEDGRLLKTLDEGETYKYLGIMQKRQQEHKKVKVQLTQAFQERLRSIVKTKLSGKNTTQAINAYAVPVLTYSFGIIKWSNTELEQLQRKMRTIQRRAGQLHPATAIERQTLPREEGGRGQADLKDLHDKQIQSMRQYFQLKSPRSPLIQAIIQADANYTPLNLCSTEERVLETANEQKLRTWAGKPLHGRHYNDLQQPHVDKKASNSWLAKGTLQPETEGFMLAIQDQVIATRNNQKFIQRKDIESDKCRHCHAASETIQHVMAGCKILAQSDYKHRHDQVAKIVHQKLAANAGFLTEKCPYYKYEPETVHENETHKLYWDRAIITDKTVPHNRPDITLVDKSNKTTYLIDIAVPNTNNIQTTYTTKITKYQDLRHEVRDIWGMEKILIIPLVISATGIVPKTLATNLEILNIDPNTYIEIQKATILNTCHIVRKFLDMAH

SEQ ID NO: 22354 - protein, 881 aa, Dysdera silvatica
MQGNRGKKLVRKVKMALKRNRMHTRHEEPNKHISEYLDTLKQKLGVYARRLRRYKDCTNKKQQNMQFQANQKAFYRKLQETPANKDKYEAPKPAVIETFWKTLWSNEVQHKSAPWIQQEMEATRGIEEMEYTGITIEELQQVIQRTHNWKASGIDGIHNFWYKKFTSTHGPLAKELTAIIEDPSKMPEFLCKGITYLLPKDQDTSNPAKYRPITCLNTLYKILTGCISEKISRHSESNNLMTEEQKGCQKGTLGCKEQLTIDSVILEQARKQKRKLNTAYIDYKKAFDSVPHSWLLEILSIYKVHPSIIRFLQSSMKQWRTRLQLNTPDSKIETAEIPIRRGIFQGDALSPQWFCLALNPLSRMLNTSKYGYMLKKDKRNLHKVSHLMYVDDIKLYAPTITQLRQLISITETFSKDIGMEFGLDKCKIQENRKEDLPGIEFEDGRLLKILDEGETYKYLGIMQKRQQEHKKVKVQLTQAFQERLRSIVKTKLSGKNTTQAINAYAVPVLTYSFGIIKWSNTELEQLQRKMRTIQRRAGQLHPATAIERQTLPREEGGRGQADLKDLHDKQIQSMRQYFQLKSPRSPLIQAIIQADANYTPLNLCSTEERVLETANEQKLRTWAGKPLHGRHYNDLQHPHVDKKASNSWLAKGTLQPETEGFMLAIQDQVIATRNNQKFIQRKDIESDKCRHCHAASETIQHVMAGCKILAQSDYKHRHDQVAKIVHQKLAANAGFLTEKCPYYKYEPETVHENETHKLYWDRAIITDKTVPHNRPDITLVDKSNKTTYLIDIAVPNTNNIQTTYTTKITKYQDLRHEVRDIWGMEKILIIPLVISATGIVPKTLATNLEILNIDPNTYIEIQKATILNTCHIVRKFLDMAH

SEQ ID NO: 22355 - protein, 881 aa, Dysdera silvatica
MQGNRGKKLVRKVKMALKRNRMHTRHEEPNKHISEYLDTLKQKLGVYARRLRRYKDCTNKKQQNMQFQANQKAFYRKLQETPANKDKYEAPKPAVIETFWKTLWSNEVQHKSAPWIQQEMEATRGIEEMEYTGITIEELQQVIQRTHNWKAPGIDGIHNFWYKKFTSAHGPLAKELTAIIEDPSKMPEFLCKGITYLLPKDQDTSNPAKYRPITCLNTLYKILTGCISEKISRHSESNNLMTEEQKGCQKGTLGCKEQLTIDSVILEQARKQKRKLNTAYIDYKKAFDSVPHSWLLEILSIYKVHPSIIRFLQSSMKQWRTRLQLNTPDSKIKTAEIPIRRGIFQGDALSPQWFCLALNPLSRMLNTSKYGYMLKKDKRNLHKVSHLMYVDDIKLYAPTITQLRQLISITETFSKDIGMEFGLDKCKIQKNSKEDLPGIELEDGRLLKTLDEGETYKYLGIMQKRQQEHKKVKVQLTQAFQERLRSIVKTKLSGKNTTQAINAYAVPVLTYSFGIIKWSNTELEQLQRKMRTIQRRAGQLHPATAIERQTLPREEGGRGQADLKDLHDKQIQSMRQYFQLKSPRSPLIQAIIQADANYTPLNLCSTEERVLETANEQKLRTWAGKPLHGRHYNDLQQPHVDKKASNSWLAKGTLQPETEGFMLAIQDQVIATRNNQKFIQRKDIESDKCRHCHAASETIQHVMAGCKILAQSDYKHRHDQVAKIVHQKLAANAGFLTEKCPYYKYEPETVHENETHKLYWDRAIITDKTVPHNRPDITLVDKSNKTTYLIDIAVPNTNNIQTTYTTKITKYQDLRHEVRDIWGMEKIFIIPLVISATGIVPKTLATNLEILNIDPNTYIEIQKATILNTCHIVRKFLDMAH

SEQ ID NO: 22356 - protein, 1062 aa, Dysdera silvatica
MLGGFWLGRNIITRNLLAEPILQRLRDEVANDLANTSTSVANPEAPAIGAREPLQPSIEEEERRDVEKMEEGFQCALAEYEGSDAATRPRIPRQPASWKLCKATKILNEHTLPLHLQNHNSLQEIHTAIYCAAVAASRANGYEVRNEGRSNRGNKAQPPWQVRLQKRIEELRSSIGRITQYMQGNRSKKLVRKVKMALKRNRIHTRHEEPNKHISEYLDTLKQKLGVYARRLRRYKDYTNRKQQNMQFQANQKAFYRKLRETPANKDKYEAPKPAEIETFWKTLWSNEVQHKSAPWIQQEMEATRGIEEMEYTGITIEELQQVIQRTHNWKAPGIDGIHNFWYKKFTSAHGPLAKELTAIIEDPSKMPEFLCKGITYLLPKDQDTSNPAKYRPITCLNTLYKILTGCISEKISRHSESNNLMTEEQKGCQKGTLGCKEQLTIDSVILEQARKQKRKLNTAYIDYKKAFDSVPHSWLLEILSIYKVHPSIIRFLQSSMKQWRTRLQLNTPDSKIETAEIPIRRGIFQGDALSPQWFCLALNPLSRMLNTSKYGYMLKKDKRNLHKVSHLMYVDDIKLYAPTITQLRQLISITETFSKDIGMEFGLDKCKIQKNSKEDLPGIELEDGRLLKTLDEGETYKYLGIMQKRQQEHKKVKVQLTQAFQERLRSIVKTKLSGKNTTQAINAYAVPVLTYSFGIIKWSNTELEQLQRKMRTIQRRAGQLHPATAIERQTLPREEGGRGQADLKDLHDKQIQSMRQYFQLKSPRSPLIQAIIQADANYTPLNLCSTEERVLETANEQKLRTWAGKPLHGRHYNDLQQPHVDKKASNSWLAKGTLQPETEGFMLAIQDQVIATRNNQKFIQRKDIESDKCRHCHAASETIQHVMAGCKILAQSDYKHRHDQVAKIVHQKLAANAGFLTEKCPYYKYEPETVHENETHKLYWDRAIITDKTVPHNRPDITLVDKSNKTTYLIDIAVPNTNNIQTTYTTKITKYQDLRHEVRDIWGMEKILIIPLVISATGIVPKTLATNLEILNIDPNTYIEIQKATILNTCHIVRKFLDMAH

SEQ ID NO: 22357 - protein, 875 aa, Dysdera silvatica
MKLVRKVKMALKRNRIHTRHEEPNKHISEYLDTLKQKLGVYARRLRRYKDYTNKKQQNMQFQANQKAFYRKLRETPANKDKYEAPKPAEIETFWKTLWSNEVQHKSAPWIQQEMEATRGIEEMEYTGITIEELQQVIQRTHNWKAPGIDGIHNFWYKKFTSAHGPLAKELTAIIEDPSKMPEFLCKGITYLLPKDQDTSNPAKYRPITCLNTLYKILTGCISEKISRHSESNNLMTEEQKGCQKGTLGCKEQLTIDSVILEQARKQKRKLNTAYIDYKKAFDSVPHSWLLEILSIYKVHPSIIRFLQSSMKQWRTRLQLNTPDSKIETAEIPIRRGIFQGDALSPQWFCLALNPLSRMLNTSKYGYMLKKDKRNLHKVSHLMYVDDIKLYAPTITQLRQLISITETFSKDIGMEFGLDKCKIQKNSKEDLPGIELEDGRLLKTLDEGETYKYLGIMQKRQQEHKKVKVQLTQAFQERLRSIVKTKLSGKNTTQAINAYAVPVLTYSFGIIKWSNTELEQLQRKMRTIQRRAGQLHPATAIERQTLPREEGGRGQADLKDLHDKQIQSMRQYFQLKSPRSPLIQAIIQADANYTPLNLCSTEERVLETANEQKLRTWAGKPLHGRHYNDLQQPHVDKKASNSWLAKGTLQPETEGFMLAIQDQVIATRNNQKFIQRKDIESDKCRHCHAASETIQHVMAGCKILAQSDYKHRHDQVAKIVHQKLAANAGFLTEKCPYYKYEPETVHENETHKLYWDRAIITDKTVPHNRPDITLVDKSNKTTYLIDIAVPNTNNIQTTYTTKITKYQDLRHEVRDIWGMEKIFIIPLVISATGIVPKTLATNLEILNIDPNTYIEIQKATILNTCHIVRKFLDMAH

SEQ ID NO: 22358 - protein, 1184 aa, Dysdera silvatica
MNHNENMNGASVVSLLNQNRVRVLSRGARPKNMQQSLLGGAGGCSGAFNCTATRTNTAQSALQPNTGTTTRAERPRQRMSWTIDMNTYIMRTYYTITKLETDMTNYRPTLHAKFAQQYPHLDISIERITTQRRNIITRNLLAEPILQRLRDEVANDLANTSTSVANPEAPASSAREPLQPSIEEEERRDVEKMEEGFQCALAEYEGSDAATRPRIPRQPASWKLCKATKILNEHTLPLHLQNHNSLQEIHTAIYCAAVAASRANGYEVRNEGRSNRGNKAQPPWQVRLQKRIEELRSSIGRITQYMQGNRSKKLVRKVKMALKRNRIHTRHEEPNKHISEYLDTLKQKLSVYARRLRRYKDYTNRKQQNKKFQTNQKAFYRKLQETPANQDKYEAPKPAEIETFWKTLWSNEVQHKSAPWIQQEMEATRGIEEMEYTGITIEELQQVIQRTHNWKAPGIDGIHNFWYKKFTSAHGPLAKELTAIIEDPSKMPEFLCKGITYLLPKDQDTSNPAKYRPITCLNTLYKILTGCISEKISRHSESNNLMTEEQKGCQKGTLGCKEQLTIDSVILEQARKQKRKLNTAYIDYKKAFDSVPHSWLLEILSIYKVHPSIIRFLQSSMKQWRTRLQLNTPDSKIETAEIPIRRGIFQGDALSPQWFCLALNPLSRMLNTSKYGYMLKKDKRNLHKVSHLMYVDDIKLYAPTITQLRQLISITETFSKDIGMEFGLDKCKIQKNSKEDLPGIELEDGRLLKTLDEGETYKYLGIMQKRQQEHKKVKVQLTQAFQERLRSIVKTKLSGKNTTQAINAYAVPVLTYSFGIIKWSNTELEQLQRKMRTIQRRAGQLHPATAIERQTLPREEGGRGQADLKDLHDKQIQSMRQYFQLKSPRSPLIQAIIQADANYTPLNLCSTEERVLETANEQKLRTWAGKPLHGRHYNDLQQPHVDKKASNSWLAKGTLQPETEGFMLAIQDQVIATRNNQKFIQRKDIESDKCRHCHAASETIQHVMAGCKILAQSDYKHRHDQVAKIVHQKLAANAGFLTEKCPYYKYEPETVHENETHKLYWDRAIITDKTVPHNRPDITLVDKSNKTTYLIDIAVPNTNNIQTTYTTKITKYQDLRHEVRDIWGMEKILIIPLVISATGIVPKTLATNLEILNIDPNTYIEIQKATILNTCIYILFNQNA

SEQ ID NO: 22359 - protein, 1154 aa, Dysdera silvatica
MQRYSLEINGVVVAAFNCTATRTNTAQSALQPSIGATTRAERPRQRMSWTIDMNTYIMRTYYTITKLETDMTNYRPTLHAKFAQQYPHLDISIERITTQRRNIITRNLLAEPILQRLRDEVANDLANTSTSVANPEAPAIGAREPLQPSIEEEERRDVEKMEEGFQCALAEYEGSDAATRPRIPRQPASWKLCKATKILNEHTLPLHLQNHNSLQEIHTAIYCAAVAASRANGYEVRNEGRSNRGNKAQPPWQVRLEKRIEELRSSIGRITQYMQGNRSKKLVRKVKMALKRNRIHTRHEEPNKHISEYLDTLKQKLGVYARRLRRYKDYTNRKQQNMQFQANQKAFYRKLRETPANKDKYEAPKPAEIETFWKTLWSNEVQHKSAPWIQQEMEATRGIEEMEYTGITIEELQQVIQRTHNWKAPGIDGIHNFWYKKFTSAHGPLAKELTAIIEDPSKMPEFLCKGITYLLPKDQDTSNPAKYRPITCLNTLYKILTGCISEKISRHSESNNLMTEEQKGCQKGTLGCKEQLTIDSVILEQARKQKRKLNTAYIDYKKAFDSVPHSWLLEILSIYKVHPSIIRFLQSSMKQWRTRLQLNTPDSKIETAEIPIRRGIFQGDALSPQWFCLALNPLSRMLNTSKYGYMLKKDKRNLHKVSHLMYVDDIKLYAPTITQLRQLISITETFSKDIGMEFGLDKCKIQKNSKEDLPGIELEDGRLLKTLDEGETYKYLGIMQKRQQEHKKVKVQLTQAFQERLRSIVKTKLSGKNTTQAINAYAVPVLTYSFGIIKWSNTELEQLQRKMRTIQRRAGQLHPATAIERQTLPREEGGRGQADLKDLHDKQIQSMRQYFQLKSPRSPLIQAIIQADANYTPLNLCSTEERVLETANEQKLRTWAGKPLHGRHYNDLQQPHVDKKASNSWLAKGTLQPETEGFMLAIQDQVIATRNNQKFIQRKDIESDKCRHCHAASETIQHVMAGCKILAQSDYKHRHDQVAKIVHQKLAANAGFLTEKCPYYKYEPETVHENETHKLYWDRAIITDKTVPHNRPDITLVDKSNKTTYLIDIAVPNTNNIQTTYTTKITKYQDLRHEVRDIWGMEKILIIPLVISATGIVPKTLATNLEILNIDPNTYIEIQKATILNTCHIVRKFLDMAH

SEQ ID NO: 22360 - protein, 1155 aa, Dysdera silvatica
MKGKIESKKSGQLLERVVIYVYSRTNTAQSALQPSIGATTRAERPRQRMSWTIDMNTYIMRTYYTITKLETDMTNYRPTLHAKFAQQYPHLDISIERITTQRRNIITRNLLAEPILQRLRDEVANDLANTSTSVANPEAPASSAREPLQPSIEEERRDVEKMEEGFQCALAEYEGSDAATRPRIPRQPASWKLCKATKILNEHTLPLHLQNHNSLQEIHTAIYCAAVAASRANGYEVRNEGRSNRGNKAQPPWQVRLEKRIEELRSSIGRITQYMQGNRGKKLVRKVKMALKRNRIHTRHEEPNKHISEYLDTLKQKLGVYARRLRRYKDYTNKKQQNMQFQANQKAFYRKLRETPANKDKYEAPKPAEIETFWKTLWSNEVQHKSAPWIQQEMEATRGIEEMEYTGITIEELQQVIQRTHNWKAPGIDGIHNFWYKKFTSAHGPLAKELTAIIEDPSKMPEFLCKGITYLLPKDQDTSNPAKYRPITCLNTLYKILTGCISEKISRHSESNNLMTEEQKGCQKGTLGCKEQLTIDSVILEQARKQKRKLNTAYIDYKKAFDSVPHSWLLEILSIYKVHPSIIRFLQSSMKQWRTRLQLNTPDSKIETAEIPIRRGIFQGDALSPQWFCLALNPLSRMLNTSKYGYMLKKDKRNLHKVSHLMYVDDIKLYAPTITQLRQLISITETFSKDIGMEFGLDKCKIQKNSKEDLPGIELEDGRLLKTLDEGETYKYLGIMQKRQQEHKKVKVQLTQAFQERLRSIVKTKLSGKNTTQAINAYAVPVLTYSFGIIKWSNTELEQLQRKMRTIQRRAGQLHPATAIERQTLPREEGGRGQADLKDLHDKQIQSMRQYFQLKSPRSPLIQAIIQADANYTPLNLCSTEERVLETANEQKLRTWAGKPLHGRHYNDLQQPHVDKKASNSWLAKGTLQPETEGFMLAIQDQVIATRNNQKFIQRKDIESDKCRHCHAASETIQHVMAGCKILAQSDYKHRHDQVAKIVHQKLAANAGFLTEKCPYYKYEPETVHENETHKLYWDRAIITDKTVPHNRPDITLVDKSNKTTYLIDIAVPNTNNIQTTYTTKITKYQDLRHEVRDIWGMEKILIIPLVISATGIVPKTLATNLEILNIDPNTYIEIQKATILNTCHIVRKFLDMAH

SEQ ID NO: 22361 - protein, 1161 aa, Dysdera silvatica
MEHRLQNMQQSLLGGVGGCSGASNCTATRTNTAQSALQPSIGATTRAERPRQRMSWTIDMNTYIMRTYYTITKLETDMTNYRPTLHAKFAQQYPHLDISIERITTQRRNIITRNLLAEPILQRLRDEVANDLANTSTSVANPEAPASSAREPLQPSIEEEERRDVEKMEEGFQCALAEYEGSDAATRPRIPRQPASWKLCKATKILNEHTLPLHLQNHNSLQEIHTAIYCAAVAASRANGYEVRNEGRSNRGNKAQPPWQVRLEKRIEELRSSIGRITQYMQGNRSKKLVRKVKMALKRNRIHTRHEEPNKHISEYLDTLKQKLGVYARRLRRYKDYTNKKQQNMQFQANQKAFYRKLRETPANKDKYEAPKPAEIETFWKTLWSNEVQHKSAPWIQQEMEATRGIEEMEYTGITIEELQQVIQRTHNWKAPGIDGIHNFWYKKFTSAHGPLAKELTAIIEDPSKMPEFLCKGITYLLPKDQDTSNPAKYRPITCLNTLYKILTGCISEKISRHSESNNLMTEEQKGCQKGTLGCKEQLTIDSVILEQARKQKRKLNTAYIDYKKAFDSVPHSWLLEILSIYKVHPSIIRFLQSSMKQWRTRLQLNTPDSKIETAEIPIRRGIFQGDALSPQWFCLALNPLSRMLNTSKYGYMLKKDKRNLHKVSHLMYVDDIKLYAPTITQLRQLISITETFSKDIGMEFGLDKCKIQKNSKEDLPGIELEDGRLLKTLDEGETYKYLGIMQKRQQEHKKVKVQLTQAFQERLRSIVKTKLSGKNTTQAINAYAVPVLTYSFGIIKWSNTELEQLQRKMRTIQRRAGQLHPATAIERQTLPREEGGRGQADLKDLHDKQIQSMRQYFQLKSPRSPLIQAIIQADANYTPLNLCSTEERVLETANEQKLRTWAGKPLHGRHYNDLQQPHVDKKASNSWLAKGTLQPETEGFMLAIQDQVIATRNNQKFIQRKDIESDKCRHCHAASETIQHVMAGCKILAQSDYKHRHDQVAKIVHQKLAANAGFLTEKCPYYKYEPETVHENETHKLYWDRAIITDKTVPHNRPDITLVDKSNKTTYLIDIAVPNTNNIQTTYTTKITKYQDLRHEVRDIWGMEKILIIPLVISATGIVPKTLATNLEILNIDPNTYIEIQKATILNTCHIVRKFLDMAH

SEQ ID NO: 22362 - protein, 1182 aa, Dysdera silvatica
MNHNENMNGASVVALLNQNRIRTLSRGVCSKNMQQSLLGGAGSCSGAYNCTATRTNRAHSALQPSIGATTRAERARQRMSWTIDMNTYIMRTYYTITKLETDMTNYRPTLHAKFAQQYPHLDISIERITTQRRNIITRNLLAEPILQRLRDEVANDLVNTSTSVANPEVPEAPAIGAREPLQTSIEEEERRDVEKMEEGFQCALAEYEGSDAAARPRIPRQPEYWKLCAATKILNEHTLPLHLQKHNSLQEIHTAIYCAAVAASRVNGYEVRNEDRNNRGNKAQPPWQVRLEKRIEELRSSIGRITQYMQGNRSKKLVRKVKMALKRNRIHTRHEEPNKHISEYLDTLKQKLSVYARRLRRHKEFANRKQQNKKFQTNQKAFCRKLQETSASQDKYETPKPAEIQTFWKTLWSNEIQHKSAPWIQQEMEAVSGIEEMEYTGMTIEELQQVIQKTHNWKASGIDGIQLAEFTQPAKELTAIIEDPSKMPEFLCKGITYLLPKDQDTSNPAKYRPITCLNTLYKILTGCISEKISRHSESNNLMTEEQKGCQKRTLGCKEQLTIDSVILEQARKQKRKLNTAYIDYKKAFDSVPHSWLLEILSIYKVHPSIIRFLQSSMKQWRTRLQLNTPDSKIESAEIPIRRGIFQGDALSPQWFCLRLNPLSRMLNTSKYGYMLNKDKRNLHKLSHLMYVDDIKLYASTIAQLRQLISITETFSKDIGMEFGLDKCKIQKNSKEDLPGIELEDGRLLKTLDEGETYKYLGIMQKRQQEHKKVKVQLTQAFQERLRSIVKTKLSGKNTTQAINAYAVPVLTYSFGIIKWSNTELEQLQRKMRTIQRRAGQLHPATAIERQTLPREEGGRGQADLKDLHDKQIQSMRQYFQLKSPRSPLIQAIIQADANYTPLNLCSTEERVLETANEQKLRTWAGKPLHGRHYNDLQQPHVDKKASNSWLAKGTLQPETEGFMLAIQDQVIATRNNQKFIQRKDIESDKCRHCHAASETIQHVMAGCKILAQSDYKHRHDQVAKIVHQKLAANAGFLTEKCPYYKYEPETVHENETHKLYWDRAIITDKTVPHNRPDITLVDKSNKTTYLIDIAVPNTNNIQTTYTTKITKYQDLRHEVRDIWGMEKILIIPLVISATGIVPKTLATNLEILNIDPNTYIEIQKATILNTCHIVRKFLDMAH

SEQ ID NO: 22363 - protein, 1093 aa, Dysdera silvatica
MRTYYTITKPETDMTNYRPTLYVKFAKQYPHLDISIERITTQRRNIITRNLLAEPILQRLRDEVANDLANTSTSVANPEASASSAREPLQPSTEEEESRDVEKMEEGFQCALAEYEGSDAATRPRIPRQPASWKLCKATKILNEHTLPLHLQNHNSLQEIHTAIYCAAVAASHANGYEGRSNRGNKAQPPWQVRLEKRIEELRSSIGRITQYMQGNRGKKLVRKVKMALKRNRIHTRHEEPNKHISEYLDTLKQKLGVYARRLRRYKDCTNKKQQNMQFQANQKAFYRKLRETPANKDKYEAPKPAEIETFWKTLWSNEVQHKSAPWIQQEMEATRGIEEMEYTGITIEELQQVIQRTHNWKAPGIDGIHNFWYKKFTSAHGPLAKELTAIIEDPSKMPEFLCKGITYLLPKDQDTSNPAKYRPITCLNTLYKILTGCISEKISRHSESNNLMAEEQKGCQKGTLGCKEQLTIDSVILEQARKQKRKLNTAYIDYKKAFDSVPHSWLLEILSIYKVHPSIIRFLQSSMKQWRTRLQLNTPDSKIETAEIPIRRGIFQGDALSPQWFCLALNPLSRMLNTSKYGYMLKKDKRNLHKVSHLMYVDDIKLYAPTITQLRQLISITETFSKDIGMEFGLDKCKIQKNSKEDLPGIELEDGRLLKTLDEGETYKYLGIMQKRQQEHKKVKVQLTQAFQERLRSIVKTKLSGKNTTQAINAYAVPVLTYSFGIIKWSNTELEQLQRKMRTIQRRAGQLHPATAIERQTLPREEGGRGQADLKDLHDKQIQSMRQYFQLKSPRSPLIQAIIQADANYTPLNLCSTEERVLETANEQKLRTWAGKPLHGRHYNDLQQPHVDKKASNSWLAKGTLQPETEGFMLAIQDQVIATRNNQKFIQRKDIESDKCRHCHAASETIQHVMAGCKILAQSDYKHRHDQVAKIVHQKLAANAGFLTEKCPYYKYEPETVHENETHKLYWDRAIITDKTVPHNRPDITLVDKSNKTTYLIDIAVPNTNNIQTTYTTKITKYQDLRHEVRDIWGMEKILIIPLVISATGIVPKTLATNLEILNIDPNTYIEIQKATILNTCHIVRKFLDMAH

SEQ ID NO: 22364 - protein, 925 aa, Dysdera silvatica
MLSNRMLVLSTKLLNMILVLCSFILSPTSLLLVESSCDMVCIYIYIYILNKKLVRKVKMALKRNRIHTRHEEPNKHISEYLDTLKQKLGVYARRLRRYKDYTNKKQQNMQFQANQKAFYRKLRETPANKDKYEAPKPAEIETFWKTLWSNEVQHKSAPWIQQEMEATRGIEEMEYTGITIEELQQVIQRTHNWKAPGIDGIHNFWYKKFTSAHGPLAKELTAIIEDPSKMPEFLCKGITYLLPKDQDTSNPAKYRPITCLNTLYKILTGCISEKISRHSESNNLMTEEQKGCQKGTLGCKEQLTIDSVILEQARKQKRKLNTAYIDYKKAFDSVPHSWLLEILSIYKVHPSIIRFLQSSMKQWRTRLQLNTPDSKIETAEIPIRRGIFQGDALSPQWFCLALNPLSRMLNTSKYGYMLKKDKRNLHKVSHLMYVDDIKLYAPTITQLRQLISITETFSKDIGMEFGLDKCKIQKNSKEDLPGIELEDGRLLKTLDEGETYKYLGIMQKRQQEHKKVKVQLTQAFQERLRSIVKTKLSGKNTTQAINAYAVPVLTYSFGIIKWSNTELEQLQRKMRTIQRRAGQLHPATAIERQTLPREEGGRGQADLKDLHDKQIQSMRQYFQLKSPRSPLIQAIIQADANYTPLNLCSTEERVLETANEQKLRTWAGKPLHGRHYNDLQQPHVDKKASNSWLAKGTLQPETEGFMLAIQDQVIATRNNQKFIQRKDIESDKCRHCHAASETIQHVMAGCKILAQSDYKHRHDQVAKIVHQKLAANAGFLTEKCPYYKYEPETVHENETHKLYWDRAIITDKTVPHNRPDITLVDKSNKTTYLIDIAVPNTNNIQTTYTTKITKYQDLRHEVRDIWGMEKILIIPLVISATGIVPKTLATNLEILNIDPNTYIEIQKATILNTCHIVRKFLDMAH

SEQ ID NO: 22365 - protein, 1186 aa, Dysdera silvatica
MNHNENMNGASVVSLLNQNRVRTLSRGASSKNMQQSLLGGVGGCSGASNCTATRTNTAQSALQPSIGATTRAERPRQRMSWTIDMNTYIMRTYYTITKLETDMTNYRPTLHAKFAQQYPHLDISIERITTQRRNIITRNLLAEPILQRLRDEVANDLANTSTSVANPEAPASSAREPLQPSIEEEERRDVEKMEEGFQCALAEYEGSDAATRPRIPRQPASWKLCKATKILNEHTLPLHLQNHNSLQEIHTAIYCAAVAASRANGYEVRNEGRSNRGNKAQPPWQVRLQKRIEELRSSIGRITQYMQGNRGKKLVRKVKMALKRNRIHTRHEEPNKHISEYLDTLKQKLGVYARRLRRYKDYTNKKQQNMQFQANQKAFYRKLRETPANKDKYEAPKPAEIETFWKTLWSNEVQHKSAPWIQQEMEATRGIEEMEYTGITIEELQQVIQRTHNWKAPGIDGIHNFWYKKFTSAHGPLAKELTAIIEDPSKMPEFLCKGITYLLPKDQDTSNPAKYRPITCLNTLYKILTGCISEKISRHSESNNLMTEEQKGCQKGTLGCKEQLTIDSVILEQARKQKRKLNTAYIDYKKAFDSVPHSWLLEILSIYKVHPSIIRFLQSSMKQWRTRLQLNTPDSKIETAEIPIRRGIFQGDALSPQWFCLALNPLSRMLNTSKYGYMLKKDKRNLHKVSHLMYVDDIKLYAPTITQLRQLISITETFSKDIGMEFGLDKCKIQKNSKEDLPGIELEDGRLLKTLDEGETYKYLGIMQKRQQEHKKVKVQLTQAFQERLRSIVKTKLSGKNTTQAINAYAVPVLTYSFGIIKWSNTELEQLQRKMRTIQRRAGQLHPATAIERQTLPREEGGRGQADLKDLHDKQIQSMRQYFQLKSPRSPLIQAIIQADANYTPLNLCSTEERVLETANEQKLRTWAGKPLHGRHYNDLQQPHVDKKASNSWLAKGTLQPETEGFMLAIQDQVIATRNNQKFIQRKDIESDKCRHCHAASETIQHVMAGCKILAQSDYKHRHDQVAKIVHQKLAANAGFLTEKCPYYKYEPETVHENETHKLYWDRAIITDKTVPHNRPDITLVDKSNKTTYLIDIAVPNTNNIQTTYTTKITKYQDLRHEVRDIWGMEKILIIPLVISATGIVPKTLATNLEILNIDPNTYIEIQKATILNTCHIVRKFLDMAH

SEQ ID NO: 22366 - protein, 1182 aa, Dysdera silvatica
MNHNENMNGASVVSLLNQNRVRVLSRGASSKNMQQSLLGGVGGCSGASNCTATRTNTAQSALQPSIGATTRAERPRQRMSWTIDMNTYIMRTYYTITKLETDMTNYRPTLHAKFAQQYPHLDISIERITTQRRNIITRNLLAEPILQRLRDEVANDLANTSTSVANPEAPASSAREPLQPSIEEEERRDVEKMEEGFQCALAEYEGSDAATRPRIPRQPASWKLCKATKILNEHTLPLHLQNHNSLQEIHTAIYCATVAASRANGYEDRNNRGNKAQPPWQVRLQKRIEELRSSIGRITQYMQGNRSKKLVRKVKMALKRNRIHTRHEEPNKHISEYLDTLKQKLGVYARRLRRYKDYTNRKQQNMQFQANQKAFYRKLRETPANKDKYEAPKPAEIETFWKTLWSNEVQHKSAPWIQQEMEATRGIEEMEYTGITIEELQQVIQRTHNWKAPGIDGIHNFWYKKFTSAHGPLAKELTAIIEDPSKMPEFLCKGITYLLPKDQDTSNPAKYRPITCLNTLYKILTGCISEKISRHSESNNLMTEEQKGCQKGTLGCKEQLTIDSVILEQARKQKRKLNTAYIDYKKAFDSVPHSWLLEILSIYKVHPSIIRFLQSSMKQWRTRLQLNTPDSKIETAEIPIRRGIFQGDALSPQWFCLALNPLSRMLNTSKYGYMLKKDKRNLHKVSHLMYVDDIKLYAPTITQLRQLISITETFSKDIGMEFGLDKCKIQKNSKEDLPGIELEDGRLLKTLDEGETYKYLGIMQKRQQEHKKVKVQLTQAFQERLRSIVKTKLSGKNTTQAINAYAVPVLTYSFGIIKWSNTELEQLQRKMRTIQRRAGQLHPATAIERQTLPREEGGRGQADLKDLHDKQIQSMRQYFQLKSPRSPLIQAIIQADANYTPLNLCSTEERVLETANEQKLRTWAGKPLHGRHYNDLQQPHVDKKASNSWLAKGTLQPETEGFMLAIQDQVIATRNNQKFIQRKDIESDKCRHCHAASETIQHVMAGCKILAQSDYKHRHDQVAKIVHQKLAANAGFLTEKCPYYKYEPETVHENETHKLYWDRAIITDKTVPHNRPDITLVDKSNKTTYLIDIAVPNTNNIQTTYTTKITKYQDLRHEVRDIWGMEKILIIPLVISATGIVPKTLATNLEILNIDPNTYIEIQKATILNTCHIVRKFLDMAH

SEQ ID NO: 22367 - protein, 1140 aa, Dysdera silvatica
MYIVLEGTCHNHTTILLYIYIYKTWAERPRQRMSWTIDMNTYIMRTYYTITKLETDMTNYRPTLHAKFAQQYPHLDISIERITTQRRNIITRNLLAEPILQRLRDEVANDLANTSTSVANPEAPASSAREPLQPSIEEEERRDVEKMEEGFQCALAEYEGSDAATRPRIPRQPASWKLCKATKILNEHTLPLHLQNHNSLQEIHTAIYCAAVAASRANGYEVRNEGRSNRGNKAQPPWQVRLQKRIEELRSSIGRITQYMQGNRSKKLVRKVKMALKRNRIHTRHEEPNKHISEYLDTLKQKLGVYARRLRRYKDYTNRKQQNMQFQANQKAFYRKLRETPANKDKYEAPKPAEIETFWKTLWSNEVQHKSAPWIQQEMEATRGIEEMEYTGITIEELQQVIQRTHNWKAPGIDGIHNFWYKKFTSAHGPLAKELTAIIEDPSKMPEFLCKGITYLLPKDQDTSNPAKYRPITCLNTLYKILTGCISEKISRHSESNNLMTEEQKGCQKGTLGCKEQLTIDSVILEQARKQKRKLNTAYIDYKKAFDSVPHSWLLEILSIYKVHPSIIRFLQSSMKQWRTRLQLNTPDSKIETAEIPIRRGIFQGDALSPQWFCLALNPLSRMLNTSKYGYMLKKDKRNLHKVSHLMYVDDIKLYAPTITQLRQLISITETFSKDIGMEFGLDKCKIQKNSKEDLPGIELEDGRLLKTLDEGETYKYLGIMQKRQQEHKKVKVQLTQAFQERLRSIVKTKLSGKNTTQAINAYAVPVLTYSFGIIKWTNTELEQLQRKMRTIQRRAGQLHPATAIERQTLPREEGGRGQADLKDLHDKQIQSMRQYFQLKSPRSPLIQAIIQADANYTPLNLCSTEERVLETANEQKLRTWAGKPLHGRHYNDLQQPHVDKKASNSWLAKGTLQPETEGFMLAIQDQVIATRNNQKFIQRKDIESDKCRHCHAASETIQHVMAGCKILAQSDYKHRHDQVAKIVHQKLAANAGFLTEKCPYYKYEPETVHENETHKLYWDRAIITDKTVPHNRPDITLVDKSNKTTYLIDIAVPNTNNIQTTYTTKITKYQDLRHEVRDIWGMEKILIIPLVISATGIVPKTLATNLEILNIDPNTYIEIQKATILNTCHIVRKFLDMAH

SEQ ID NO: 22368 - protein, 946 aa, Dysdera silvatica
MEEGFQCALAEYEGSDAATRPRIPHQPASRANGYEVRNEGRSNRGNKAQPPWQVRLQKRIEELRSSIGRITQYMQGNRGKKLVRKVKMALKRNRIHTRHEEPNKHISEYLDTLKQKLGVYARRLRRYKDYTNKKQQNMQFQANQKAFYRKLRETPANKDKYEAPKPAEIETFWKTLWSNEVQHKSAPWIQQEMEATRGIEEMEYTGITIEELQQVIQRTHNWKAPGIDGIHNFWYKKFTSAHGPLAKELTAIIEDPSKMPEFLCKGITYLLPKDQDTSNPAKYRPITCLNTLYKILTGCISEKISRHSESNNLMTEEQKGCQKGTLGCKEQLTIDSVILEQARKQKRKLNTAYIDYKKAFDSVPHSWLLEILSIYKVHPSIIRFLQSSMKQWRTRLQLNTPDSKIETAEIPIRRGIFQGDALSPQWFCLALNPLSRMLNTSKYGYMLKKDKRNLHKVSHLMYVDDIKLYAPTITQLRQLISITETFSKDIGMEFGLDKCKIQKNSKEDLPGIELEDGRLLKTLDEGETYKYLGIMQKRQQEHKKVKVQLTQAFQERLRSIVKTKLSGKNTTQAINAYAVPVLTYSFGIIKWSNTELEQLQRKMRTIQRRAGQLHPATAIERQTLPREEGGRGQADLKDLHDKQIQSMRQYFQLKSPRSPLIQAIIQADANYTPLNLCSTEERVLETANEQKLRTWAGKPLHGRHYNDLQQPHVDKKASNSWLAKGTLQPETEGFMLAIQDQVIATRNNQKFIQRKDIESDKCRHCHAASETIQHVMAGCKILAQSDYKHRHDQVAKIVHQKLAANAGFLTEKCPYYKYEPETVHENETHKLYWDRAIITDKTVPHNRPDITLVDKSNKTTYLIDIAVPNTNNIQTTYTTKITKYQDLRHEVRDIWGMEKILIIPLVISATGIVPKTLATNLEILNIDPNTYIEIQKAAYNFSSLAF

SEQ ID NO: 22369 - protein, 1079 aa, Dysdera silvatica
MDLLITFLSLSQIVESLSFCVCVCVCVCVCVCVCVCVCVCVCVCVFPIGKSIYSTCIYITYYHILHVSMFSFTVCTTHVQNIEINIYIYFQCALAEYEGSDAATRPRIPRQPASWKLCKATKILNEHTLPLHLQNHNSLQEIHTAIYCAAVAASRANGYEVRNEGRSNRGNKAQPPWQVRLQKRIEELRSSIGRITQYMQGNRGKKLVRKVKMALKRNRIHTRHEEPNKHISEYLDTLKQKLGVYARRLRRYKDYTNKKQQNMQFQANQKAFYRKLRETPANKDKYEAPKPAEIETFWKTLWSNEVQHKSAPWIQQEMEATRGIEEMEYTGITIEELQQVIQRTHNWKAPGIDGIHNFWYKKFTSAHGPLAKELTAIIEDPSKMPEFLCKGITYLLPKDQDTSNPAKYRPITCLNTLYKILTGCISEKISRHSESNNLMTEEQKGCQKGTLGCKEQLTIDSVILEQARKQKRKLNTAYIDYKKAFDSVPHSWLLEILSIYKVHPSIIRFLQSSMKQWRTRLQLNTPDSKIETAEIPIRRGIFQGDALSPQWFCLALNPLSRMLNTSKYGYMLKKDKRNLHKVSHLMYVDDIKLYAPTITQLRQLISITETFSKDIGMEFGLDKCKIQKNSKEDLPGIELEDGRLLKTLDEGETYKYLGIMQKRQQEHKKVKVQLTQAFQERLRSIVKTKLSGKNTTQAINAYAVPVLTYSFGIIKWSNTELEQLQRKMRTIQRRAGQLHPATAIERQTLPREEGGRGQADLKDLHDKQIQSMRQYFQLKSPRSPLIQAIIQADANYTPLNLCSTEERVLETANEQKLRTWAGKPLHGRHYNDLQQPHVDKKASNSWLAKGTLQPETEGFMLAIQDQVIATRNNQKFIQRKDIESDKCRHCHAASETIQHVMAGCKILAQSDYKHRHDQVAKIVHQKLAANAGFLTEKCPYYKYEPETVHENETHKLYWDRAIITDKTVPHNRPDITLVDKSNKTTYLIDIAVPNTNNIQTTYTTKITKYQDLRHEVRDIWGMEKILIIPLVISATGIVPKTLATNLEILNIDPNTYIEIQKATILNTCHIVRKFLDMAH

SEQ ID NO: 22370 - protein, 1138 aa, Dysdera silvatica
MNHNENMNGASVVSLLNQNRVRVLSRGASSKNMQQSLLGGVGGCSGASNCTATRTNTAQSALQPSIGATTRAERPRQRMSWTIDMNTYIMRTYYTITKLETDMTNYRPTLHAKFAQQYPHLDISIERITTQRRNIITRNLLAEPILQRLRDEVANDLANTSTSVANPEAPASSAREPLQPSIEEERRDVEKMEEGFQCALAEYEGSDAATRPRIPRQPASWKLCAATKILNEHTLPLHLQKHNSLHEIHTAIYCAAVAASRANGYEVRNEGRSNRGNKAQPPWQVRLEKRIEELRSSIGRITQYMQGNRSKKLVRKVKMALKRNRIHTRHEEPNKHISEYLDTLKQKLGVYARRLRRYKDYTNKKQQNMQFQANQKAFYRKLRETPANKDKYEAPKPAEIETFWKTLWSNEVQHKSAPWIQQEMEATRGIEEMEYTGITIEELQQVIQRTHNWKAPGIDGIHNFWYKKFTSAHGPLAKELTAIIEDPSKMPEFLCKGITYLLPKDQDTSNPAKYRPITCLNTLYKILTGCISEKISRHSESNNLMTEEQKGCQKGTLGCKEQLTIDSVILEQARKQKRKLNTAYIDYKKAFDSVPHSWLLEILSIYKVHPSIIRFLQSSMKQWRTRLQLNTPDSKIETAEIPIRRGIFQGDALSPQWFCLALNPLSRMLNTSKYGYMLKKDKRNLHKVSHLMYVDDIKLYAPTITQLRQLISITETFSKDIGMEFGLDKCKIQKNSKEDLPGIELEDGRLLKTLDEGETYKYLGIMQKRQQEHKKVKVQLTQAFQERLRSIVKTKLSGKNTTQAINAYAVPVLTYSFGIIKWTNTELEQLQRKMRTIQRRAGQLHPATAIERQTLPREEGGRGQADLKDLHDKQIQSMRQYFQLKSPRSPLIQAIIQADANYTPLNLCSTEERVLETANEQKLRTWAGKPLHGRHYNDLQQPHFDKRHCHAASETIQHVMAGCKILAQSDYKHRHDQVAKIVHQKLAANAGFLTEKCPYYKYEPETVHENETHKLYWDRAIITDKTVPHNRPDITLVDKSNKTTYLIDIAVPNTNNIQTTYTTKITKYQDLRHEVRDIWGMEKILIIPLVISATGIVPKTLATNLEILNIDPNTYIEIQKATILNTCHIVRKFLDMAH

SEQ ID NO: 22371 - protein, 872 aa, Dysdera silvatica
MQGNRSRKLVRKVKMALKRNRMHTRHEEPNKHIAEYLDTLKQKLGVYARRLRKYKEFANRKQQNKQFQANQKAFYRKLQETPANKDKYEAPKPAVIETFWKTLWSNEIQHKSAPWIQQEMEAVSGIEEMEYTGITIEELQQVIQRTLNWKAPGTDGIHNFWYKKFTSIHGPLAKELTAIIEDPSEMPEFLCKGITYLLPKDQDKSNPAKYRPITCLNTLYNILTGCISEKISRHSESNNLMAEEQKGCQKGTLGCKEQLTIDSVILEQARKQKRKLNTAYIDYKKAFDSVPHSWLLEILSIYKVHPSIIRFLQSSMKQWRTRLQLNTPDSKIEIAEIPIRRGIFQGDALSPNGLWLRTLIQRNTSKYGYMLKKDKRNLHKVSHLMYVDDIKLYAPTITQLRQLISITETFSKDIGMEFGLDKCKIQKNSKEDLPGIEFEDGRLLKILDEGETYKYLGIMQKRQQEHKKVKVQLTQAFQERLRSIVKTKLSGKNTTQAINAYAVPVLTYSFGIIKWTNTELEQLQRKMRTIQRRAGQLQPATAIERQTLPREEGGRGQADLKDLHDKQIQSMRQYFQLKSPRSPLIQAIIQADANYTPLNLCNTEERVLETANEQKLRTWAGKPLHGRHYNDLQQPHVDKKASNSWLAKGTLQPETEGFMLAIQDQVIATRNNQKFIQRKDIESDKCRHCHAASETIQHVMAGCKILAQSDYKHRHDQVAKIVHQKLAANAGFLTEKCPYYKYEPETVHENETHKLYWDRAIITDKTVPHNRPDITLVDKSNKTTYLIDIAVPNTNNIQTTYITKITKYQDLRHEVRDIWGMEKILIIPLVISATGIVPKTLATNLEILNIDPNTYIEIQKATILNTCHIYIV

SEQ ID NO: 22372 - protein, 1091 aa, Dysdera silvatica
MSWTIDMNTYIMRTYYTITKLETDMTNYRPTLHAKFAQQYPHLDISIERITTQRRNIITRNLLAEPILQRLRDEVANDLANTSTSVANPEAPASSAREPLQPSIEEEERRDVEKMEEGFQCALAEYEGSDAATRPRIPRQPASWKLCKATKILNEHTLPLHLQNHNSLQEIHTAIYCAAVAASRANGYEVRNEGRSNRGNKAQPPWQVRLQKRIEELRSSIGRITQYMQGNRGKKLVRKVKMALKRNRIHTRHEEPNKHISEYLDTLKQKLGVYARRLRRYKDYTNKKQQNMQFQANQKAFYRKLRETPANKDKYEAPKPAEIETFWKTLWSNEVQHKSAPWIQQEMEATRGIEEMEYTGITIEELQQVIQRTHNWKAPGIDGIHNFWYKKFTSAHGPLAKELTAIIEDPSKMPEFLCKGITYLLPKDQDTSNPAKYRPITCLNTLYKILTGCISEKISRHSESNNLMTEEQKGCQKGTLGCKEQLTIDSVILEQARKQKRKLNTAYIDYKKAFDSVPHSWLLEILSIYKVHPSIIRFLQSSMKQWRTRLQLNTPDSKIETAEIPIRRGIFQGDALSPQWFCLALNPLSRMLNTSKYGYMLKKDKRNLHKVSHLMYVDDIKLYAPTITQLRQLISITETFSKDIGMEFGLDKCKIQKNSKEDLPGIELEDGRLLKTLDEGETYKYLGIMQKRQQEHKKVKVQLTQAFQERLRSIVKTKLSGKNTTQAINAYAVPVLTYSFGIIKWSNTELEQLQRKMRTIQRRAGQLHPATAIERQTLPREEGGRGQADLKDLHDKQIQSMRQYFQLKSPRSPLIQAIIQADANYTPLNLCSTEERVLETANEQKLRTWAGKPLHGRHYNDLQQPHVDKKASNSWLAKGTLQPETEGFMLAIQDQVIATRNNQKFIQRKDIESDKCKILAQSDYKHRHDQVAKIVHQKLAANAGFLTEKCPYYKYEPETVHENETHKLYWDRAIITDKTVPHNRPDITLVDKSNKTTYLIDIAVPNTNNIQTTYTTKITKYQDLRHEVRDIWGMEKILIIPLVISATGIVPKTLATNLEILNIDPNTYIEIQKATILNTCHIVRKFLDMAH

SEQ ID NO: 22373 - protein, 1133 aa, Dysdera silvatica
MNHNENMNGASVVSLLNQNRVRTLSRGASSKNMQQSLLGGVGGCSGASNCTATRTNTAQSALQPSIGATTRAERPRQRMSWTIDMNTYIMRTYYTITKLETDMTNYRPTLHAKFAQQYPHLDISIERITTQRRNIITRNLLAEPILQRLRDEVANDLANTSTSVANPEAPASSAREPLQPSIEEEERRDVEKMEEGFQCALAEYEGSDAATRPRIPRQPASWKLCKATKILNEHTLPLHLQNHNSLQEIHTAIYCAAVAASRANGYEVRNEGRSNRGNKAQPPWQVRLEKRIEELRSSIGRITQYMQGNRGKKLVRKVKMALKRNRIHTRHEEPNKHISEYLDTLKQKLGVYARRLRRYKDYTNKKQQNMQFQANQKAFYRKLRETPANKDKYEAPKPAEIETFWKTLWSNEVQHKSAPWIQQEMEATRGIEEMEYTGITIEELQQVIQRTHNWKAPGIDGIHNFWYKKFTSAHGPLAKELTAIIEDPSKMPEFLCKGITYLLPKDQDTSNPAKYRPITCLNTLYKILTGCISEKISRHSESNNLMTEEQKGCQKGTLGCKEQLTIDSVILEQARKQKRKLNTAYIDYKKAFDSVPHSWLLEILSIYKVHPSIIRFLQSSMKQWRTRLQLNTPDSKIETAEIPIRRGIFQGDALSPQWFCLALNILSKIGMEFGLDKCKIQKNSKEDLPGIELEDGRLLKTLDEGETYKYLGIMQKRQQEHKKVKVQLTQAFQERLRSIVKTKLSGKNTTQAINAYAVPVLTYSFGIIKWSNTELEQLQRKMRTIQRRAGQLHPATAIERQTLPREEGGRGQADLKDLHDKQIQSMRQYFQLKSPRSPLIQAIIQADANYTPLNLCSTEERVLETANEQKLRTWAGKPLHGRHYNDLQQPHVDKKASNSWLAKGTLQPETEGFMLAIQDQVIATRNNQKFIQRKDIESDKCRHCHAASETIQHVMAGCKILAQSDYKHRHDQVAKIVHQKLAANAGFLTEKCPYYKYEPETVHENETHKLYWDRAIITDKTVPHNRPDITLVDKSNKTTYLIDIAVPNTNNIQTTYTTKITKYQDLRHEVRDIWGMEKILIIPLVISATGIVPKTLATNLEILNIDPNTYIEIQKATILNTCHIVRKFLDMAH

SEQ ID NO: 22374 - protein, 959 aa, Dysdera silvatica
MEEGFQCALAEYEGSDAATRPRIPRQPASWKLCKATKILNEHTLPLHLQNHNSLQEIHTAIYCAAVAASRANGYEVRNEGRSNRGNKAQPPWQVRLQKRIEELRSSIGRITQYMQGNRGKKLVRKVKMALKRNRIHTRHEEPNKHISEYLDTLKQKLGVYARRLRRYKDYTNKKQQNMQFQANQKAFYRKLRETPANKDKYEAPKPAEIETFWKTLWSNEVQHKSAPWIQQEMEATRGIEEMEYTGITIEELQQVIQRTHNWKAPGIDGIHNFWYKKFTSAHGPLAKELTAIIEDPSKMPEFLCKGITYLLPKDQDTSNPAKYRPITCLNTLYKILTGCISEKISRHSESNNLMTEEQKGCQKGTLGCKEQLTIDSVILEQARKQKRKLNTAYIDYKKAFDSVPHSWLLEILSIYKVHPSIIRFLQSSMKQWRTRLQLNTPDSKIETAEIPIRRGIFQGDALSPQWFCLALNPLSRMLNTSKYGYMLKKDKRNLHKVSHLMYVDDIKLYAPTITQLRQLISITETFSKDIGMEFGLDKCKIQKNSKEDLPGIELEDGRLLKTLDEGETYKYLGIMQKRQQEHKKVKVQLTQAFQERLRSIVKTKLSGKNTTQAINAYAVPVLTYSFGIIKWSNTELEQLQRKMRTIQRRAGQLHPATAIERQTLPREEGGRGQADLKDLHDKQIQSMRQYFQLKSPRSPLIQAIIQADANYTPLNLCSTEERVLETANEQKLRTWAGKPLHGRHYNDLQQPHVDKKASNSWLAKGTLQPETEGFMLAIQDQVIATRNNQKFIQRKDIESDKCRHCHAAANAGFLTEKCPYYKYEPETVHENETHKLYWDRAIITDKTVPHNRPDITLVDKSNKTTYLIDIAVPNTNNIQTTYTTKITKYQDLRHEVRDIWGMEKILIIPLVISATGIVPKTLATNLEILNIDPNTYIEIQKATILNTCHIVRKFLDMAH

SEQ ID NO: 22375 - protein, 927 aa, Dysdera silvatica
MLQLMINSLVTLYHPLGKTFWVSRLKTSPQIRFTPPPNQVPASWKLCKATKILNEHTLPLHLQKHNSLQEIHTAIYCAAVAASRANGYEVRNEGRSNRGNKAQPPWQVRLQKRIEELRSSIGRITQYMQGNRGKKLVRKVKMALKRNRIHTRHEEPNKHISEYLDTLKQKLGVYARRLRRYKDYTNKKQQNMQFQANQKAFYRKLRETPANKDKYEAPKPAEIETFWKTLWSNEVQHKSAPWIQQEMEATRGIEEMEYTGITIEELQQVIQRTHNWKAPGIDGIHNFWYKKFTSAHGPLAKELTAIIEDPSKMPEFLCKGITYLLPKDQDTSNPAKYRPITCLNTLYKILTGCISEKISRHSESNNLMTEEQKGCQKGTLGCKEQLTIDSVILEQARKQKRKLNTAYIDYKKAFDSVPHSWLLEILSIYKVHPSIIRFLQSSMKQWRTRLQLNTPDSKIETAEIPIRRGIFQGDALSPQWFCLALNPLSRMLKKDKRNLHKVSHLMYVDDIKLYAPTITQLRQLISITETFSKDIGMEFGLDKCKIQKNSKEDLPGIELEDGRLLKTLDEGETYKYLGIMQKRQQEHKKVKVQLTQAFQERLRSIVKTKLSGKNTTQAINAYAVPVLTYSFGIIKWSNTELEQLQRKMRTIQRRAGQLHPATAIERQTLPREEGGRGQADLKDLHDKQIQSMRQYFQLKNQGETEGFMLAIQDQVIATRNNQKFIQRKDIESDKCRHCHAASETIQHVMAGCKILAQSDYKHRHDQVAKIVHQKLAANAGFLTEKCPYYKYEPETVHENETHKLYWDRAIITDKTVPHNRPDITLVDKSNKTTYLIDIAVPNTNNIQTTYTTKITKYQDLRHEVRDIWGMEKILIIPLVISATGIVPKTLATNLEILNIDPNTYIEIQKATILNTCHIVRKFLDMAH

SEQ ID NO: 22376 - protein, 1185 aa, Dysdera silvatica
MNHNENMNGASVVSLLNQNRVRVLSRGASSKNMQQSLLGGVGGCSGASNCTATRTNTAQSALQPSIGATTRAERPRQRMSWTIDMNTYIMRTYYTITKLETDMTNYRPTLHAKFAQQYPHLDISIERITTQRRNIITRNLLAEPILQRLRDEVANDLANTSTSVANPEAPASSAREPLQPSIEEEERRDVEKMEEGFQCALAEYEGSDAATRPRIPRQPASWKLCKATKILNEHTLPLHLQNHNSLQEIHTAIYCAAVAASRANGYEVRNEGRSNRGNKAQPPWQVRLEKRIEELRSSIGRITQYMQGNRSKKLVRKVKMALKRNRIHTRHEEPNKHISEYLDTLKQKLGVYARRLRRYKDYTNRKQQNMQFQANQKAFYRKLRETPANKDKYEAPKPAEIETFWKTLWSNEVQHKSAPWIQQEMEATRGIEEMEYTGITIEELQQVIQRTHNWKAPGIDGIHNFWYKKFTSAHGPLAKELTAIIEDPSKMPEFLCKGITYLLPKDQDTSNPAKYRPITCLNTLYKILTGCISEKISRHSESNNLMTEEQKGCQKGTLGCKEQLTIDSVILEQARKQKRKLNTAYIDYKKAFDSVPHSWLLEILSIYKVHPSIIRFLQSSMKQWRTRLQLNTPDSKIETAEIPIRRGIFQGDALSPQWFCLALNPLSRMLNTSKYGYMLKKDKRNLHKVSHLMYVDDIKLYAPTITQLRQLISITETFSKDIGMEFGLDKCKIQKNSKEDLPGIELEDGRLLKTLDEGETYKYLGIMQKRQQEHKKVKVQLTQAFQERLRSIVKTKLSGKNTTQAINAYAVPVLTYSFGIIKWSNTELEQLQRKMRTIQRRAGQLHPATAIERQTLPREEGGTGQAKLLKTYDKQIQSMRQYFQLKSPRSPLIQAIIQADANYTPLNLCSTEERVLETANEQKLRTWAGKPLHGRHYNDLQQPHVDKKASNSWLAKGTLQPETEGFMLAIQDQVIATRNNQKFIQRKDIESDKCRHCHAASETIQHVMAGCKILAQSDYKHRHDQAKIVHQKLAANAGFLTEKCLYYKYEPETVHENETHKLYWDRAIITGKAVPHNRPDITLVDKSNKTTYLIDIAVPNTNNIQTTYTTKITKYQDLRHEVRDIWGMEKIFIIPLVISATGIVPKTLATNLGILNIDPNTYIEIQKATILNTCHIVRKFLDMAH

SEQ ID NO: 22377 - protein, 1179 aa, Dysdera silvatica
MNHNENMNGASVVSLLNQNRVRTLSRGASSKNMQQSLLGGVGGCSGASNCTATRTNTAQSALQPSIGATTRAERPRQRMSWTIDMNTYIMRTYYTITKLETDMTNYRPTLHAKFAQQYPHLDISIERITTQRRNIITRNLLAEPILQRLRDEVANDLANTSTSVANPEAPASSAREPLQPSIEEEERRDVEKMEEGFQCALAEYEGSDAATRPRIPRQPASWKLCAATKILNEHTLPLHLQNHNSLHEIHTAIYCAAIAASRANGYEVRNEGRNNRGNKAQPPWQVRLEKRIKELRSSIGRITQYMQGNRGKKLVRKVKMALKRNRIHTRHEEPNKHISEYLDTLKQKLGVYARRLRRYKDCTNKKQQNMQFQANQKAFYRKLRETPANKDKYEAPKPAEIETFWKTLWSNEVQHKSAPWIQQEMEATRGIEEMEYTGITIEELQQVIQRTHNWKAPGIDGIHNFWYKKFTSAHGPLAKELTAIIEDPSKMPEFLCKGITYLLPKDQDTSNPAKYRPITCLNTLYKILTGCISEKISRHSESNNLMAEEQKGCQKGTLGCKEQLTIDSVILEQARKQKRKLNTAYIDYKKAFDSVPHSWLLEILSIYKVHPSIIRFLQSSMKQWRTRLQLNTPDSKIETAEIPIRRGIFQGDALSPQWFCLALNPLSRMLNASKYGYMLKKDKRNLHKVSHLMYNPTITQLRQLISITETFSKDIGMEFGLDKCKIQKNSKEDLPGIELEDGRLLKTLDEGETYKYLGIMQKRQQEHKKVKVQLTQAFQERLRSIVKTKLSGKNTTQAINAYAVPVLTYSFGIIKWSNTELEQLQRKMRTIQRRAGQLHPATAIERQTLPREEGGRGQADLKDLHDKQIQSMRQYFQLKSPRSPLIQAIIQADANYTPLNLCSTEERVLETANEQKLRTWAGKPLHGRHYNDLQQPHVDKKASNSWLAKGTLQPETEGFMLAIQDQVIATRNNQKFIQRKDIESDKCRHCHAASETIQHVMAGCKILAQSDYKHRHDQVAKIVHQKLAANAGFLTEKCPYYKYEPETVHENETHKLYWDRAIITDKTVPHNRPDITLVDKSNKTTYLIDIAVPNTNNIQTTYTTKITKYQDLRHEVRDIWGMEKILIIPLVISATGIVPKTLATNLEILNIDPNTYIEIQKATILNTCHIVRKFLDMAH

SEQ ID NO: 22378 - protein, 1159 aa, Dysdera silvatica
MNHNENMNGASVVALLNQNRVRTLSRGASSKNMQQSLLGGVGGCSGASNCTATRTNTAQSALQPSIGATTRAERPRQRMSWTIDMNTYIMRTYYTITKLETDMTNYRPTLHAKFAQQYPHLDISIERITTQRRNIITRNLLAEPILQRLRDEVANDLANTSTSVANPEAPASSAREPLQPSIEEEERRDVEKMEEGFQCALAEYEGSDAATRPRIPRQPASWKLCKATKILNEHTLPLHLQNHNSLQEIHTAIYCAAVAASRANGYEVRNEGRSNRGNKAQPPWQVRLEKRIEELRSSIGRITQYMQGNRGKKLVRKVKMALKRNRIHTRHEEPNKHISEYLDTLKQKLGVYARRLRRYKDYTNKKQQNMQFQANQKAFYRKLRETPANKDKYEAPKPAEIETFWKTLWSNEVQHKSAPWIQQEMEATRGIEEMEYTGITIEELQQVIQRTHNWKAPGIDGIHNFWYKKFTSAHGPLAKELTAIIEDPSKMPEFLCKGITYLLPKDQDTSNPAKYRPITCLNTLYKILTGCISEKISRHSESNNLMTEEQKGCQKGTLGCKEQLTIDSVILEQARKQKRKLNTAYIDYKKAFDSVPHSWLLEILSIYKVHPSIIRFLQSSMKQWRTRLQLNTPDSKIETAEIPIRRGIFQGDALSPQWFCLALNPLSRMLNTSKYGYMLKKDKRNLHKVSHLMYVDDIKLYAPTITQLRQLISITETFSKDIGMEFGLDKCKIQKNSKEDLPGIELEDGRLLKTLDEGETYKYLGIMQKRQQEHKKVKVQLTQAFQERLRSIVKTKLSGKNTTQAINAYAVPVLTYSFGIIKWSNTELEQLQRKMRTIQRRAGQLHPATAIERQTLPREEGGRGQADLKDLHDKQIQSMRQYFQLKSPRSPLIQAIIQADANYTPLNLCSTEERVLETANEQKLRTWAGKPLHGRHYNDLQQPHVDKKASNSWLAKGTLQPETEGFMLAIQDQVIATRNNQKFIQRKDIESDKCRHCHAASETIQHVMAGCKILTEKCPYYKYEPETVHENETHKLYWDRAIITDKTVPHNRPDITLVDKSNKTTYLIDIAVPNTNNIQTTYTTKITKYQDLRHEVRDIWGMEKILIIPLVISATGIVPKTLATNLEILNIDPNTYIEIQKATILNTCHIVRKFLDMAH

SEQ ID NO: 22379 - protein, 1185 aa, Dysdera silvatica
MNHNENMNGASVVSLLNQNRVRTLSRGASSKNMQQSLLGGVGGCSGASNCTATRTNTAQSALQPSIGATTRAERPRQRMSWTIDMNTYIMRTYYTITKLETDMTNYRPTLHAKFAQQYPHLDISIERITTQRRNIITRNLLAEPILQRLRDEVANDLANTSTSVANPEAPASSAREPLQPSIEEEERRDVEKMEEGFQCALAEYEGSDAATRPRIPRQPASWKLCKATKILNEHTLPLHLQNHNSLQEIHTAIYCAAVAASRANGYEVRNEGRSNRGNKAQPPWQVRLQKRIEELRSSIGRITQYMQGNRGKKLVRKVKMALKRNRIHTRHEEPNKHISEYLDTLKQKLGVYARRLRRYKDYTNKKQQNMQFQANQKAFYRKLRETPANKDKYEAPKPAEIETFWKTLWSNEVQHKSAPWIQQEMEATRGIEEMEYTGITIEELQQVIQRTHNWKAPGIDGIHNFWYKKFTSAHGPLAKELTAIIEDPSKMPEFLCKGITYLLPKDQDTSNPAKYRPITCLNTLYKILTGCISEKISRHSESNNLMTEEQKGCQKGTLGCKEQLTIDSVILEQARKQKRKLNTAYIDYKKAFDSVPHSWLLEILSIYKVHPSIIRFLQSSMKQWRTRLQLNTPDSKIETAEIPIRRGIFQGDALSPQWFCLALNPLSRMLNTSKYGYMLKKDKRNLHKVSHLMYVDDIKLYAPTITQLRQLISITETFSKDIGMEFGLDKCKIQKNSKEDLPGIELEDGRLLKTLDEGETYKYLGIMQKRQQEHKKVKVQLTQAFQERLRSIVKTKLSGKNTTQAINAYAVPVLTYSFGIIKWSNTELEQLQRKMRTIQRRAGQLHPATAIERQTLPREGGREQADLKDLHDKQIQSMRQYFQLKSPRSPLIQAIIQADANYTPLNLCSTEERVLETANEQKLRTWAGKPLHGRHYNDLQQPHVDKKASNSWLAKGTLQPETEGFMLAIQDQVIATRNNQKFIQRKDIESDKCRHCHAASETIQHVMAGCKILAQSDYKHRHDQVAKIVHQKLAANAGFLTEKCPYYKYEPETVHENETHKLYWDRAIITDKTVPHNRPDITLVDKSNKTTYLIDIAVPNTNNIQTTYTTKITKYQDLRHEVRDIWGMEKIFIIPLVISATGIVPKTLATNLEILNIDPNTYIEIQKATILNTCHIVRKFLDMAH

SEQ ID NO: 22380 - protein, 1106 aa, Dysdera silvatica
MSWTIDMNTYIMRTYYTITKLETDMTNYRPTLHAKFAQQYPHLDISIERITTQRRNIITRNLLAEPILQRLRDEVANDLANTSTSVANPEAPASSAREPLQPSIEEEERRDVEKMEEGFQCALAEYEGSDAATRPRIPRQPASWKLCKATKILNEHTLPLHLQNHNSLQEIHTAIYCAAVAASRANGYEVRNEGRSNRGNKAQPPWQVRLQKRIEELRSSIGRITQYMQGNRSKKLVRKVKMALKRNRIHTRHEEPNKHISEYLDTLKQKLGVYARRLRRYKDYTNKKQQNMQFQANQKAFYRKLRETPANKDKYEAPKPAEIETFWKTLWSNEVQHKSAPWIQQEMEATRGIEEMEYTGITIEELQQVIQRTHNWKAPGIDGIHNFWYKKFTSAHGPLAKELTAIIEDPSKMPEFLCKGITYLLPKDQDTSNPAKYRPITCLNTLYKILTGCISEKISRHSESNNLMTEEQKGCQKRTLGCKEQLTIDSVILEQARKQKRKLNTAYIDYKKAFDSVPHSWLLEILSIYKVHPSIIRFLQSSMKQWRTRLQLNTPDSKIETAEIPIRRGIFQGDALSPQWFCLALNPLSRMLNTSKYGYMLKKDKRNLHKVSHLMYVDDIKLYAPTITQLRQLISITETFSKDLGMEFGLDKRRIQKNSKEDLPGIEDGRLLKTLDEGETYKYLGIMQKRQQEHKKVKVQLTQAFQERLRSIVKTKLSGKNITQAINAYAVPVLTYSFRIIKWTNTELEQLQRKMRTIQRRAGQLHPATAIERQTLPREEGGRGQADLKDLHDKQIQSMRQYFQLKSPRSPLIQAIIQADANYTPLNLCSTEERVLETANEQKLRTWAGKPLHGRHYNDLQQPHVDKKASNSWLAKGTLQPETEGFMLAIQDQVIATRNNQKFIQRKDIESDKCRHCHAASETIQHVMAGCKILAQSDYKHRHDQVAKIVHQKLAANAGFLTEKCPYYKYEPETVHENETHKLYWDRAIITDKTVPHNRPDITLVDKSNKTTYLIDIAVPNTNNIQTTYTTKITKYQDLRHEVRDIWGMEKILIIPLVISATGIVPKTLATNLEILNIDPNTYIEIQKATILNTCHIVRKFLDMAH

SEQ ID NO: 22381 - protein, 1185 aa, Dysdera silvatica
MNHNENMNGASVVSLLNQNRVRVLSRGASSKNMQQSLLGGVGGCSGASNCTATRTNTAQSALQPSIGATTRAERPRQRMSWTIDMNTYIMRTYYTITKLETDMTNYRPTLHAKFAQQYPHLDISIERITTQRRNIITRNLLAEPILQRLRDEVANDLANTSTSVANPEAPASSAREPLQPSIEEEERRDVEKMEEGFQCALAEYEGSDAATRPRIPRQPASWKLCAATKILNEHTLPLHLQNHNSLHEIHTAIYCAAIAASRANGYEVRNEGRNNRGNKAQPPWQVRLEKRIEELRSSIGRITQYMQGNRGKKLVRKVKMALKRNRIHTRHEEPNKHISEYLDTLKQKLGVYARRLRRYKDCTNKKQQNMQFQANQKAFYRKLRETPANKDKYEAPKPAEIETFWKTLWSNEVQHKSAPWIQQEMEATRGIEEMEYTGITIEELQQVIQRTHNWKAPGIDGIHNFWYKKFTSAHGPLAKELTAIIEDPSKMPEFLCKGITYLLPKDQDTSNPAKYRPITCLNTLYKILTGCISEKISRHSESNNLMTEEQKGCQKGTLGCKEQLTIDSVILEQARKQKRKLNTAYIDYKKAFDSVPHSWLLEILSIYKVHPSIIRFLQSSMKQWRTRLQLNTPDSKIETAEIPIRRGIFQGDALSPQWFCLALNPLSRMLNTSKYGYMLKKDKRNLHKVSHLMYVDDIKLYAPTITQLRQLISITETFSKDIGMEFGLDKCKIQKNSKDLPGIELEDGRLLKTLDEGETYKYLGIMQKRQQEHKKVKVQLTQAFQERLRSIVKTKLSGKNTTQAINAYAVPVLTYSFGIIKWTNTELEQLQRKMRTIQRRAGQLHPATAIERQTLPREEGGRGQADLKDLHDKQIQSMRQYFQLKSPRSPLIQAITQADANYTPLNLCSTEERVLETANEQKLRTWAGKPLHGRHYNDLQQPHVDKKASNSWLAKGTLQPETEGFMLAIQDQVIATRNNQKFIQRKDIESDKCRHCHAASETIQHVMAGCKILAQSDYKHRHDQVAKIVHQKLAANAGFLTEKCPYYKYEPETVHENETHKLYWDRAIITDKTVPHNRPDITLVDKSNKTTYLIDIAVPNTNNIQTTYTTKITKYQDLRHEVRDIWGMEKILIIPLVISATGIVPKTLATNLEILNIDPNTYIEIQKATILNTCHIVRKFLDMAH

SEQ ID NO: 22382 - protein, 901 aa, Dysdera silvatica
MEEGFQCALAEYEGSDAATRPRIPRQPASWKLCKATKILNEHTLPLHLQNHNSLQEIHTAIYCAAIAASRANGYEVRNEGRNNRGNKAQPPWQVRLEKRIEELRRSIGRITQYMQGNRGKKLVRKVKMALKRNRMHTRHEEPNKHISEYLDTLKQKLGVYARRLRRYKDCTNKKQQNMQFQANQKAFYRKLQETPANKDKYEAPKPAVIETFWKTLWSNEVQHKSAPWIQQEMEATRGIEEMEYTGITIEELQQVIQRTHNWKAPGIDGIHNFWYKKFTSAHGPLAKELTAIIEDPSKMPEFLCKGITYLLPKDQDTSDPAKYRPITCLNTLYNILTGCISEKISRHSESNNLMAEEQKGCQKGTLGCKEQLTIDSVILEQARKQKRKLNTAYIDYKKAFDSVPHSWLLEILSIYKVHPSIIRFLQSSMKQWRTRLQLNTPDSKIKTAEIPIRRGIFQGDALSPQWFCLALNPLSRMLNASKYGYMLKKDKRNLHKVSHLMYVDDIKLYAPTITQLRQLISITETFSKDIGMEFGLDKCKIEKNSKEDLPGIELEDGRLLKTWDEGETYKYLGIMQKRQQEHKKVKVQLTQAFQERLRSIVKTKLSGKNTTQAINAYAVPVLTYSFGIIKWSNTELEQLQRKMRTIQRRAGQLHPSTAIERQTLPREEGGRGQADLKDLHDKQIQSMRQYFQLKSPRSPLIQAIIQADANYTPLNLCSTEERVLETANEQKLRTWAGKPLHGRHYNDLQQPHVDKKASNSWLAKGTLQPETEGFMLAIQDQVIATRNNQKFIQRKDIESDKCRHCHAASETIQHVMAGCKILAQSDYKHRHDQVAKIVHQKLAANAGFLTEKCPYYKYEPETVHENETHKLYWDRAIITDKTVPHNRPDITLVDKSIRPRT

SEQ ID NO: 22383 - protein, 896 aa, Dysdera silvatica
MEESFQCALAEYEGSDAATRPRIPRQPASWKLCRATKILNEHTLPLHLQNHNSLQEIHTAIYCEAVAASRANGYEVRNEGRSNRGNKAQPPWQVRLQKRIEELRRSIGRITQYMQGNRGKKLVRKVKMALKRNRTHTRHEEPNKHISEYLDTLKQKLGVYARRLRRYKDCTNKKQQNMQFQANQKAFYRKLQETPANKDKYEAPKPAVIETFWKTLWSNEVQHKSAPWIQQEMEATRGIEEMEYTGITIEELQQVIQRTHNWKASGIDGIHNFWYKKFTSIHGPLAKELTAIIEDPSKMPEFLCKGITYLLPKDQDTSNPAKYRPITCLNTLYKILTGCISEKISRHSESNNLMTEEQKGCQKGTLGCKEQLTIDSVILEQARKQKRKLNTAYIDYKKAFDSVPHSWLLEILSIYKVHPSIIRFLQSSMKQWRTRLQLNTPDSKIETAEIPIRRGIFQGDALSPQWFCLALNPLSRMLNASKYGYMLKKDKRNLRKVSHLMYVDDIKLYAPTITQLRQLISITETFSKDIGMEFGLDKCKIQKNSKEDLPGIELEDGRLLKILDEGETYKYLGIMQKRQQDHKKVKVQLTQAFQERLRSIVKTKLSGKNTTQAINAYAVPVLTYSFGIIKWTNTELEQLQRKMRTIQRRAGQLHPATAIERQTLPREEGGRGQTDLKDLDDKQIQSMSQYFQLKSPRSPLIQAIIQADANYTPLNLCSTEKRVLETANEQKLRTWAGKPLHGRHYNDLQQPHVDKKASNSWLAKGTLQPETEGFMLAIQDQMIATRNNQKFIQRKDIESDKCRHCHAAAETIQHVMTGCKILAQSDYKHRHDQVAKVVHQKLAANAGFLTEKCPYYKYEPETVHENKTHKLYWDRAIITDKTSPFYTTYVFIPDNL

SEQ ID NO: 22384 - protein, 1136 aa, Dysdera silvatica
MNHNENMNGASVVSLLNQNRVRTLSRGASSKNMQQSLLGGVGGCSGASNCTATRTNTAQSALQPSIGATTRAERPRQRMSWTIDMNTYIMRTYYTITKLETDMTNYRPTLHAKFAQQYPHLDISIERITTQRRNIITRNLLAEPILQRLRDEVANDLANTSTSVANPEAPAIGAREPLQTSIEQEERRDVEKMEEGFQCALAEYEGSDAATRPRIPRQPASWKLCKATKILNEHTLPLHLQNHNSLQEIHTAIYCAAVAASRANGYEVRNEGRSNRGNKAQPPWQVRLEKRIEELRSSIGRITQYMQGNRSKKLVRKVKMALKRNRIHTRHEEPNKHISEYLDTLKQKLSVYARRLRRYKDYTNRKQQNKQFQTNQKAIYRKLRETPANQDKYEAPKPAEIETFWKTLWSNEVQHKSAPWIQQEMEATRGIEEMEYTGITIEELQQVIQRTHNWKAPGIDGIHNFWYKKFTSAHGPLATELTAIIEDPSTMPQFLCKGITYLLPKDQDTSDPAKYRPITCLTTLYKILTGCISEKISRHSESNNLMAEEQKGCQKGTLGCKEQLTIDSVILEQARKQKRKLNTAYIDYKKAFDSVPHSWLLEILSIYKVHPSIIRFLRSSMKQWRIQVQLNRPDSKIESAEIPIRRGIFQGDALSPQWFCLALNPLSRMLNASKYGYMLKKDKRNLHKVSHLMYVDDIKLYAPTITQLRQLISITETFSKDIGMEFGLDKCKIQKNSKEDLPGIELEDERLLKTLDEGKTHKYVRVMQTWQQEHKKVKAQLTQAFQERLRSIVKTKLSGKNTTQAINAYAVPVLTYSFGIIKWSNTELEQLQRKMRTIQRRAGQLHPATAIERQTLPREEGGRGQADLKDLHDKQIQSMREYFKLKSPRSTLIQAIIQADANYTSLNLCSTEERVLETANEQKLRTWAGKPLHGRHYNDLQQPHVDKKASNSWLAKGTLQPETEGFMLAIQDQVIATRNNQKFIQRKDIESDKCRHCHAASETIQHVMAGCKILVRSDYKHRHDQVAKIVHQKLAANAGFLTEKCPYYKYEPETVHENQTHKLYWERAIITGKTVPHNRPDITLVDKSSKTTYLIDIAVPTTNPSRTTYTTKLTKYQDLRHEVRDIWVWKRSSSSR

SEQ ID NO: 22385 - protein, 931 aa, Dysdera silvatica
MQFQANQKAFYRKLRETPANKDKYEAPKPAEIETFWKTLWSNEVQHKSAPWIQQEMEATRGIEEMEYTGITIEELQQVIQRTHNWKAPGIDGIHNFWYKKFTSAHGPLAKELTAIIEDPSKMPEFLCKGITYLLPKDQDTSNPAKYRPITCLNTLYKILTGCISEKISRHSESNNLMTEEQKGCQKGTLGCKEQLTIDSVILEQARKQKRKLNTAYIDYKKAFDSVPHSWLLEILSIYKVHPSIIRFLQSSMKQWRTRLQLNTPDSKIETAEIPIRRGIFQGDALSPQWFCLALNPLSRMLNTSKYGYMLKKDKRNLHKVSHLMYVDDIKLYAPTITQLRQLISITETFSKDIGMEFGLDKCKIQKNSKEDLPGIELEDGRLLKTLDEGETYKYLGIMQKRQQEHKKVKVQLTQAFQERLRSIVKTKLSGKNTTQAINAYAVPVLTYSFGIIKWSNTELEQLQRKMRTIQRRAGQLHPATAIERQTLPREEGGRGQADLKDLHDKQIQSMRQYFQLKSPRSPLIQAIIQADANYTPLNLCSTEERVLETANEQKLRTWAGKPLHGRHYNDLQQPHVDKKASNSWLAKGTLQPETEGFMLAIQDQVIATRNNQKFIQRKDIESDKCRHCHAASETIQHVMAGCKILAQSDYKHRHDQVAKIVHQKLAANAGFLTEKCPYYKYEPETVHENETHKLYWDRAIITDKTVPHNRPDITQPLQPSNGQIYILTMIDRFSRWPEAIPMPNMQAQTVCNANFKAWLSRFGCSSLIMTDQGSQIRSALYQEFVNMLGTNRITTIACHRMFTGIIERFHRQLKSPTKAHENIRWTEILPIVLLGILTAVKDDINASCAELVYGTTLKLPCDMLDTSVILPCDEIFVNNLRSSMSQVNPFATSKYGNTKYYVNPSLETCSLVFLRIDKIKLPLAQLYTGPK

SEQ ID NO: 22386 - protein, 1093 aa, Dysdera silvatica
MNHNENMNGASVVSLLNQNRVRTLSRGASSKNMQQSLLGGVGGCSGASNCTATRTNTAQSALQPSIGATTRAERPRQRMSWTIDMNTYIMRTYYTITKLETDMTNYRPTLHAKFAQQYPHLDISIERITTQRRNIITRNLLAEPILQRLRDEVANDLANTSTSVANPEAPASSAREPLQPSIEEEERRDVEKMEEGFQCALAEYEGSDAATRPRIPRQPASWKLCKATKILNEHTLPLHLQNHNSLQEIHTAIYCAAVAASRANGYEVRNEGRSNRGNKAQPPWQVRLEKRIEELRSSIGRITQYMQGNRGKKLVRKVKMALKRNRIHTRHEEPNKHISEYLDTLKQKLGVYARRLRRYKDYTNKKQQNMQFQANQKAFYRKLRETPANKDKYEAPKPAEIETFWKTLWSNEVQHKSAPWIQQEMEATRGIEEMEYTGITIEELQQVIQRTHNWKAPGIDGIHNFWYKKFTSAHGPLAKELTAIIEDPSKMPEFLCKGITYLLPKDQDTSNPAKYRPITCLNTLYKILTGCISEKISRHSESNNLMTEEQKGCQKGTLGCKEQLTIDSVILEQARKQKRKLNTAYIDYKKAFDSVPHSWLLEILSIYKVHPSIIRFLQSSMKQWRTRLQLNTPDSKIESAEIPIRRGIFQGDALSPQWFCLALNPLSRMLNTSKYGYVLNKDKRNLHKVYHLMYVDDIKLYAPTITQLRQLISITETFSKDIGMEFGLDKCKIQKNSKEDLPGIELEDGRLLKTLDEGETYKYLGIMQKRQQEHKKVKVQLTQAFQERLRSIVKTKLSGKNTTQAINAYAVPVLTYSFGIIKWSNTELEQLQRKMRTIQRRAGQLHPATAIERQTLPREEGGRGQADLKDLHDKQIQSMRQYFQLKSPRSPLIQAITQADANYTPLNLCSTEERVLETANEQKLRTWAGKPLHGRHYNDLQQPHVDKKASNAWLAKGTLQPETEGFMLAIQDQVIATRNNQKFIQRKDIESDKCRHCHAASETIQHVTAGCKILAQSDYKHRHDQVAKIVHQKLAANAGFLTEKCPYYKYEPETVHENETHKLYWDRAIITDKTVPHNRPDMTLVNKSSKRRT

SEQ ID NO: 22387 - protein, 938 aa, Dysdera silvatica
MHFVYAEYFKEPRVWNRVESLYIYIFIYVYIYLDVEKMEEGFQCALAEYEGSDAAARPRIPRQPEYWKLCAATKILNEHTLPLHLQKHNSLQEIHTAIYCAAVAASRANGYEVRNEGRSNRGNKAQPPWQVRLEKRIEELRSSIGRITQYMQGNRSKKLVRKVKMALKRNRIHTRHEEPNKHISEYLDTLKQKLGVYARRLRRYKDYTNRKQQNMQFQANQKAFYRKLRETPANKDKYEAPKPAVIETFWKTLWSNEVQHKSAPWIQQEMEATRGIEEMEYTGITIEELQQVIQRTHNWKAPGIDGIHNFWYKKFTSAHGPLAKELTAIIEDPSKMPEFLCKGITYLLPKDQDTSNPAKYRPITCLNTLYKILTGCISEKISRHSESNNLMAEEQKGCQKGTLGCKEQLTIDSVILEQARKQKRKLNTAYIDYKKAFDSVPHSWLLEILSIYKVHPSIIRFLQSSMKQWRTRLQLNTPDSKIESAEIPIRRGIFQGDALSPQWFCLALNPLSRMLNASKYGYMLKKDKRNLHKVSHLMYVDDIKLYAPTITQLRQLISITETFSKDIGMEFGLDKCKIQKNSKEDLPGIELEDGRLLKTLDEGETYKYLGIMQKRQQEHKKVKVQLTQAFQERLRSIVKTKLSGKNTTQAINAYAVPVLTYSFGIIKWTNTELEQLQRKMRTIQRRAGQLHPATAIERQTLPREEGGRGQADLKDLHDKQIQSMRQYFQLKSPRSPLIQAIIQADANYTPLNLCSTEERVLETANEQKLRTWAGKPLHGRHYNDLQQPHVDKKASNSWLAKGTLQPETEGFMLAIQDQVIATRNNQKFIQRKDIESDKCRHCHAASETIQHVMAGCKILAQSDYKHRHDQVAKIVHQKLAANAGFLTEKCPYYKYEPETVHENETHKLYWDRAIITDKTVPHNRPDITLVDKSNKTTY

SEQ ID NO: 22388 - protein, 1189 aa, Dysdera silvatica
MNYNENMNGESVVALLNQNRIRTLSRGVCSKNMQQSLLGGAGSCSGAYNCTATRTNRAHSALQPSIGATTRAERARQRMSWTIDMNTYIMRTYYTITKLETDMTNYRPTLHAKFAQQYPHLDISIERITTQRRNIITRNLLAEPILQRLRDEVANDLVNTPTSVANPEPSVSSPREPLQPNIEEEEEEERRDVEKMEEGFQCALAEYEGSNAATRPRIPRQPASWKLCKATKILNEHTLPLHLQKHNSLQEIHTAIYCAAVAASRVNGYEVRNEDRNNRGSKTQPPWQVRLEKRIEELRSSIGRITQYMQGNRGKKLVRKVKMALKRNRIHTRHEEPNKHISEYLDTLKQKLGVYARRLRRYKDCTNRKQQNMQFQANQKAFYRKLQETSASQDKYEAPKPAVIETFWKTLWSNEVQHKSAPWIQQEMEATRGIEEMEYTGITIEELQQVIQRTHNWKAPGIDGIHNFWYKKFTSAHGPLAKELTAIIEDPSKMPEFLCKGITYLLPKDQDTSDPAKYRPITCLNTLYNILTGCISEKISRHSESNNLMAEEQKGCQKGTLGCKEQLTIDSVILEQARKQKRKLNTAYIDYKKAFDSVPHSWLLEILSIYKVHPSIIRFLQSSMKQWRTRLQLNTPDSKIETAEIPIRRGIFQGDALSPQWFCLALNPLSRMLNASKYGYMLKKDKRNLHKVSHLMYVDDIKLYAPTITQLRQLISITETFSKDIGMEFGLDKCKIQKNSKEDLPGIELEDGRLLKTLDEGETYKYLGIMQKRQQEHKKVKVQLTQAFQERLRSIVKTKLSGKNTTQAINAYAVPVLTYSFGIIKWSNTELEQLQRKMRTIQRRAGQLHPATAIERQTLPREEGGRGQADLKDLHDKQIQSMRQYFQLKSPRSPLIQAITQADANYTPLNLCSTEERVLETANEQKLRTWAGKPLHGRHYNDLQQPHVDKKASNSWLAKGTLQPETEGFMLAIQDQVIATRNNQKFIQRKDIESDKCRHCHAASETIQHVTAGCKILAQSDYKHRHDQVAKIVHQKLAANAGFLTEKCPYYKYEPETVHENETHKLYWDRAIITGKTVPHNRPDITLVDKSSKTTYLIDIAVPTTNPSRTTYTTKITKYPALGHEVRDIWGMEKILIIPLVISATGIVPKTLVTNLEILNIDPNTYIEIQKATILNTCHIVRKFLDMAH

SEQ ID NO: 22389 - protein, 910 aa, Dysdera silvatica
MQGNRGKKLVRKVKMALKRNRMHTRHEEPNKHISEYLDTLKQKLGVYARRLRRYKDCTNKKQQNMQFQANQKAFYRKLQETPANKDKYEAPKPAVIETFWKTLWSNEVQHKSAPWIQQEMEATRGIEEMEYTGITIEELQQVIQRTHNWKAPGIDGIHNFWYKKFTSAHGPLAKELTAIIEDPSKMPEFLCKGITYLLPKDQDTSNPAKYRPITCLNTLYKILTGCISEKISRHSESNNLMTEEQKGCQKGTLGCKEQLTIDSVILEQARKQKRKLNTAYIDYKKAFDSVPHSWLLEILSIYKVHPSIIRFLQSSMKQWRTRLQLNTPDSKIKTAEIPIRRGIFQGDALSPQWFCLALNPLSRMLNTSKYGYMLKKDKRNLHKVSHLMYVDDIKLYAPTITQLRQLISITETFSKDIGMEFGLDKCKIQKNSKEDLPGIELEDGRLLKTLDEGETYKYLGIMQKRQQEHKKVKVQLTQAFQERLRSIVKTKLSGKNTTQAINAYAVPVLTYSFGIIKWSNTELEQLQRKMRTIQRRAGQLHPATAIERQTLPREEGGRGQADLKDLHDKQIQSMRQYFQLKSPRSPLIQAIIQADANYTPLNLCSTEERVLETANEQKLRTWAGKPLHGRHYNDLQQPHVDKKASNSWLAKGTLQPETEGFMLAIQDQVIATRNNQKFIQRKDIESDKCRHCHAASETIQHVTAGCKILAQSDYKHRHDQVAKIVHQKLAANAGFLTEKCPYYKYEPETVHENETHKLYWDRAIITDKTVPHNRPDITLVDKSNKTTYLIDIAVPNTNNIQTTYTTKITKYQDLRHEVRDIWGMEKIFIIPLVISATGIVPKTLATNLEILNIDPNTYIEIQKATILNTCHIVRKFLNLALYPVPKACFRQEWGFQCKNWTTGTRRDIGW

SEQ ID NO: 22390 - protein, 817 aa, Alatina alata
MVGLKRPTRPGINFNLSDFKAREVDDFVRKSRAKSAPGRDGVSYKVYKNCDKLRHKLFLLLRKLWQEGDLVESWCSADGLYLPKEADSKHIGQFRPISLINVHGKIFFGIVAKRTIAFLQTNGYIDEKVQKAGIPGMPGCIEHAFSIWEAIQTAKREKLDLSVVWLDLANAYGSVPHELLLMAMNHFFIPLKVQNLMQKYYDRFRMRFTTKKFTTDWHRLEVGIAAGCTISVIWFTLVMEMLLRSADLTEERSLVNSPKKAFMDDVTLLTRDQGQMSSILARLEELISWARMKFKANKSRSLTLAKGKQKQVRFKISDEEIPTVKEEPVKSLGRWYAGTLSDRSRGIEVQKQAEEGLKAIDGIKLPGKYKIWMLQFGLYPRLAWPLQIYEVALSRVEIIEQKVNVCVRRWLGLPRMTNSAALYSRGGALELPLTAVTEIYKQGKIRTVMMLRESKDESIRFDPPQVNTARKWVAESEADNILAEMQHRDIVGSVQSDRAGLGMKSFKPFTAMNPVERRKAVCYAVKKKEDERRRLHLVQCAVQGQVTRWEENIIERKINWKDAWEWKTSRLSFLIRATYDVLPSPSNLARWKVVEDDKCRCGRKGTMKHILSGCQLALDRYTWRHNQVLKVLCEVLYQQLTKINSGDRPKKRIPAKSISFLRQGSQKAVEKKERLLNDERWNGYWRMAADLESYKDFFPIPTEKKPDIFYWCEEQKTVTLVELTVPHEDNVEAAAERKNERYQKLLEELEEVGWAAEHYPIEVGCRGYIGIRTRRWLLSIGLKQRETTAIVRKLQEVVEMASHWIWLKREDQMWIES

SEQ ID NO: 22391 - protein, 999 aa, Alatina alata
MKPKVLWPASKDKGKYRQLEEEVLRINKRTKGPTIEKLEKLADSIYEVGSKLFGTRQAGGTEKKVNNNIPFRRNRKLCALRKEKRNLKRLFKNAGPEEKEGLITLYEDLKTKSRAIQRSVRRASRRKIAKQTRERFLKQPYEFTKKLFTEAKSGSLECTKEELDEHIRATYSDARRRTPLPLMVGLKRPTRPGINFNLSDFKAREVDDFVRKSRAKSAPGRDGVSYKVYKNCDKLRHKLFLLLRKLWQEGDLVESWCSADGLYLPKEADSKHIGQFRPISLINVHGKIFFGIVAKRTIAFLQTYGYIDEKVQKAGIPGMPGCIEHAFSIWEAIQTAKREKLDLSVVWLDLANAYGSVPHELLLMAMNHFFIPLKVQNLMQKYYDRFRMRFTTKKFTTDWHRLEVGIAAGCTISVIWFTLVMEMLLRSADLTEERSLVNSPKKAFMDDVTLLTRDQGQMSSILARLEELISWARMKFKANKSRSLTLAKGKQKQVRFKISDEEIPTVKEEPVKSLGRWYAGTLSDRSRGIEVQKQAEEGLKAIDGIKLPGKYKIWMLQFGLYPRLAWPLQIYEVALSRVEIIEQKVNVCVRRWLGLPRMTNSAALYSRGGALELPLTAVTEIYKQGKIRTVMMLRESKDESIRFDPPQVNTARKWVAESEADNILAEMQHRDIVGSVQSDRAGLGMKPFKPFTAMNPVERRKAICYAVKKKEDERRRLHLVQCAVQGQVTRWEENIIERKINWKDAWEWKTSRLSFLIRATYDVLPSPSNLARWKVVEDDKCRCGRKGTMKHILSGCQLALDRYTWRHNQVLKVLCEVLYQQLTKINSGDRPKKRIPAKSISFLRQGSQKAVEKKERLLNDERWNGYWRMAADLKSYKDFFPIPTEKKPDIFSWCEEQKIVTLVELTVPHEDNVEAAAERKNERYQKLLEELEEVGWAAEHYPIEVGCRGYIGIRTRRWLLSIGLKQRETTAIVRKLQEVVEMASHWIWLKREDQMWIES

SEQ ID NO: 22392 - protein, 1725 aa, Pardosa pseudoannulata
MNPKDKTGTSSYASALTSSPVVNTSKRPPPKLTPLSQLSPSPVCRHTRAALAQRAAQQPASSDVLSSILPPVASSNSCATTSGSSLMTALNTMFTPTTASWPVTYSPLLNYSHAEKPITSSCPTPVVCPIATTCSISPSSPAAFYNSSYLGLNQFMRPFIPQVLSPIHDPFATSPVHKSPSREIGTQTDSSEDESNTSEHVPKTYPPSPLRFCRIESTIHFTFPRNSVLRCCEDGCNSAFAYSQWRQVYSHFMRHLKDVHNIESPQCARWCLRCGKSCLPNLLQHRCFDEIKYYDVSSDNLSAARYSCEECGHSCPSERALATHSHFSHPKSSSVHATDNESGRNTTASTSSNHLNAPSDSTTTEPVLNTNSTIEERASSPEKDISDTPPQSLTSSSPLPVLNSPSSDAHVNTAEIITEPAVSNDDTLHLAVSLSSSQGSIDSVCSSPLAAPHRNLSSSSSSSCDSASDPQIIPSGNNSITGDVDNVSPPRFSPSSSCPSTPSSMSSSPIQRNWRPNTAVENTSQHSSSDEFQPQRRPPLAIPANHATRNAPQVSRSAPTRSPTSSPPSTNESAVTFNCDTPGVVKRIGQSLHFVFPILSALVCPEIGCSASFAGNVWTSEKQSLKRHLRNVHRLGDLSDKRWCAICGDEVPVKISSHPCLNNVLYFRPATDGNYVGPYACRWCPFSASSATSISNHARKHKRDDLRERILNRNNITNSQGSSNTDQSITVTVSNSTGSQANTNVSRQITVSSDLQIVDNPVDTDLAPGSPNSSNSSADTNIDIPMSLDADLSDHNLESEQPPDSYLIDDPDAPSPSADYIIKFRDILSNNGTPDWRTFNTLLDEYITFVQEFVKLPSENRRHVRSPNDNANNPRFIQKLYKRNRRRAVRTILNDAAPSCPLSADELTPAFFPTEVPSPDLQLYNHPSPATDEVDLHPFSPEEVWRKLKSAENTSPGMDRLTYAHWKSADPEAKCLSLIFNICIKCQNIPDTWKTSKTIFIPKKSGGPSPSDWRPITLGSTISKLFSGCLARRFSSWLESFNILSPAQKGFLPFDGCFENNFVLQKRFQDARSSGNDLCLLSLDLSNAFGSVSHNAIIEALRSANAGDPFSNLILSMYSGSSTCLINKDGLSDPVSLHAGVKQGCPLSGLLFDMAIDPLLRALRSDCGSNILAYADDIMLVASSPGELQTFADKAASICLLLGLTINPKKCFSLHLGHNPTGCRPTTFSINGTPVTAMTDGEASDFLGKPIGYSIVEDPNNIDALCNAGEKILNSYLAPWQRIDAIKSFFFPSLHYSQRTFQENKTTWRAVDDRLRPLIKQTLYLPPIASNDYLYGDGQCSLFGIPVAADDSDIALVDGAFKLLTSPDPVIRDLAWEDVSSLVAIRSGGDNEPADIAAFLSGKVYANTSNPISSIWTKARMASSRLEVTWSIQPDRSVSITHNGAPILDRRKVFKLLRLSLRKGRARRLKSLKHQGKTASCFGLSKSSAHFFHNGDFIRFADWRFVHRARLGLVPLNAYNWDAPEAEKACRRCNAPKETLPHVLNHCKPLLSLCTKRHNIIVGRVKDAAKRRWKLVRENQTLAGSSLRPDLVLEKDGHALIIDVTIPFENGVDAFKEAREIKLAKYAELANSLRARYKSVSVEAIIVGSLGSWDRANDRVLARLCSRKYARLFRKLAVSDVIRTSRDMYIEHLTGTRQAPSSRNDRHAIAVANLITNARISQTTD

SEQ ID NO: 22393 - protein, 1624 aa, Pardosa pseudoannulata
MNSNSACSDFSPVYRRTRAAVAMRARQQPASADVLSHLLPPPESRPVANLTAGTSFMEAINALQTNTAYSQPMDSSLSYNHRNSPIYNSCPDLSAGFNTTAGLSQTPCVTVSPMQGHAIDASPGRTSTCLFTSPLREIGTQTDSSDDESNVPASQLYPPSPLRYCRSGKVIHAVFPMKCVLKCTESECDSAFAYSTWRRAKDNLLFHLEAVHNIKISTVTRWCTLCRKSCDPNPHHHRCFTTMKFYDIKSTELMNACYRCPTCGHPCPSERALNGHFHHEHGTENNDNDSSDSLPTTNEESSPTNADCVSGPTEPDAIVSNVMDNLPSLPQARNSPGSSSSSSDSSTLSNEFFPSGNSLIPGDSPSSSLPAFSASFGNLSAAYLNDGLISPMSASSPEPNSPPVTQGTETRMSSPAISLSASPISNNGSPPGSQVVNDSMDDFVTPRQPLRPSSNTEQSTTSSSPSRSQLINRPSPGDVIIIGDTLNFTFPITSTLTCPMDRCFATFVGNQWTTIKQSIIRHLTASHRLSRLAVKRWCAFCSEELPVKVSTHPCLANVRLFAPGSDMTNPLPFPCRWCNFSAPTSKALQNHTRVHKREEIRARGSENADTSANTDSQSVQVTFNNVNDDSQSSVHSNPRVVLLSHHPIQDDNTALAPTAEFSTTSSPQNDSDEEMHLSNDPHDIDPSVDDDQTISNSIPDDSDAPSPSAEYITKFKQLLSHNSPDWKMFVDLLCEYIEFAQKFVNLPMKTAKPVKLPNDNANNPQFIQKLYKRNRRRAIRTILNDNSPTCEISADDLAQAFFPADVPEPELQLYQHPKPATDEVDLHPFSPEEVWRKLKSAENTSPGLDRLTYAHWKSVDPEAKCLSVIYNICIKAKSIPDDWKLSKTIFIPKKGGGPSSSDWRPITLGSTISKLFCGCLARRFSSWLDTFSILSPAQKGFLPYDGCFENNFVLQKNIQDARKSGKDVCLMSLDLSNAFGSVTHPAIIEALRSAGAGDNFANLILSLYSGSSTCLIHKDGLSEPVRLHAGVKQGCPLSGLLFNLAVDPLLRTLRSESGTNILAYADDIMLIAPSPAELQTLANKATSVCQLLCLDINPNKCYSMHLGHNPTGCKSTVFNINGTPVPALRNGDAADFLGKPIGYSLIDDPNNIDDICNAGEKILESFLAPWQRIDALKSFFFPSLHYSQRTFQKGKTVWKSVDDRMRPKIKKTLYLPSWATNDYIYGDSQCSLLGIPVAAEDSDIALIDGAFKLLSSPDQVVCDLAWDDLCSLVASRSGGKDDHAEIASFMSGKTYPCTANPISSIWTKARMASTRLGVTWNIQPDRSFNISINGTTILKRRSVFKLLRTSIRRARFNKLKTYKHQGKTAASVGLSKSSSHFLHSGDFIRFADWRFIHRARLGLVPLNAYNWDAPENEKGCRRCNAPLETLPHFINHCRPMLPLGTRRHNLIVGRVKEAAKRRWKIVRENQTVAGSSLRPDLLIEKDGHAIIIDVTIPFENGPNAFAEAREAKVTKYAELANSLRSRYKSVAVEAIVVGSLGSWDRANDRVLSRLCSRKYARLFRKLAVSDVIRASRDMYIEHLTGIRQVPSSRSDRHALAVSNLVDAARNQSQNSNQTYEDNHN

SEQ ID NO: 22394 - protein, 1114 aa, Hycleus phaleratus
MTFDSYAGVRQHERRKHTEEYEQSLAEKLQAPEATLYKVMAEIEARNISGKFFADMQKATGLTKHQVRHRREKPIYKKYLENARREVAARNKPIFTSNDSQATPLSSKAPPTPRALRALRRSQSTEEQGIAPALSTGLVAPSRSESNGSDSDSESPQLSPVVEELSIMVHRDASPRTPQQRESSSINEHQVEDTSQLPQQDNLPIRVTRRLSLSTPNLSIAEEIAPDTDSNDPFRTYVESLIDELRVTKPEMAEFGQECLQLVHKHNELLVVNFDALIKNKFIPNPKKGNAGKGNNNRRNNNGNNGNNNNKNNNKQDKTKHYGQRYTGSGARASQYKKCQDLYQKCRRTLANKILSKKPLDSIDEIPKLEDVETLYDQLFGSESPADSEKIDDVASTVPIFVPVTEDEIISAKNNWHHSAPGPDGITTHAVINSNNKELSLLFSLILWSNVIPTSWRTSRTVLVPKEGNPKDAANWRPITISSSLQRLFHRVLARRISTHCKLNVNQRGFVNIDGTMANTIIIDHYIRSRREQGKAYNLVSLDIRKAFDTVSHHSIFRALKRAGVPDPMVEYIKNSMNSSTTVKVGELNSKPFLFRRGVKQGDPLSPILFNLVIDELLVQLNNGRYGGTMTANNIKCAAMAFADDLIILEDAEINLPIVLSEVEEFLKKRGMMINITKCRCLSIATNNKRPITRSKPFIKMYNSYISMVPTFNTLKYLGHEIASTGVLKPNMFNLVTWLQNLKSSCLKPDQKLAILKLSVIPKLLYGLQTTSINKKYLREFDRVIRKFLKNILHLHIHTSNAFLYGKVKDGGLGIMELSRDIPRIMLKRLTGLLENDNDDEVLRAVLLSENLQQLFRKLSAMAGELSSEQFWRSEIINRPFSKGIDIASEDRASRAWIDDKPKGWSGKDYVRAIHLRTANLPTQGIPSNPVDQRRCRSGCDAQETICHVLQKCPVTHWERIGRHNEIVNKIANHCRSKKWPVDLEPNIRVASGQMFKPDMVIHLGNNVSVVADVQVSWEGSTSMTEIYQNKRDKYGNAAFIDAASKRWPDKKFIFTPIILGARGIWPKANDEATRLLEIPFHLKCSCVHSVLKWGSSIHAVYMRATWRRNYSRN

SEQ ID NO: 22395 - protein, 1223 aa, Hycleus cichorii
MATKLPQPKPFDNRRPKSTNPGASSRASQSSVEHQTTSSSSLFVCECGQVFNIQSSLIQHEKGCKAIKRDKCKYCFLRFDSFAGVRQHERRKHTEEYEKELAERLPAPESKLFKTMAEIEVRSLTGKFFAEMQSATGLSKHQVRHRREKPIYQKYLEVARREIAEKAKRTFGMSVNQDTPVSSRAPPTPRALRAMRRNSSTDQPDEVVPESQVLTEAPPTPRALRALRRLSLDQQPSRVAPDISGLLSDHSNESSPQQLPVIHEVSVEIHPVPSGGKLDLSPKANDENIDTYVVHNADENIIQRIEDTSTLHRVTRRLSISTPNLSSAEEITTDIDNDPFRLHIINLIEELAVLKPETAAFGRTCLSLVHSQNEMVLHHIDVWIEKHFHVKPPTRGRKSNSDNIGRNIGNNKNTTKPTKHYGQTFTGSSRRAALFKKTQDLYSKCRKTLANNILNGVSLETQEKLPKIEDVESLYGQLMGDGSPPDDEPFDDAAQILPIFVPVTDDEVAYAKNNWHHSAPGPDGVTTMSVINCNNKELCLLYSLILWSNVIPTSWRTARTILVPKEGDLTNASNWRPITISSSLQRLFHRILARRLTLHTTLNINQRGFINMDGTMANSIILDHYIKSRRDQGKTYNVVSLDIRKAFDSVSHFSIRRALLRAGVPDGVLSYIMNSMNSATSIKVGPSSTKSFVFKRGVKQGDPLSPVIFNLVIDEILCKLNNSNNGGTLNRDTKCAALAFADDLVLLQDNEINLPIILSEIEVFMKQRGMQINTNKCRCLSITTNNKRVITRSKPFLKMNNTFIPMIQNFNSFKYLGHEVAATGIQKCNLLNLVIWLQNLKRSCLKPDQKLSILKQHLIPKLLYGLQTPGITAKLLKEADRLIRKFVKGVLHLHLHTSNAFLYGKVRDGGLGVMELSRDIPRIMLHRLTKLLENETEDHTLRAVLLSDDIQQLLRKLSTMSGDVPSDQYWRSEIMNRPFSSGIELASDDRASRVWIDEKPKGWSGRDYVRAIHLRTANLPTQGIPSNPEENRRCRSGCDAIESICHILQKCPTTHWERIHRHNEIAHKIAQHCKTKKWAVEEEPHIRTKQGRLFKPDLVIHKPHNITVVTDVQVSWEGSTPMPSIYNDKRLKYDNAEFREAAAVRWPDKELIFAPLILGARGIWPNANSGTCALLDITAALRASCVHSTLKWGSSIHAAFMRCTWRRTFNSRQGGATPTENIN

SEQ ID NO: 22396 - protein, 833 aa, Dermacentor silvarum
MYDLRALYEFFGVKIRPGRRRGGKTGPCENNLQRQPNERSRSFKRRLFAEHQRLYALGPRVLLEELLAGTGALSPVSLNDIHETFDAILTSESPAVTEVGVKGALPKNCPRFTEEEVAVALRGMVTASAPGPDGLSVRELRKVPPSILAFVMNNWLSHHNLPDELRLSRTVFVPKGPNAASAAELRPITISSVLIRLFSRMLLARLQEQYSFHPLQSGFARDRAAQSNLLLLQGLMKHAKRFNRHFYAASLDLQKAFDSVSHHALLTSLREGGAHGDYVMSIADQYFCQSTTFSYRGRSDGVRVFVQRGIKQGDPLSPFLFNLALDPLLHDLNSSGFGYSIDGQTVSALAYADDLILIASSYEELVRNLDVAQRHFQKIGLALNPKKTQYFGWRYEAHRLKWFDYDIPQLRLGDAVISPKSRNEPIRYLGLDLFVNKPPKASITMIEKELALINSAKLKPFQKLNCISTLLVPKLLYATSSSLSVMPITASIDRCVRQEIKKVLHLPMSFPDFMVHAPHRAGGLGVLELSRVSAESQIKSFARLQRLGSPIVDAILDGALDGFRRGLEEKMGVPMGIVESASLDKALRSARKSHLEEVKKKYTNKSLFAFESDPVGNRWLRPDARFMSDGDRIKALRLRSNLFPTRTLSNRHSKDDSARLCRRCHKAQETTYHILQVCEAVHEPRCSRHNFISKAIINKLHSRHPDADIASERLLVADCGTRLRPDIVVDLKEKTFILDVAVTWDARTDTLEAMCAHKRNKYLPLVSVLRRRQPQKEVKVLGLAFGARGLICPSTKQAAKEIGLREGELAWLGARTLVGSLICLNRFSKQIVA

SEQ ID NO: 22397 - protein, 1507 aa, Dermacentor silvarum
MATNVYILTYPLAPIQCHLCNIVDRRLASLERHYAQQHELILNWKCSACGYVFGGSRSVAAHYWHCVSNVSSRSGANENLSHETTDCEGTRAISSEDCSPGLSGEQCSSTEVTSQDIILQYPPVKNKCSKCHILLSSTVALEDHYKRKHGLNTYWRCSACNKASHTSSHSASAHFAKCRKKPVQAGGHDQPPRNSSQSHTVSGSGSTPYVHSKATKKSSKKRGQDGLKDAPMAVASPRHWSSPEVRHVAAVRLGLGSEATDYQTSLWVAGRTTGEITALVATARYEEMEREVRQARAADSSDGTGGKPDFARPQRSKAGVPHGGKQPRGKVGQQRSLRWELSSVSSSSSGREEPPPSPVQSLLGGIPSQRDPPASIPGVPPGGESKEMANDDCQGIPQLPSAGMCGVFGRTSPGHKAAIAHSPPSAGRDELEGSWPRSLPTSLASPEPHSGFVGGGDSVAHEEEANESVVWAVGPMDPECLLPANDNEAQPGGLAGVPVDTAMMPDEVNGVRADLADISDETPSGAVSPGGSVVAQSATLLQRFRSSAVPVASAYQPWTEAQIRILARAEAGLPPGERLVNAALAAVYTTRSLDAIKSLRRQTRYREILAEESAQQQMPASEWPPRHEGGVEPNSENADYSASNLPSAEDAYDVLSSWGLDDRGLAINLTSSPLTMSDLRALYEFFGIKIRRGKRPGARRGDKCKLQRRPDERSRSFKRRLYAEHQRLYGLGPKVLLEELIGSAGSREPVSLEDIHETFDSIFTSESPAVPLVGVKGGLPGHCPRFSSEEVALALKGMAAASAPGPDGLMVREMRKIPPGVLALIFSNWLTHHNIPDELRLSRTVFLPKSPDTSSASDLRPITISSALLRLYSRLLLARFQETYKFHPLQSGFSRDRSAQSNLLLLQGIMKHAKRFNRHFYAASLDLRKAFDSVSHHALLSSLREGGAHDDYVLSIADQYFAQSTTYSYRGKSDGIRVSVQRGIKQGDPLSPFLFNLALDPLLRDLNSSGYGYSIEGETVSAFAYADDLILIASSYEELVRNLDVAQRHFKKIGLALNPKKTQYFGWRYEAHRLKWFDYDIPQLRLGDAVISPKSRNEPIRYLGLDLFVNKPPKASISLIEKELALINSAKLKPFQKLNCVSTLLVPKLLYATSSSLSVLPISAAIDRSVRQELKRILHLPMSFPDFMVHAPHRAGGLGVLELSRVSAESQVKSFARLQRLGSPIVDAVLGGALDGFRRELEEKMGVPLGVVEPASLDRALHTARKSHLEEVKQKYTNKSLFAFENDPVGNRWLRPDMRLMSDGDRIKALRLRSNLFPTRTLSNRHSSDDSAKLCRRCHKAQETTYHILQVCEAVHEPRCSRHNFISKAIINKLQSRHPDADISSERLLVADCGTRLRPDIVVDLKDKTFILDVAVAWDARTDTLEAMCAHKRSKYLPLVSLFRERQPQKEVKVLGLAFGARGLVCPSTKLAAKEIGLKEGELAWLAARTLVGSLICLNRFSKQVVA

SEQ ID NO: 22398 - protein, 1034 aa, Dermacentor silvarum
MCGSDSAVHGCGPTSGCHAKSPSSVESECTLVNKSDLDNGDSGVPGFTQLPARVASQPQSQKPDGMEGENLKGRTRSAAVPTANSYGRWTMPQMRILAQAELSLPAGERYVNQKLAAVYPSRSLDAIKGLRKSTAYRELLARESALSREHLSNTPSGPSSDETFQQDSPMPVTSMDVDEIKEILSDYGLLCAGLAENAAATPLNMSDLEIIYQYFGVKIRKCKGGGRKRVHLTRRPNEKSRHFKRRQYTEHQRLYSLGPKVLLEDLICGQGQLGKVELQEIHNVFDRILGEESAPVSHVGIKANSLPSEANLFTEAEVQFVLRNMGMSSAPGPDGLTVREMRKIPTAVWMVIFNNFLSFRRLPDELRLSRTVFIPKSCDAATATELRPITISSVLVRTYSKLLLTRLQDSYFFHKLQSGFSPDRAAQSNLLLLQGIMKHAKKFHRPLYAASLDLRKAFDSISHNALFLALEEGGCHNAYVESIRDLYCSQATSFMYRGTSDAVRVYVQRGIKQGDPLSPFLFNLTLDPLLHDLNASGFGYAVNGEVISAMAYADDLLFVASSYEELSRNLEVAESHFKNIGLALNPSKTQYFGWRFDSHRLKWFDYDIPPLKVGGAMVEPKGRNDPIRYLGVDLFVNKHPTASIDSIRRDLKLIDSAQLKPFQKLNCISTLLVPKLMYAASSSLTVRPLTAKLDRDIRQEVKRILHLPASFPDIIVHTPHRAGGLGVLELSRVAAECQVKAFARLQRLGSPIVDAVLEGALRGDREALEERMGVPTGLVEPSSLKKALQEARTTHLEDWKKNYTNKSLFAFESDPVGNGWLRPDARYMGDGDRIRSLRLRTNLFPTRTLSNRHSRDDSAKLCRRCHQAQETTYHILQVCPSVHEPRCSRHNFISQAIITKLRERHKDAEISSERLLVTGDGTRLRPDIVLELKEKAFILDVAIAWDARTETLEGMCAAKRQKYQALAPVLQAKCPGKEVKVLGLAFGARGLLCPSTKKAAKEIGLKEWELAWLAARTLVGSLICLNRFSKKVIA

SEQ ID NO: 22399 - protein, 1002 aa, Ancistrocerus nigricornis
MNDGEPTGPAVPVNNNQEGMVPQPTQNPADLVRCEFPGCDKTFATIRGRGVHYSKAHRDWRDEQANTSHKKAPWSEEEARIMARQEAKFVKDGERFVNQALIRVFPHRSLEAIKGKRKDQRYRDLVLEYLDEAEQPVPIPVEEPALVPDQADIMGYLKQLSPLQGTNYGEDRLNNICENIGVWSNERVLDELSLYIKGLLPIRRANRAQVQQRKEPEALSRRQSRRMEYARTQRLWRKNPGTCLRTILKDVRTANPPPVDLLWAFWGKTMTEGNTGAPEKVIRSEVTHHHLGDPITPDDIRRAMPANGTAPGPDGLTAKKLKQIPLEVLERIYNIFMLLRKVPTDLLESRTTLIPKKEGATRPEDFRPITVSSVLARAYHKVIANRMMKSIDLDERQKAFRKVDGCAENIFLLDLALRYHKGAFKHLYLASVDVAKAFDSVSHQAIFSAVRAAGVPNNVVEYVEFLYANSATTLTYGAAQSEKIRPTCGVKQGDPMSPIIFNCVIDQLIRKIPDEIGARIPGGPKINVLAFADDIVLLASTANGLQRMIDICHEQLASCGLKINSAKSHTVALKNVPHEKRSIVDHRETFKCGNNTLSALKRSDEWRYLGVKFAADGRVLVDCKEKLSSQLDALAKAPLKPQQRLFGLRTTLLPSLYHAMVLGNTRLALLKGADKIVRRYVRKWLDLPQDVPIAYIHAAIKDGGLGIPSLRWMIPMLRATRLSNIRNLENCQFLEKECNEAKRRISENGDTYLSSEHLDDRWAVALYKMVDGGALRESRMTPNQHAWVGEGTRLLSGRDFVHLVKLRINALPVRARTARGRRKERMCRAGCNNTETLNHVLQKCDRTHDVRIRRHNAIVDYLERNLKQREYEVHKEPKLKLGDEIRKPDLVAKLGRAAFVIDAQVVSEQTDLEAAHQSKMTYYRPLGPEIRRLYGVREVWFSSATLTWRGIWSPSSCQQLIQWGFLKQREVKIISTRVLIGGVMGFRIFNKRTTVKRRQGIG

SEQ ID NO: 22400 - protein, 1032 aa, Ancistrocerus nigricornis
MSGEHGPGGCQPPRLEYAGPELRSKPRMRNSGEPTGSAAPARSQGGTVNQPTHDPAYPVRCEYPGCTKTFATTRGRGVHYSKAHKDWRDEQANTSHKKAPWSEEEMRLMARQEATLVKEGERFVNQALIKVFPQRSLEAIKGKRKDPRYKALVAEYVEEEADQLPPNHDVELQPAPTRDRAEIIGQIKQLSPLQGHEWGEDRLEQICEELERWSDERILQELTLYTRAILPTRQNRGERRQQREQPAALSKRQQRRMQYATTQRLWRKNPGTCLRTILKDVQTANPPPADLLWAFWEKTMKEERASEPSEVIWSDTTHHQIGAFITPDEIRKAMPANGTAPGPDGLTAKRLKQIPVGVLERLLNIFLLIKKIPVDLLESRTTLIPKKDGANKPEDFRPITVSSVLTRTFHKVIANRMIRLIDLDARQKAFRKVDGCAENTFLLDLALRYHKGAYKHLYLASLDVAKAFDSVSHQAIFSALRAAGVPADVVEYVKYMYANSTTTLTFGNEKSDKIRPTCGVKQGDPMSPEIFNCVIDQLIKKIPNEIGARIPGGPTINIVAFADDIVLMAATPNGLQRMIDICHEHLAQCGLRINAAKSHTVSLKNVPHEKRSVVDHSQTFQCGQHTLCPLKRTDEWRYLGVKFSAGGRATIDSKVKLSTQLEKLSKAPLKPQQRLFGLRTTLLPSLYHELVLGDTRLALLKRADRSVRNSVRKWLDLPHDVPVAYFHAAIKDGGLGIPSLRWTIPRMRLARLHNIGGLADSPFMQGEIEEAKRRAKENEVIYMTSEQLDDRWAGALYNMVDGGALRDSRRTPDQHVWVGEGTRLVTGRDFIHLVKLRINALPVRARTARGRRKQKLCRAGCNNVETLNHVLQHCHRTHDVRIRRHDAVVDYLERNLRQREYEVHKEPELRDGDELRKPDLVAKLGRTAFVIDAQVISEQADLETAHRAKKRYYEPLAPLIKRTYGVREVWFSSATLSWRGVWSPTSCQQLLQWGFLRKREVKVISTRVLVGGVFGFRVFNRRTSTHRRQGIG

SEQ ID NO: 22401 - protein, 1198 aa, Coilia nasus
MKSPIISPHTGHHEARVNNVVRLGVSSRSNVGLARERPLSPPVEASSGGGCSTPPRRVGQFMKPAPAGAGGCPEPGASVATPTRPLTHTLPRRRLSGKPPKPLRFWAPYRSLKCEDCQAVLGSLGVARWHVHTKDPGRAFVVKCRSCGVEWFSVKRNCGGSLGRLSAARALARRLCATGSPFSTPIRRQVGRAGLRAGPAVSRSRWTSNELEVLRRMVEQSGSSPQVLRTALARFPGKTERQLRGRIRATRIQLGSCGNVATGGSDPAIRALSNPAAEYPLVQRVSRKLRWKAHLIAKEPAVRGNYVAEALFRAGMHKHVAQEALERVAARVVREIQGLKRTAVKRTHTGKPRVTPGPHPEHRWAKRLGRKERIRRLIREDPGKLADLLLDGVDDVDCPIPLENLARVLGDRWADCGGYTGLGQFKAAGGADNGCFASLFEPSEVLEQLLSVKKGSAAGPDGISVMDLKEWDPEGIKLCSLFNGWWVSGYIPECVKPARTVLLPKTTEVQALNEPGNWRPITIGSFLLRLFSKLLHSRLRAACPISERQRGFISAPGCSENLFSLMCLVRKAHQERRTLAVVLLDVAKAFDTVCHQHIFDALRQRGVDSHVVQCIRSGYESCTTRIALRGEFSEPIATTRGVRQGDPLSPLLFNLAMDPLLCTLSTEGKGVSVGGSNVAALAFADDLVLLSDSWSGMSHNLEITAAFCKLTGIRIQPNKSHGFLLSPDPANKRNSMRVNRCRRWTVAGESIPLVCEMDEVKYLGMQICPKKGLKRPELRLQVKAWMRSVGAAPLDPAQKVWFTKTYLLPRVNYRLTHGDVSTAELGELDRVVRGEVKEWLGLPVSTCNGVLYSKMRDGGLGIPRLKHSIPEQQLRRLFELLQSEDRMVRELAWEVEGQEGFTQRWVKAGGDRGSVPDLTAHRPEPEDILDGGDVQTPVPRQAWRPPVDWGGGEFHDWCSKRVQGVGMDGFKNSTEANSWLSRTSGAPCKWYANAVRLRAGVWPTKEFLSRGQSKARASCRTCPGRLESTSHILGMCPIVRKERINRHNWVRDYLASLATRKGRRVFSEKTFRLSGGTVLRPDLILCKGESAQVVDVTVRYKYGGGAVRRANKLKAVKYQPLVQVLCRELGVEKVNTVGFTVGARGQWHRDNNKLLRALGLSKKATKNAAKHLCVGVLKRSVKMVKAFYRKHPGTSAGS

SEQ ID NO: 22402 - protein, 1205 aa, Coilia nasus
MNSQTISPHTGHHEARVNNVVRLGVSSRSNIGRARERPLSPPVEASSGGGCSTPPRRVGQFMKPAPGGAGGCPEPGASVATPTRPLTHTLPRRRLSGKPPKPLRFWAPYRSLKCEDCQAVLGSLGVARWHVHTKHPGRAFVVKCRSCGVEWFSVREYTVHKHNCGGSLGRLSAARALARRLCATGSPFSTPIRRQVGRAGLRAGPAVSRSRWTSNKLEVLRRMVEQSGSSPQVLCTALARFPGKTERQLRGRIRATRNQLQASRGNVANGGLDPAIQALSTPADEPPLVQMVGRTLRWKAHQIARGPDAKGNHIAKALLLTGVQNHKAQEALEKTATRVVSEIQGRKRTAVKRTNTGVPCVTPGPRLERGRPKRLGRRAKIRRLIKKDPAKLASLLLDGVDDVDCPIPLETLAEVLRDRWVDRESYTGLGQFKATGGADNSCFAALFEPQEVLDQLLSVKKGSAAGPDGISVKDLREWDPEGVKLCMLFNGWLAASYIPECVKPARTVLLPKTTDIQALNEPGNWRPITIGSLLLRLYSKLLHSRLSAACPISARQRGFVRAPGCAENLFSLTALVRKAHRERRTLAVVFLDVAKAFDTVCHQHIFDALKQRGVDSHIVKCIRSGYERCTTRIALKGELSEPIATTRGVRQGDPLSPLLFNLAMDPLLCTLSAEGKGVSVGGSNVAALAFADDLVLLSDSWGGMSHNLEITAAFCKLTGIRIQPNKSHGFLLSPDPANKRNSMRVNRCRRWTVAGESIPLVCETDEVKYLGMQICPKKGLKRPELRQQVKVWMQSVGAAPLDPAQKVWFTKTCLLPRVNYRLTHGDVGTAELGELDKVVRGEVKEWLGLPVSTCDGLFYSKMRDGGLGLPRLKHSIPEQQMRRLFELLQSEDRTVRELAWEVEGQEGFTQRWVKAGGDRGSVPDLTPHRPASEDILDGGDVQTPVPRQAWRSPVDWRSGEFHDWCSKRVQGVGMEGFKNSTEANSWLSRTSGAPCKWYANAVRLRAGVWPTKEFLCRGQSKARAYCRICPGRLESTSHILGMCPIVRKERINRHNWVREYLAALATRKGRRVYSERSFRLSGGAVLRPDLILRKGKSAQVVDVTVRYEYGGGAMRRANELKVAKYQPLVPVLRRKLGIERASFAGFTVGARGQWYRDNSKVLRALGLSKRATKSVAKRLCIGVLRRSVRMLRAFYLHDPEKSAGS

SEQ ID NO: 22403 - protein, 1204 aa, Coilia nasus
MKSPNISPHTGHHEARVNNVVRLGVSSRSNVGLARERPLSPPVEASSGGGCSTPPRRVGQFMKPAPAGAGGCPEPGASVATPTRPLTHTLPRRRLSGKPPKPLRFWAPYRSLKCEDCQAVLGSLGVARWHVHTKHPGRAFVVKCRSCGVEWFSVREYSVHKRNCGGSLGRLSAARALARRLCATGSPFSTPIRRQVGRAGPRAGPAMSRSRWTSNNLEVLRRMVEQSGSSPQVLRTALARFPGKTERQLRGRIRATRIQLGSCGNVATGGSDPAIRALSNPAAEYPLVQRVSRKLRWKAHLIAKEPAVRGNYVAEALFRAGMHKHVAQEALERVAARVVREIQGLKRTAVKRTHTGMPRVTPGPHPERRRAKCLGRREKIRRLISEDPGKLADLLLDGVDDVDCPIPLENLARVLGDRWADCGGYTGLGQFKAAGGADNGCFASLFEPSEVLEQLLSVKKGSAAGPDGISVKDLREWDPEGVKLCMLFNGWLAASYIPECVKPARTVLLPKTTEVKTLNGPGNWRPITIGSFLLRLFSKLLHSRLRAACPISERQRGFISAPGCSENLFSLMCLVRKAHQERRTLAVVLLDVAKAFDTVCHQHIFNALRQRGVDSHVEQCIRSGYESCTTRIALRGESSEPIATTRGVRQGDPLSPLLFNLAMDPLLCTLSTEGKGVSVGGSNVAALAFADDLVLLSDSWSGMSHNLEITAAFCKLTGIRIQPNKSHGFLLSPDPANKRNSMRVNRCRRWTVAGESIPLVCEMDEVKYLGMQICPKKGLKRPELRLQVKAWMRSVGAAPLDPAQKVWFTKTYLLPRVNYRLTHGDVGTAELGELDRVVRREVKEWLGLPVSTCNGVLYSKMRDGGLGVPRLKHSIPEQQLRRLFELLQSEDRMVRELAWEVEGQEGFTQRWVKAGGDRGSVPDLTAHKPASEDILDGGDVQPPVPRQAWRSPVDWRSGEFHDWCSKRVQGVGMEGFKNSTEANSWLSRTSGAPCKWYANAVRLRAGVWPTKEFLSRGQSKARASCRTCPGRLESTSHILGMCPIVRKERINRHNWVRDYLASLATRKGRRVFSEKTFRLSGGTVLRPDLILCKGESAQVVDVTVRYEYGGGAVRRANKLKAVKYQPLVQVLCRELGVEKVNTVGFTVGARGQWHRDNNKLLRALGLSKKAAKNAAKRLCVGVLRRSVRMMKAFYRKHPGTSAGS

SEQ ID NO: 22404 - protein, 1017 aa, Pseudomyrmex pallidus
MNNCVTNSLSTNVTSPCSNPGPSGSGAPVTRRLAAQNNLGTASNRFCCEFPCCDRSFDTKTGRGVHYRRAHPDWYDSQQNVTSVKKQWSEEEMRMLASKEVELIREGARFINLELSKAFPERTLEGIKGKRKQPGYRQLVEGLLDELLAESVRDPNERADEDVTEDYDRNFVEYLSRLPLPTGRDFDLPRLARICASLEHRGKDKVLGDLTLYLRDVFPIRSTVKGERRGAIGQRALLSKRQLRREEYAKTQDLFRKNRSKCLRMILDDITGVTMPPKDVMVPFWRTIMTSVVKTQPDDEPSRPISDALWTPVTPAEIKKAFPASTTAAGCDGLTARFMRRVPMDVWVRVFNIIMWCRQAPGYLLESLTTLIPKKSNAKDPGDFRPITVSSVIVRTLHKILALRLRKSITLDERQRAFRPTDGCSDNVFLLDLVLRYHFQKHKPLFIASLDIAKAFDSVSHETIEQTLRIMGIPLPMRNYIMDTYERGTTRLCCSEWRSEGIHPSCGVKQGDPMSPVIFNMVIDRLLTRLPKEIGAKIGGLTVNAAAFADDMLLFATTPLGLQKLLDISAEFLGRCGLQVNASKCMTIALRNVPHEKKTVVDRETVFLCNGRMLPSLKRSDEWKYLGVPFTPEGRMKTDPLPKLQDQICKLTKAPLKPQQRLYAIRTMVLPSLYHLLELGNIMLGRLKKCDRLVRQAVRGWLSLPTDVPNAYFHAPIESGGLGIPCLRWSIPVRRCCRLHGLDVVEDPNNNAPKIFLQREIQRCLERVSELGEPTIVGVKKKWSDSLHSKVDGVGLRESNKVPQQHRWVQDCTRFLSGRDFVQSCKLRINALPTKSRTSRGRPFERGCRAGCRRPETLNHILQQCHRTHGHRVRRHDAVASYISRALEGRGYEVESEPKFQTPEGLRKPDLLAKLGQTAIVIDAQVVNDQLNLDEAHRNKVVYYRPLETIIKTKYKVQTVIFTSATLSWRGVWSYMSANSLLTLGAVKKKAIPVISSRVIIGGLACFHVFNKLTTVA

SEQ ID NO: 22405 - protein, 1051 aa, Levipalatum texanum
MVDRLVVRDGPLTRDCSASGPLPSRRTADSDGAVDSEATVPVDQLALEAVDRKDPSDHSQPPSKKSQKAKASRGQVTVSTVHVAGGPAPKQNKRRPPPPTRAPPPRNTQAPRAPRAQAQRQPTTRPPTASQRDWIDKVSRCTTPAELDQVLADWDISIKAARPLDPNARPPPANGPRRAPRQRPPLPHAEEAKRVQTLYRQDRPRAMREILGEDRSGCPVPVADVHQFFLGVHASATHPSGPIPLPPMSPPPHSDPLALPFTPREVSERLARTSNTTPGEDGIRYPELRKSDPGALIMTEIFNQCHSLSHVPPAWKESTTVLIHKKGDPTSVANYRPIALLPCLGKVYFSCIGKRLTDWATSYGRITRSQKGFLPYAGCSEHNFLLQSAIDDASRAQRKGAAICFLDLKNAFGSLSHSALKESLTWLGLSPNSLSIIERTLAGVSTRVKSDSGTTPPIPIQSGVVQGSPLSPILFNLGIEPLIRAAIRANPTGYLLHSHHIGPLAYADDLALLSSSKEGLSSQLTAVSSLAGWAGLTFHPHKSATLTMKGRKTQRDEYGVQGKPIPVLDKWDSYSYLGVPIGHTLHSSGEKALAKMGEHLKRIDQSLLAPWQKADATRTFVLSLLPYHLANSHVPKKPLVEFDKELKRCAKRWLFLPQRASVEPLYLSPNQGGLGLLPMALLADIATVSHSATLLHSMDPVVADLAHKAARECASVRAKTPVTNREACLYLEGSSDAPFSAISSDISTVWSRVRSATSRLKGKLPAFGWYGDPSGHIFTSLAGSPLFPKGVQGKLTHASRLELLRSLRAKPDQGKVARTTGIDDQVSHFYMREGRFMAFADWRFIHRAKLNVLPLNASRPFARTSSDQRCRKCGHAAETLPHVLNHCQPHMVKIRARHNAMISRVLKVSPLGGVLREDQRIPGSNSAMRPDLVHWDEINKRCSIIDFCSPFPNAQQSLETAAAEKLTKYASLKSELEGRGFSVKMAPYVVGALGEYWRGNYEALSLLQVPARKVEVLRQLVVTDVIAHSRAIYATHTSGMDIDPRRSSSST

SEQ ID NO: 22406 - protein, 877 aa, Bradysia coprophila
MFFRNNIPTLRRIPKGARFSAADKFSKLVNECVDKNSTFAWHQLLTFSYISFNLKGDKNKSLTSKVKDNIKQFNVDISALQKKPSASLAQRIESKVADFDIKGAIRILSSNDKLAPFSEETLIKLKSKHPTSASITKPEVVPSIDSQSFIVNEQQVKKKINSFPYGSGPGIDGFRPQFFKDIISKTAGEAGERALKAITRFVNFINAGEISDTIKPIFFGASLCALTKKDNGIRPIAVGNALRRLCGKLACSHVHEDAHKYLNPHQVGVATKLGAESVIHAVRKYVHDPSNKGKVILKIDFRNAFNSIDRSKMLTSIAKNFPNLYQLLSSSYSSPSLLFFGNKTISSEVGCHQGDPCGPLSFSATIHPMVEVIASELNTWYLDDGTVGDFPSIVLDDFKLIIEEAEKCGLQINPDKCELFFVSGIIDETVVKQFDNLSPGIQITTDDKLEILGVPIFESGYQAAFDKKFNSLHLLISRLDEVNSQTAYCLLKNCMFIPKLTYMLRTCAFWKFKIFTDQMDHLLKRSLESILNLPIGQDQWTQAVLPISKGGLGIRRISDICLPAFMSSLHGVYDLVSLILPSMDREVILHYWNESHDHWNAINVSMPDEPSIQKSWDSINLERIISGMQFNNDKDLARFTALQEPESGGWLHVIPSNSIGTLMNDQDFQTCIALRLGIHCFEDYKCICGSFVDGSGTHGLSCPNAKGTWPRHLLLNHTIHRSLTSARHGSSLEPLGLSRDDGKRPDGVTLAPWSKGKRLVWDVTCVDTLAPSYLHATSKKAGAAAELACKKKHDHYTKIKASNFIFVGLAFETMGPWCKETKSFIDAIGKKLIHESGDLRAKKFLYDRISLAIQQGNASSILGTQPKIEKFNEIYNL

SEQ ID NO: 22407 - protein, 1095 aa, Bradysia odoriphaga
MADSSDGFIVPIDFSIEGAQSLNLQKFLKANDAFKCVPCNKIFRSQECLEIHCTNHSKLTNRINSKKFERKRKHNQGNSLFVDDSGQCHMSNADLDEFLMLHNAELQSDYNEPKHEDQLSCPECDFVPRTRTGLSKHMKAHIHNAVKQPLTTVTTDRTSLENGKSSTKVRIPCPFSPSRTFVDKKRLQTHLDKKHCDELLQLRSADKITPTSLAEKLMFYRNKVPTLRRIPKSTRFSAADKFAKIVNECVDKNSVYAWHQLLTFSYVSFNIKGEKDKSLTTKVKDNIKNFCSDFVCMPKKPAVSLAKRVESKVNDFDIKGAIKILSSNDKLAPFNDETLAKLKSKHPTSSFITKSEEIPQREHSFFIVDEQQVRKKINSFHHGSAPGIDGFRPQYFKDMISKTAGEAGERALKSITRLANFIIAGNVSNDIKPIFFGASLCALLKKDNGIRPIAVGNAMRRLCGKIACSQVHTQAKDRLNPHQVGVATELGAESVIHAVRCYVHDPGNRNKVILKIDFQNAFNSIDRSKMLTSIAKNFPSLYQLISSSYSAPSLLFFGTDIISSEMGCQQGDPCGPLSFSSTIHSMVTDISSELNTWYLDDGTIGDDPAIVLKNFESIINEAAKLGLNINSDKCELFFVSGTADKTIVDQFNAISPGIEITEKTKFEILGVPIFEDGYKSAFNKKFDSLKLLSSRLEEINSHVAYCLLKNCLFIPKLTYMLRTCAFWKYKSLTDDMDNYLKTCLETIINITIDENKWIQTILPISMGGLGIRRISDIALPAFLSSLHGTNNLASLILSNTDSESTLHLWNESLEQWNTINENMPSNRSVQKEWDSINLERIVSDEILLQSSKDIARFKALQEPESGGWLQVIPSNNIGTTLSNQDFQICVALRLGINHFTKHKCICGSMVDESGTHGLSCPNAKGTWPRHLDLNHTFPRALTSAHRSSTLEPIGLSRDDGKRPDGTTLSPWSKGKRLVWDVTCADTLAPTYLNSSMKKAGSAAELACSRKHSHYTKIKAANFIFVGLAVETLGPWCKETKSFVDAIGKMLIEESGDIRAKKFLCNRISLAIQRGNAASILGTHPTNEKLTEIFDL

SEQ ID NO: 22408 - protein, 798 aa, Bradysia odoriphaga
MKKPALSLAKRIEAKVEDFDIKGAVRILSSTEKLAPFTEETLFKLKSKHPSASSAPLVDKQPPASCSLVVNEQQVRKKINSFQYGSGPGIDGFRPQFFKDMISKSAGEAGERALKAITRLVNFIMAGEVNNDIKPIFFGASLCALLKKDNGIRPIAVGNALRRLCGKLACSGIQDDAHNYLNPNQVGVATKLGGESVIHAIRKYVHDSSNKDKVILKIDFQNAFNAIDRSKMLTRMAEHFPKIFQLLSSSYSAPSLLFFGDGTISSEVGCQQGDPCGPLSFSVTIQPIVNMVSSELNTWYLDDGTIGDNYKTVLGDFKVIIKEAEELGLKINPEKCELFFVSGIVDSGIAKEFNDVSPGIRITEKKDLEILGVPIFEEGYVIAFEKKFDSLKLLISNLDEVNAHTAYCLLKNCLFIPKLMYMLRTSAIWKFQALTHEMDYYLKGCLESIMNTSINETQWIQASLPISRGGLGIRKISDVCLPAFLSSLHGVRSLVSLILPNMDNEATLHLWNESMEHWNELNAGKAPENPSIQKQWDRINVDRIISESLNFESLEDQARIKALQEPESGGWLHLIPSANIGTAMNSQDFQVCVALRLGIPYFSRHKCICGALVDGNGTHGLRCPNAKGTYPRHVTLNRIMHRSLTTAHHSSDLEPLGLSRDDGKRPDGVTLAPWSKGKRLVWDVTCVDTLAASYLNTTSKKAGSAAERACNHKHSHYTQIKASNFLLAGLAFETLGPWCKETKQFIYKLGNMLIEESGDIRAKHFLCNKISLAIQQGNATSILGTRPSNNQLDEVYKL

SEQ ID NO: 22409 - protein, 995 aa, Acropora hyacinthus
MGKSLNDLLDNGVNGTGAFSEGASSGRCPVGEQRRPGRHPATARMMWSKDVNKVVMECYLKSKPVNENGVPIRGYRQRMFRVWQEIGLFESTEQRICDQARAIRKNGWLSELEIEVIKRTINQEETGDTNVQGLGDATTDENMENDEVQQEEGEFDMQDEPGDDANIKELNDIPEEDRRIISEILELSKSGENNPVNFKKANQRQVEEITNRINKVIDKIPTRTITETNNLINAASMYVAKELGLKQTTQKQSKMPWWQRRIEGDIKRIRKDINLLEREKRGELRKSGKMEQLEKKYNIKGKGITTVLEELKQRILAKAAKIKRYDQRRTQYKQNILFKQDQKRFYQELNGTARNENVIPDADESKKFWSDIWSVGKEHNRSAEWLNNIKNDIKDNQQGELEITSDMVTSQCRKLPNWKAPGKDGVQGFWLKILRGLHGRIAKQLNNILNKEEELPEWLTFGRTILCLKDHSKGNAVDNFRLISCLPLMWKLMTGVIAEVMYKHLEGILPEEQKGCRRRSRGTKDQLLIDKAILKDCKRRHTNLAMAWIDYRKAYDMVPHSWIGECLEMFGIAVNVRQFLLSSMKKWKTELTSCGQQLGVVNIKRGIFQGDSLSPLLFVLCMVPLSLVLRRSKAGYEWGGHEFQINHLLFMDDLKLFGKSYEQIDSLVQTVHTFSKDIGMEFGIKKCGVLVLKRGKIAKMEGVLLPDGQVMKEIEDRGYRYLGILETDHLKEKEMKDLFSKEYKAKKMYGQFLREMPETVDKDKTWEWTRKSDLKVETEALIFAAQEQALRTNYVKFNIDKSVDSPLCRMCNQKGETINHILSECKMLAQKEYKRRHDNIARLVHWKLCCKYDMSRGERWYEHQPEGVVENEKCKILWDMAIQCEHVIEARRPDVVVEKENNKAIIVDIASPWDHRVYEKEGEKIEKYQDLKREIRRLWGIRHLEVVPVVVGALGVVSKRLDAWLEKLGVTIRTGLLQKTALLGTARILRKLLDS

SEQ ID NO: 22410 - protein, 1141 aa, Acropora echinata
MGESLNGLLDNGVNGTGAFCEGASSGRCPVGEQRRPGRHPATARMMWSKDVNKVVMECYLKSKPVNENGVPIRGYRQRMFRVWQEIGLFESTEQRICDQARAIRKNGWLSELEIEVIKRKINQEETGDTNIQGLGDATTDENMENDEVQQEEGEFDMQDEPGDDANIKELNAISEEHRRIISEILELSKSGENNPVNFKKANQRQVEEITNRINKVIDKIPTRTITETNNLINAASMYVAKELGLKQTTQKQSKMPWWQRRIEGDIKRIRKDINLLEREKRGELRKSGKMEQLEKKYNIKGKGITTVLEELKQRILAKAAKIKRYDQRRTQYKQNILFKQDQKRFYQELNGTARNENVIPDADESKKFWSDIWSVGKEHNRSAEWLNNIKNDIKDNQQGELEITSDMVTSQCRKLPNWKAPGKDGVQGFWLKKLRGLHGRIAKQLNNILNKEEELPEWLTFGRTILCLKDHSKGNAVDNFRPISCLPLMWKLMTGVIAEVMYKHLEGILPEEQKGCRRRSRGTKDQLLIDKAILKDCKRRHTNLAMAWIDYRKAYDMVPHSWIGECLEMFGIAVNVRQFLLSSMKKWKTELTSCGQQLGVVNINRGIFQGDSLSPLLFVLCMVPLSLVLRRSKAGYEWGGHEFQINHLLFMDDLKLFGKSYEQIDSLVQTVHTFSIDIGMEFGIKKCGVLVLKRGKIAKMEGVLLPDGQVMKEIEDRGYRCLSILETDHLKEKEMKDLFSKEYKHRLKLVFKSKLSGKNKIMAANTWAVAILRYSAGVVEWKTDELKVLDRKTRKMMTLYGALHPKSDVDRVYLARQKGGRGLISCEMCVKAEENNLAWYVRNSNERLMAGVRKIKILDSEGAKEKNEFKRDRQNASLNRWTEKKMYGQFLREMPETVDKDKTWEWTRKSDLKVETEALIFAAQEQALRTNYVKFNIDKSVDSPLCRMCNQKGETINHILSECKMLAQKEYKRRHDNIARLVHWKLCCKYDMSRGEKWYEHQPEGVVENEKCKILWDTTIKCDHVIEARRPDIVFVEKENNKAIIVDIASPWNHRVYEKEGEKIEKYQDLKREIIIVRLWGIRHLEVVPVVIGALGVVSKRLDAWLEKLGVTIRTGLLQKNSLVRHSQDSKEAVGQLKEKK

SEQ ID NO: 22411 - protein, 1056 aa, Acropora echinata
MFRVWQEIGLFESTEQRICDQARAIRKNGWSSELEIEVIKRKINQEETGDTNVQGLGDATTDENMENDEVQQEEGEFDMQDEPGDDANIKELNDISEEDRRIISEILELSKSGENNPVNFKKANQRKVEEVTNRINKVIDKIPTRTITETNNLINAASMYVAKELGLKQTTQKQSKMPWWQRRIEGDIKRIRKDINLPEREKRGDLRKSGKMEKLEKKYNIKGKGITTVLEELKQRILAKAAKIKRYDQRRTQYKQNILFKQDQKRFYQELNGTARNENVIPDADESKKFWSDIWSVGKEHNRSAEWLNNIKNDIKDNQQGELEITSDMVTSQCRKLPNWKAPGKDGVQGFWLKKLRGLHGRIAKQLNNILNKEEELPEWLTFGRTILCLKDHSKGNAVDNFRPISCLPLMWKLMTGVIAEVMYKHLEGILPEEQKGCRRRSRGTKDQLLIDKAILKDCKRRHTNLAMAWIDYRKAYDMVPHSWIGECLEMFGIAVNVRQFLLSSMKKWKTELTSCGQQLGVVNIKRGIFQGDSLSPLLFVLCMVPLSLVLRRSKAGYEWGGHEFQINHLLFMDDLKLFGKSYEQIDSLVQTVHTFSIDIGMEFGIKKCGVLVLKRGKIAKMEGVLLPDGQVMKEIEDRGYRYLGILETDHLKEKEMKDLFSKEYKRRLKLVLKSKLSGKNKIMAANTWAVAILRYSAGVVEWKTDELKVLDRKTRKMMTLYGALHPKSDVDRVYLARQKGGRGLISCEMCVKAEENNLAWYVWNSNERLMAGVRKIKILDSEGAKEKNEFKRDRQNASLNRWTEKKMYGQFLREMPETVDKGKTWEWTRKSDLKVETEALIFAAQEQALRTNYVKFNIDKSVDSPLCRMCNQKGETINHILSECKMLAQKEYKRRHDNIARLVHWKLCCKYDMSRGEKWYEHQPEGVVENEKCKILWDMTIQCDHVIEARRPDIVVVEKENNKAIIVDIASPWDHRVYEKEGEKIEKYQDLKREIGRLWGIRHLEVVPVVVGALGVVSKRLDAWLEKLGVTIRTGLLQKTALLGTARILRKLLDS

SEQ ID NO: 22412 - protein, 1132 aa, Acropora muricata
MGESLNGLLDNGVNGTGAFCEGASSGRCPVGEQRRPGRHPATARMMWSKDVNKVVMECYLKSKPVNENGVPIRGYRQRMFRVWQEIGLFESTEQRICDQARAIRKNGWLSELEIEVIKRKINQEETGDANVQGLGDATTDENMENDEVQQEEGEFDMQDEPGDDANIKELNDISEEDRRIISEILELSKSGENNPVNFKKANQRQVEEITNRINRVIDKIPTRTITETNNLINAASMYVAKELGLKQTTQKQSKMPWWQRRIEGDIKRIRKDINLLEREKRGELRKSGKMEQLEKKYNIKGKGITTVLEELKQRILAKAAKIKRYDQRRTQYKQNILFNQKRFYQELNGTARNENVIPDADESKKFWSDIWSVGKEHNRSAEWLNNIKNDIKDNQQGEMEITSDMVTSQCRKLPNWKAPGKDGVQGFWLKKLRGLHGRIAKQLNNILNKEEELPEWLTFGRTILCLKDHSKGNAVDNFRPISCLPLRWKLMTGVIAEVMYKHLEGILPEEQKGCRRRSRGTKDQLLIDKAILKDCKRRHTNLAMAWIDYRKAYDMVPHSWIGECLEMFGIAVNVRQFLLSSMKKWKTELTSCGQQLGVVNIKRGIFQGDSLSPLLFVLCMVPLSLVLRRSKAGYEWGGHEFQINHLLFMDDLKLFGKSYEQIDSLVQTVHTFSIDIGMEFGIKKCGVLVLKRGKIAKMEGVLLPDGQVMKEIEDRGYRYLGILETDHLKEKEMKDLFSKEYKRRLKLVLKSKLSGKNKIMAANTWAVAILRYSAGVVEWKTDELKVLDRKTRKMMTLYGALHPKSDVDRVYLARQKGGRGLISCEMCVKAEENNLAWYVRNSNERLMAGVRKIKILDSEGAKEKNEFKRDRQNASLNRWTEKKMYGQFLREMPETVDKDKTWEWTRKSDLKVETEALIFAAQEQALRTNYVKFNIDKSVDSPLCRMCNQKGETINHILSECKMLAQKEYKRRHDNIARLVHWKLCCKYDMSRGEKWYEHQPEGVVENEKCKILWDMTIQCDHVIEARRPDIVVVEKENNKAIIVDIASPWDHRVYEKEGEKIEKYQDLKREIGRLWGIRHLEVVPVVVGALGVVSKRLDAWLEKLGVTIRMGLLQKTALLGTARILRKVLDS

SEQ ID NO: 22413 - protein, 992 aa, Montipora cactus
MENDEVQQEEGEFDMQDEPGDDANSKELNDISEEDRRLISEILELSKSGENNPVNFKKANRRQVEEITNRINKVIGKIPTRTITETNNLINAASMYVAKELGLKQTTQKQSKMPWWQRRTEGDIKRIRKDINLLEREKRGELRKSGKMEQLEKKYNIKGKGITTVLEELKQRILAKAAKIKRYDQRRTQYKQNILFKQDQKRFYQELNGTARNENVIPDADESKKFWSDIWSVGKEHNRSAEWLNNIKNDIKDNQQGELEITSDMVTSQCRKLPNWKAPGKDGVQGFWLKKLSGLHGRIAKQLNNILNKEEELPEWLTFGRTILCLKDHSKGNAVDNFRPISCLPLMWKLMTGVIAEVMYKHLEGILPEEQKGCRRRSRGTKDQLLIDKAILKDCKRRHTNLAMAWIDYRKAYDMVPHSWIGECLEMFGIAVNVRQFLLSSMKKWKTELTSCGQQLGVVNIKRGIFQGDSLSPLLFVVCMVPLSLVLRRSKAGYEQGGREFKINHLLFMDDLKLFGKSYEQIDSLVQTVHTFSIDIGMEFGLKKCGVLVQKRGKIVKMEGVLLPDGQVMKEIEDRGYRYLGILETDHLKEKEMKDLFSKEYKRRLKLVLKSKLSGKNKIMAANTWAVAILRYSAGVIEWKTDELKVLDRKTRKMMTLYGALHPKSDVDRVYLARQKGGRGLISCEMCVKAEENNLAWYVRNSNERLMAGVRKIKILDSEGAKEKNEFKRDRQNASLNRWTGKKMYGQFLREMPETADKDKTWEWTRKSDLKVETEALIFAAQEQALRTNYVKFNIDKSVDSPLCRMCNQKGETINHILSECKMLAQKEYKRRHDNIARLVHWKLCCKYDMSRGEKWYEHQPEGVVENEKCKILWDMTIQCDHVIEARRPDIVVVEKKNNKAIILDIASPWDHRVYEKEGEKIEKYQDLKREIGRLWGIRHLEVVPVVVGALGVVSKRLDAWLEKLGVTIRTGLLQKTALLGTARILRKVLDS

SEQ ID NO: 22414 - protein, 1134 aa, Acropora millepora
MGESLNGLLDNGVNGTGAFCEGASSGRCPVGEQRRPGRHPATARMMWSKDVNKVVMECYLKSKPVNENGVPIRGYRQRMFRVWQEIGLFESTEQRICDQARAIRKNGWLSELEIEVIKRKINQEETGDTNVQGLGDATTDENMENDEVQQEEGEFDMQDEPGDDANIKELNDISEEDRRIISEILELSKSGENNPVNFKKANQRQVEEITNRINKVIDKIPTRTITETNNLINAASMYVAKELGLKQTTQKQSKMPWWQRRIEGDIKRIRKDINLLEREKRGELRKSGKMEQLEKKYNIKGKGITTVLEELKQRILAKAAKIKRYDQRRTQYKQNILFKQDQKRFYQELNGTARNENVIPDADESKKFWSDIWSVGKEHNRSAEWLNNIKNDIKDNQQGELEITSDMVTSQCRKLPNWKAPGKDGVQGFWLKKLRGLHGRIAKQLNNILNKEEELPEWLTFGRTILCLKDHSKGNAVDNFRPISCLPLMWKLMTGVIAEVMYKHLEGILPEEQKGCRRRSRGTKDQLLIDKAILKDCKRRHTNLAMAWIDYRKAYDMVPHSWIGECLEMFGIAVNVRQFLLSSMKKWKTELTSCGQQLGVVNINRGIFQGDSLSPLLFVLCMVPLSLVLRRSKAGYEWGGHEFKINHLLFMDDLKLFGKSYEQIDSLVQTVHTFSIDIGMEFGIKKCGVLVLKRGKIAKMEGVLLPDGQVMKEIEDRGYRYLGILETDHLKEKEMKDLFSKEYKRRLKLVLKSKLSGKNKIMAANTWAVAILRYSAGVVEWKTNELKVLDRKTRKMMTLYGALHPKSDVDRVYLARQKGGRGLISCEMCVKAEENNLAWYVRNSNERLMAGVRKIKILDSEGAKEKNEFKRDRQNASLNRWTEKKMYGQFLREMPETVDKDKTWEWTRKSDLKVETEALIFAAQEQALRTNYVKFNIDKSVDSPLCRMCNQKGETINHILSECKMLAQKEYKRRHDNIARLVHWKLCCKYDMSRGEKWYEHQPEGVVENEKCKILWDMTIQCDHVIEARRPDIVVVEKENNKAIIVDIASPWDHRVYEKEGEKIEKYQDLKREIGRLWGIRHLEVVPVVVGALGVVSKRLDAWLEKLGVTIRMGLLQKTALLGTARILRKVLDS

SEQ ID NO: 22415 - protein, 975 aa, Montipora efflorescens
MKRLGVFLLPPGWDASTSQGYPQHLPGTHLYTWVERGTVRVKCLAPKNTTQCPQPGPRPLDPESSTLTMRPPHLPIIIIIIIIIIIIIIIIIIIIIIIIIIIIIIIIRMLRKDINILEREKRGELRKRGKFIQLEKKYNIGRKKITTVIEELKQRVFAKAAKVKRYEQRVMQYKQNMLFQQDQKRFYQDLNGTARNDNIIPDAENSKKFWGDIWSVGKEHKRNAEWLTNVRNDIRNNQQRDLEITSEMITTHCRKMPSWKAPGRDGVQGFWFKMLRALHGRIAEQLNNILNGEERLPEWLTFGRTILCLKDPSKGSAFDNFRPISCLPLMWKLMTGVIAEVMYEHLEEILPEEQKGCKRGSRGSKDQLLIDKAILKDCKRRRTNLAMAWIDYRKAYDMVPHSWIMECLEMFGVAANVRQFLASSMDEWKTELTSCGQTLGVVGINRGIFQGDSLSPLLFVLCMIPLSLVLRRSKVGYEWGGRECKINHLLFMDDLKLFGKSYEHIKSLAQTVHIFSSDIGMEFGIKKCGVLVLKRGKIAKMEGIVLPDGQVMKEIDDNGYKYLGILEADHLKEKEMKALISKEYKRRLKLVLKTKLSGRNKIMAVNTWAVAILRYSAGVIDWKSEELKELDRKSRKTMSLYGALHPKSDVDRLYLSRQKGGRGLISCEICVRAEENNLAWYLKNSNERVLAGVRGVGILNIDEAKEKRDFKQERQNASLNRWKEKKMHGQFLRDMPETVDKDKMWEWTRKSDLKIGTEAFIFAAQEQALRTNYVKFNIDKSVDSPLCRLCGEKGETINHIISECNKLAQKEYKRRHDNIARLVHWKLCSKYDIDRSEKWYEHQPERVVENESFKILWDMYIQCDHIIAARKPDIVVVEKENNKVINVDIASPWDHRVHEKEGEKIEKYQELNREIKNIWGIRHVDVVPIVVGALGGVSKRLDGWLAKLGIAIKKGLLQKTALLGTARILRKVLEN

SEQ ID NO: 22416 - protein, 1134 aa, Acropora hyacinthus
MGESLNGLLDNGVNGTGAFCEGASSGRCPVGEQRRPGRHPATARMMWSKDVNKVVMECYLKSKPVNENGVPIRGYRQRMFRVWQEIGLFESTEQRICDQARAIRKNGWLSELEIEVIKRKINQEETGDTNVQGLGDATTDENMENDEVQQEEGEFDMQDEPGDDANIKELNDISEEDRRIISEILELSKSGENNPVNFKKANQRQVEEITNRINKVIDKIPTRTITETNNLINAASMYVAKELGLKQTTQKQSKMPWWQRRIEGDIKRIRKDINLLEREKRGELRKSGKMEQLEKKYNIKGKGITTVLEELKQRILAKAAKIKRYDQRRTQYKQNILFKQDQKRFYQELNGTARNENVIPDADESKKFWSDIWSVGKEHNRSAEWLNNIKNDIKDNQQGELEITSDMVTSQCRKLPNWKAPGKDGVQGFWLKKLRGLHGRIAKQLNNILNKEEELPEWLTFGRTILCLKDHSKGNAVDNFRPISCLPLMWKLMTGVIAEVMYKHLEGILPEEQKGCRRRSRGTKDQLLIDKAILKDCKRRHTNLAMAWIDYRKAYDMVPHSWIGECLEMFGIAVNVRQFLLSSMKKWKTELTSCGQQLGVVNINRGIFQGDSLSPLLFVLCMVPLSLVLRRSKAGYEWGGHEFKINHLLFMDDLKLFGKSYEQIDSLVQTVHTFSIDIGMEFGIKKCGVLVLKRGKIAKMEGVLLPDGQVMKEIEDRGYRYLGILETDHLKEKEMKDLFSKEYKRRLKLVLKSKLSGKNKIMAANTWAVAILRYSAGVVEWKTDELKVLDRKTRKMMTLYGALHPKSDVDRVYLAREKGGRGLISCEMCVKAEENNLAWYVRNSNERLMAGVRKIKILDSEGAKEKNEFKRDRQNASLNRWTEKKMYGQFLREMPETVDKDKTWEWTRKSDLKVETEALIFAAQEQALRTNYVKFNIDKSVDSPLCRMCNQKGETINHILSECKMLAQKEYKRRHDNIARLVHWKLCCKYDMSRGEKWYEHQPEGVVENEKCKILWDMTIQCDHVIEARRPDIVVVEKENNKAIIVDIASPWDHRVYEKEGEKIEKYQDLKREIGRLWGIRHLEVVPVVVGALGVVSKRLDAWLEKLGVTIRTGLLQKTALLGTARILRKVLDS

SEQ ID NO: 22417 - protein, 1134 aa, Acropora cytherea
MGESLNGLLDNGVNGTGAFCEGASSGRCPVGEQRRPGRHPATARMMWSKDVNKVVMECYLKSKPVNENGVPIRGYRQRMFRVWQEIGLFESTEQRICDQARAIRKNGWLSELEIEVIKRKINQEETGDTNVQGLGDATTDENMENDEVQQEEGEFDMQDEPGDDANIKELNDISEEDRRIISEILELSKSGENNPVNFKKANQRHVEEITNRINKVIDKIPTRTITETNNLINAASMYVAKELGLKQTTQKQSKMPWWQRRIEGDIKRIRKDINLLEREKRGELRKSGKMEQLEKKYNIKGKGITTVLEELKQRILAKAAKIKRYDQRRTQYKQNILFKQDQKRFYQELNGTARNENVIPDADESKKFWSDIWSVGKEHNRSAEWLNNIKNDIKDNQQGELEITSDMVTSQCRKLPNWKAPGKDGVQGFWLKKLRGLHGRIAKQLNNILNKEEELPEWLTFGRTILCLKDHSKGNAVDNFRPISCLPLMWKLMTGVIAEVMYKHLEGILPEEQKGCRRRSRGTKDQLLIDKAILKDCKRRHTNLAMAWIDYRKAYDMVPHSWIGECLEMFGIAVNVRQFLLSSMKKWKTELTSCGQQLGVVNINRGIFQGDSLSPLLFVLCMVPLSLVLRRSKAGYEWGGHEFKINHLLFMDDLKLFGKSYEQIDSLVQTVHTFSIDIGMEFGIKKCGVLVLKRGKIAKMEGILLPDGQVMKEIEDRGYRYLGILETDHLKEKEMKDLFSKEYKRRLKQVLKSKLSGKNKIMAANTWAVAILRYSAGVVEWKTDELKVLDRKTRKMMTLYGALHPKSDVDRVYLARQKGGRGLISCEMCVKAEENNLAWYVRNSNERLMAGVRKIKILDSEGAKEKNEFKRDRQNASLNRWTEKKMYGQFLREMPETVDKDKTWEWTRKSDLKVETEALIFAAQEQALRTNYVKFNIDKSVDSPLCRMCNQKGETINHILSECKMLAQKEYKRRHDNIARLVHWKLCCKYDMSRGEKWYEHQPEGVVENEKCKILWDMTIQCDHVIEARRPDIVVVEKENNKAIIVDIASPWDHRVYEKEGEKIEKYQDLKREIGRLWGIRHLEVVPVVVGALGVVSKRLDAWLEKLGVTIRMGLLQKTALLGTARILRKVLDS

SEQ ID NO: 22418 - protein, 1027 aa, Acropora selago
MVIRVGIEVIKRKINQEETGDTNVQGLGDATTDENMENDEVQQEEGEFDMQDEPGDDANIKELNDISEEDRRIISEILELSKSGENNPVNFKKANQRQVEEITNKINKVIDKIPTRTITETNNLINAVSMYVAKELGLKQTTQKQSKMPWWQRRIEGDIKRIRKDINLLEREKRGELRKSGKMEQLEKKYNIKGKGITTVLEELKQRILAKAAKIKRYDQRRTQYKQNILFKQDQKRFYQELNGTARNENVIPDADESKKFWSDIWSVGKEHNRSAEWLNNIKNDIKDNQQGELEITSDMVTSQCRKLPNWKAPGKDGVQGFWLKKLRGLHGRIAKQLNNILNKEEELPEWLTFGRTILCLKDHSKGNAVDNFRPISCLPLMWKLMTGVIAEVMYKHLEGILPEEQKGCRRRSRGTKDQLLIDKAILKDCKRRHTNLAMAWIDYRKAYDMVPHSWIGECLEMFGIAVNVRQFLLSSMKKWKTELTSCGQQLGVVNINRGIFQGDSLSPLLFVLCMVPLSLVLRRSKAGYKWGGREFQINHLLFMDDLKLFGKSYEQIDSLVQTVHTFSIDIGMEFGIKKCGVLVLKRGKIAKMEGVLLPDGQVMKEIEDRGYRYLGILETDHLKEKEMKDLFSKEYKSRLKLVLKSKLSGKNKIMAANTWAVAILRYSAGVVEWKTNELKVLDRKTRKMMTLYGALHPKSDVDRVYLARQKGGRGLISCEMCVKAEENNLAWYVRNSNERLMAGVRKIKILDSEGAKEKNEFKRDRQNASLNRWTEKKMYGQFLREMPETVDKDKTWEWTRKSDLKVETEALIFAAQEQALRTNYVKFNIDKSVDSPLCRMCNQKGETINHILSECKMLAQKEYKRRHDNIARLVHWKLCCKYDMSRGEKWYEHQPEGVVENEKCKILWDMTIQCDHVIEARRPDIVVVEKENNKAIIVDIASPWDHRVYEKEGEKIEKYQDLKREIGRLWGIRHLEVVPVVVGALGVVSKRLDAWLEKLGVTIRTGLLQKTALLGTARILRKLLDS

SEQ ID NO: 22419 - protein, 1134 aa, Acropora hyacinthus
MGESLNGLLDNGVNGTGAFCEGASSGRCPVGEQRRPGRHPTTARMMWSKDVNKVVMECYLKSKPVNENGVPIRGYRQRMFRVWQEIGLFESTEQRICDQARAIRKNGWLSELEIEVIKRKINQEETGDTNVQGLGDATTDENMENDEVQQEEGEFDMQDEPGDDANIKELNDISEEDRRIISEILELSKSGENNPVNFKKANQRQVEEITNRINKVIDKIPTRTITETNNLINAASMYVAKELGLKQTTQKQSKMPWWQRRIEGDIKRIRKDINLLEREKRGELRKSGKMEQLEKKYNIKGKGITTVLEELKQRILAKAAKIKRYDQRRTQYKQNILFKQDQKRFYQELNGTARNENVIPDADESKKFWSDIWSVGKEHNRSAEWLNNIKNDIKDNQQGELEITSDMVTSQCRKLPNWKAPGKDGVQGFWLKKLRGLHGRIAKQLNNILNKEEELPEWLTFGRTILCLKDHSKGNAVDNFRPISCLPLMWKLMTGVIAEVMYKHLEGILPEEQKGCRRRSRGTKDQLLIDKAILKDCKRRHTNLAMAWIDYRKAYDMVPHSWIGECLEMFGIAVNVRQFLLSSMKKWKTELTSCGQQLGVVNINRGIFQGDSLSPLLFVLCMVPLSLVLRRSKAGYEWGGHEFKINHLLFMDDLKLFGKSYEQIDSLVQTVHTFSIDIGMEFGIKKCGVLVLKRGKIAKMEGVLLPDGQVMKEIEDRGYRYLGILETDHLKEKEMKDLFSKEYKRRLKLVLKSKLSGKNKIMAANTWAVAILRYSAGVVEWKTDELKVLDRKTRKMMTLYGALHPKSDVDRVYLAREKGGRGLISCEMCVKAEENNLAWYVRNSNERLMAGVRKIKILDSEGAKEKNEFKRDRQNASLNRWTEKKMYGQFLREMPETVDKDKTWEWTRKSDLKVETEALIFAAQEQALRTNYVKFNIDKSVDSPLCRMCNQKGETINHILSECKMLAQKEYKRRHDNIARLVHWKLCCKYDMSRGEKWYEHQPEGVVENEKCKILWDMTIQCDHVIEARRPDIVVVEKENNKAIIVDIASPWDHRVYEKEGEKIEKYQDLKREIGRLWGIRHLEVVPVVVGALGVVSKRLDAWLEKLGVTIRMGLLQKTALLGTARILRKVLDS

SEQ ID NO: 22420 - protein, 1089 aa, Acropora selago
MWSKDVNKVVMECYLKSKPVNENGVPIRGYRQRMFRVWQEIGLIESTEQRIYDQARAIRKNGWLSELEIEVIKRKINQEETGDTNVQGLGDACTDENIENDEVQQEEGEFDMQDEPGDDANIKELNDISEEDRRIISEILELSKSGENNPVNFKKANQRKVEEITNRINKVIDKIPTRTITETNNLINAASMYVAKELGLKQTTQKQSKMPWWQRRIEGDIKRIRKDINLLEREKRGELRKSGKMEQLEKKYNIKGKGITTVLEELKQRILAKAAKIKRYDQRRTQYKQNILFKQDQKRFYQELNGTARNENVIPDADESKKFWSDIWSVGKEHNRSAEWLNNIKNDIKDNQQGELEITSDMVTSQCRKLPNWKAPGKDGVQGFWLKKLRGLHGRIAKQLNNILNKEEELPEWLTFGRTILCLKDHSKGNAVDNFRPISCLPLMWKLMTGVIAEVMYKHLEGILPEEQKGCRRRSRGTKDQLLIDKAILKDCKRRHTNLAMAWIDYRKAYDMVPHSWIGECLEMFGIAVNVRQFLLSSMKKWKTELTSCGQQLGVVNINRGIFQGDSLSPLLFVLCMVPLSLVLRRSKAGYEWGGHEFQINHLLFMDDLKLFGKSYEQIDSLVQTVHTFSIDIGMEFGIKKCGVLVLKRGKIAKMEGVLLPDGQVMKEIEDRGYRYLGILETDHLKEKEMKDLFSKEYKRRLKLVLKSKLSGKNKIMAANTWAVAILRYSAGVVEWKTDELKVLDRKTRKMMTLYGALHPKSDVDRVYLARQKGGRGLISCEMCVKAEENNLAWYVRNSNERLMAGVRKIKILDSEGAKEKNEFKRDRQNASLNRWTEKKMYGQFLREMPETVDKDKTWAWTRKSDLKVETEALIFAAQEQALRTNYVKFNIDKSVDSPLCRMCNQKGETINHILSECKMLAQKEYKRRHDNIARLVHWKLCCKYDMSRGEKWYEHQPEGVVENEKCKILWDMTIQCDHVIEARRPDIVVVEKENNKAIIVDIASPWDHRVYEKEGEKIEKYQDLKREIGRLWGIRHLEVVPVVVGALGVVSKRLDAWLEKLGVTIRMGLLQKTALLGTARILRKVLDS

SEQ ID NO: 22421 - protein, 1134 aa, Acropora intermedia
MGESLNGLLDNGVNGTGAFCEGASSGRCPVGEQRRPGRHPATARMMWSKDVNKVVMECYLKSKPVNENGVPIRGYRQRMFRVWQEIGLFESTEQRICDQARAIRKNGWLSELEIEVIKRKINQEETGDTNVQGLGDATTDENMENDEVQQEEGEFDMQDEPGDDANIKELNDISEEDRRIISEILELSKSGENNLVNFKKANQRQVEEITNRINKVIDKIPTRTITETNNLINAASMYVAKELGLKQTTQKQSKMPWWQRRIEGDIKRIRKDINLLEREKRGELRKSGKMEQLEKKYNIKGKGITTVLEELKQRILAKAAKIKRYDQRRTQYKQNILFKQDQKRFYQELNGTARNENVIPDADESKKFWSDIWSVGKEHNRSAEWLNNIKNDIKDNQQGELEITSDMVTSQCRKLPNWKAPGKDGVQGFWLKKLRGLHGRIAKQLNNILNKEEELPEWLTFGRTILCLKDHSKGNAVDNFRPISCLPLMWKLMTGVIAEVMYKHLEGILPEEQKGCRRRSRGTKDQLLIDKAILKDCKRRHTNLAMAWIDYRKAYDMVPHSWIGECLEMFGIAVNVRQFLLSSMKKWKTELTSCGQQLGVVNIKRGIFQGDSLSPLLFVLCMVPLSLVLRRSKAGYEWGGHEFQINHLLFMDDLKLFGKSYEQIDSLVQTVHTFSIDIGMEFGIKKCGVLVLKRGKIAKMEGILLPDGQVMKEIEDRGYRYLGILETDHLKEKEMKDLFSKEYKRRLKLVLKSKLSGKNKIMAANTWAVAILRYSAGVVEWKTDELKVLDRKTRKMMTLYGALHPKSDVDRVYLARQKGGRGLISCEMCVKAEENNLAWYVRNSNERLMAGVRKIKILDSEGAKEKNEFKRDRQNASLNRWTEKKMYGQFLREMPQTVHKDKTWEWTRKSDLKVETEALIFAAQEQALRTNYVKLNIDKSVASPLCRMCNQKGETINHILSECKMLAQKEYKRKHDNIARLVHWKLCCKYDMSRGEKWYEHQPEGVVENEKCKILWDMTIQCEHVIEARRPDIVVVEKENNKAIIVDIASPWDHRVYEKEGEKIEKYQDLKREIGRLWGIRHLEVVPVVVGALGVVSKRLDAWLEKLGVTIRTGLLQKTALLGTARILRKLLDS

SEQ ID NO: 22422 - protein, 1134 aa, Montipora capitata
MGESLNGLLDNGVNGTGAFCEGASSGRCPVGEQRRPGRHSVTARMMWSKDVNKVVMECYLKSKPVNENGVPIRGYRQRMFRVWQERGLFESTEQRICDQARAIRKNGWLSELEIEVIKRKINQEETGDTNVQGLGDATTDENMENDEVQQEEGEFDMQDEPGDDANSKELNDISEEDWRLISEIFELSKSGENNPVNFKKANRRQVEEITNRINKVIDKIPTRTITETNNLINAASMYVAKELGLKQTTQKQSKMPWWQRRIEGDIKRIRKDINLLEREKRGELRKSGKMEQLEKKYNIKGKGITTVLEELKQRILAKAAKIKRYDQRRTQYKQNILFKQDQKRFYQELNGTARNENVIPDADESKKFWSDIWSVGKEHNRSAEWLNNIKNDIKDNQQGELEITSYMVTSQCRKLPNWKAPGKDGVQGFWLKKLSGLHGRIAKQLNNILNKEEELPEWLTFGRTILCLKDHSRGNAVDNFRPISCLPLMWKLMTGVIAEVMYKHLEGILPEEQKGCRRRSRGTKDQLLIDKAILKDCKRRHTNLAMAWIDYRKAYDMVPHSWIGECLEMFGIAVNVRQFLLSSMKKWKTELTSCGQQLGVVNIKRGIFQGDSLSPLLFVLCMVPLSLVLRRSKAGYEWGGREFKINHLLFMDDLKLFGKSYEQIDSLVQTVHTFSIDIGMEFGIKKCGVLVLKRGKIVKMEGVLLPDGQVMKEIEERGYRYLGILETDHLKEKEMKDLFSKEYKRRLKLVLKSKLSGKNKIMAANTWAVAILRYSAGVIEWKTDELKVLDRKTRKMMTLYGALHPKSDVDRVYLARQKGGRGLISCEMCVKAEENNLAWYVRNSNERLMAGVRKIKILDSEGAKEKNEFKRDRQNASLNRWTGKKMYGQFLREMPETVDKDKTWEWTRKSDLKVETEALIFAAQEQALRTNYVKFKIDKSVDSPLCRMCNQKGETINHILSECKMLAQKEYKRRHDNIARLVHWKLCCKYDMSRGEKWYEHQPEGVVENEKCKILWDMTIQCDHVIEARRPDIVVVEKKNNKAIIVDIASPWDHRVYEKEGEKIEKYQDLKREIGRLWGIRHLEVVPVVVGALGVVSKRLDAWLEKLGVTIRTGLLQKTALLGTARILRKVLDS

SEQ ID NO: 22423 - protein, 1134 aa, Acropora intermedia
MGESLNGLLDNGVNGTGAFCEGASSGRCPVGEQRRPGRHPATARMMWSKDVNKVVMECYLKSKPVNENGVPIRGYRQRMFRVWQEIGLFESTEQRICDQARAIRKNGWLSELEIEVIKRKINQEETGDTNVQGLGDATTDENMENDEVQQEEGEFDMQDEPGDDANIKELNDISEEDRRIISEILELSKSGENNLVNFKKANQRQVEEITNRINKVIDKIPTRTITETNNLINAASMYVAKELGLKQTTQKQSKMPWWQRRIEGDIKRIRKDINLLEREKRGELRKSGKMEQLEKKYNIKGKGITTVLEELKQRILAKAAKIKRYDQRRTQYKQNILFKQDQKRFYQELNGTARNENVIPDADESKKFWSDIWSVGKEHNRSAEWLNNIKNDIKDNQQGELEITSDMVTSQCRKLPNWKAPGKDGVQGFWLKKLRGLHGRIAKQLNNILNKEEELPEWLTFGRTILCLKDHSKGNAVDNFRPISCLPLMWKLMTGVIAEVMYKHLEGILPEEQKGCRRRSRGTKDQLLIDKAILKDCKRRHTNLAMAWIDYRKAYDMVPHSWIGECLEMFGIAVNVRQFLLSSMKKWKTELTSCGQQLGVVNIKRGIFQGDSLSPLLFVLCMVPLSLVLRRSKAGYEWGGHEFQINHLLFMDDLKLFGKSYEQIDSLVQTVHTFSIDIGMEFGIKKCGVLVLKRGKIAKMEGILLPDGQVMKEIEDRGYRYLGILETDHLKEKEMKDLFSKEYKRRLKLVLKSKLSGKNKIMAANTWAVAILRYSAGVVEWKTDELKVLDRKTRKMMTLYGALHPKSDVDRVYLARQKGGRGLISCEMCVKAEENNLAWYVRNSNERLMAGVRKIKILDSEGAKEKNEFKRDRQNASLNRWTEKKMYGQFLREMPETVDKDKTWEWTRKSDLKVETEALIFAAQEQALRTNYVKFNIDKSVASPLCRMCNQKGETINHILSECKMLAQKEYKRRHDNMARLVHWKLCCKYDMSRGEKWYEHQPEGVVENEKCKILWDMNIQCDHVIEARRPDIVVVEKENNKAIIVDIASPWDHRVYEKEGEKIEKYQDLKREIGRLWGIRHLEVVPVVVGALGVVSKRLDAWLEKLGVTIRTGLLQKTALLGTARILRKLLDS

SEQ ID NO: 22424 - protein, 898 aa, Montipora cactus
MYVAKELGLKQTTQKQSKMPWWQRRIEGDIKRIRKDINLLEREKRGELRKSGKMEQLEKKYNIKGKGITTVLEELKQRILAKAAKIKRYDQRRTQYKQNILFKQDQKRFYQELNGTARNENVIPDADESKKFWSDIWSVGKEHNRSAEWLNNIKNDIKDNQQGELEITSDMVTSQCRKLPNWKAPGKDGVQGFWLKKLSGLHGRIAKQLNNILNKEEELPEWLTFGRTILCLKDHSKGNAVDNFRPISCLPLMWKLMTGVIAEVMYKHLEGILPEEQKGCRRRSRGTKDQLLIDKAILKDCKRRHTNLAMAWIDYRKAYDMVPHSWIGECLEMFGIAVNVRQFLLSSMKKWKTELTSCGQQLGVVNIKRGIFQGDSLSPLLFVLCMVPLSLVLRRSKAGYEWGGREFKINHLLFMDDLKLFGKSYEQIDSLVQTVHTFSIDIGMEFGIKKCGVLVLKRGKIVKMEGVLLPDGQVMKEIEDRGYRYLGILETDHLKEKEMKDLFSKEYKRRLKLVLKSKLSGKNKIMAANTWAVAILRYSAGVIEWKTDELKVLDRKTRKMMTLYGALHPKSDVDRVYLARQKGGRGLISCEMCVKAEENNLAWYVRNSNERLMAGVRKIKILDSEGAKEKNEFKRDRQNASLNRWTGKKMYGQFLREMPETVDKDKTWEWTRKSDLKVETEALIFAAQEQALRTNYVKFNIDKSVDSPLCRMCNQKGETINHILSECKMLAQKEYKRRHDNIARLVHWKLCCKYDMSRGEKWYEHQPEGVVENEKCKILWDMTIQCDHVIEARRPDIVVVEKKNNKAIIVDIASPWDHRVYEKEGEKIEKYQDLKREIGRLRGIRHLEVVPVVVGALGVVSKRLDAWLEKLGVTIRTGLLQKTALLGTARILRKVLDS

SEQ ID NO: 22425 - protein, 1134 aa, Acropora intermedia
MGESLNGLLDNGVNGTGAFCEGASSGRCPVGEQRRPGRHPTTARMMWSKDVNKVVMECYLKSKPVNENGVPIRGYRQRMFRVWQEIGLFESTEQRICDQARAIRKNGWLSELEIEVIKRKINQEETGDTNVQGLGDATTDENMENDEVQQEEGEFDMQDEPGDDANIKELNDISEEDRRIISEILELSKSGENNLVNFKKANQRQVEEITNRINKVIDKIPTRTITETNNLINAASMYVAKELGLKQTTQKQSKMPWWQRRIEGDIKRIRKDINLLEREKRGELRKSGKMEQLEKKYNIKGKGITTVLEELKQRILAKAAKIKRYDQRRTQYKQNILFKQDQKRFYQELNGTARNENVIPDADESKKFWSDIWSVGKEHNRSAEWLNNIKNDIKDNQQGELEITSDMVTSQCRKLPNWKAPGKDGVQGFWLKKLRGLHGRIAKQLNNILNKEEELPEWLTFGRTILCLKDHSKGNAVDNFRPISCLPLMWKLMTGVIAEVMYKHLEGILPEEQKGCRRRSRGTKDQLLIDKAILKDCKRRHTNLAMAWIDYRKAYDMVPHSWIGECLEMFGIAVNVRQFLLSSMKKWKTELTSCGQQLGVVNIKRGIFQGDSLSPLLFVLCMVPLSLVLRRSKAGYEWGGHEFQINHLLFMDDLKLFGKSYEQIDSLVQTVHTFSIDIGMEFGIKKCGVLVLKRGKIAKMEGILLPDGQVMKEIEDRGYRYLGILETDHLKEKEMKDLFSKEYKRRLKLVLKSKLSGKNKIMAANTWAVAILRYSAGVVEWKTDELKVLDRKTRKMMTLYGALHPKSDVDRVYLARQKGGRGLISCEMCVKAEENNLAWYVRNSNERLMAGVRKIKILDSEGAKEKNEFKRDRQNASLNRWTEKKMYGQFLREMPETVDKDKTWEWTRKSDLKVETEALIFAAQEQALRTNYVKFNIDKSVASPLCRMCNQKGETINHILSECKMLAQKEYKRRHDNIARLVHWKLCCKYDMSRGEKWYEHQPEGVVENEKCKILWDMTIQCDHVIEARRPDIVVVEKENNKAIIVDIASPWDHRVYEKEGEKIEKYQDLKREIGRLWGIRHLEVVPVVVGALGVVSKRLDTWLEKLGVTIRMGLLQKTALLGTARILRKVLDS

SEQ ID NO: 22426 - protein, 1134 aa, Acropora gemmifera
MGESLNGLLDNGVNGTGAFCEGALSGRCPVGEQRRPGPHPATARMMWSKDVNKVVMECYLKSKPVNENGVPIRGYRQRMFRVWQEIGLFESTEQRICDQARAIRKNGWLSELEIEVIKRKINQEETGDTDVQGLGDATTDENMENDEVQQEEGEFDMQDEPGDDANIKELNDISEEDRRIISEILELSKSGENNLVNFKKANQRQVEEITNRINKVIDKIPTRTITETNNLINAASMYVAKELGLKQTTQKQSKMPWWQRRIEGDIKRIRKDINLLEREKRGELRKSGKMEQLEKKYNIKGKGITTVLEELKQRILAKAAKIKRYDQRRTQYKQNILFKQDQKRLYQELNGTARNENVIPDADESKKFWSDIWSVGKEHNRSAEWLNNIKNDIKDNQQGELEITSDMVTSKCRKLPNWKAPGKDGVQGFWLKKLRGLHGRIAKQLNNILNKEEELPEWLTFGRTILCLKDHSKGNAVDNFRPISCLPLMWKLMTGVIAEVMYKHLEGILPEEQKGCRRRSRGTKDQLLIDKAILKDCKRRHTNLAMAWIDYRKAYDMVPHSWIGECLEMFGIAVNVRQFLLSSMKKWKTELTSCGQQLGVVNIKRGIFQGDSLSPLLFVLCMVPLSLVLRRSKAGYEWGGHEFQINHLLFMDDLKLFGKSYEQIDSLVQTVHTFSIDIGMEFGIKKCGVLVLKRGKIAKMEGILLPDGQVMKEIEDRGYRYLGILETDHLKEKEMKDLFSKEYKRRLKLVLKSKLSGKNKIMAANRWAVAILRYSAGVVEWKTDELKVLDRKTRKMMTLYGALHPKSDVDRVYLARQKGGRGLISCEMCVKAEENNLAWYVRNSNERLMAGVRKIKILDSEGAKEKNEFKRDRQNASLNRWTEKKMYGQFLREMPETVDKDKTWEWTRKSDLKVETEALIFAAQEQALRTNYVKFNIDKSVASPLCRMCNQKGETINHILSECKMLAQKEYKRRHDNIARLVHWKLCCKYDMSRGEKWYEHQPEGVVENEKCKILWDMTIQCDHVIEARRPDIVVVEKENNKAIIVDIASPWDHRVYEKEGEKIEKYQDLKREIGRLWGIRHLEVVPVVVGALGVVSKRLDAWLEKLGVTIRTGLLQKTALLGTARILRKLLDS

SEQ ID NO: 22427 - protein, 1134 aa, Acropora hyacinthus
MGESLNGLLDNGVNGTGAFCEGASSGRCPVGEQRRPGRHPATARMMWSKDVNKVVMECYLKSKPVNENGVPIRGYRQRMFRVWQEIGLFESTEQRICDQARAIRKNGWLSELEIEVIKRKINQEETGDTNVQGLGDASTDENIENDEVQQEEGEFDMQDEPGDDANIKELNDISEEDRRIISEILELSKSGENNPVNFKKANQRKVEEITNRINKVIDKIPTRTITETNNLINAASMYVAKELGLKQTTQKQSKMPWWQRRIEGDIKRIRKDINLLEREKRGELRKSGKMEQLEKKYNIKGKGITTVLEELKQRILAKAAKIKRYDQRRTQYKQNILFKQDQKRFYQELNGTARNENVIPDADESKKFWSDIWSVGKEHNRSAEWLNNIKNDIKDNQQGELEITSDMVTSQCRKLPNWKAPGKDGVQGFWLKKLRGLHGRIAKQLNNILNKEEELPEWLTFGRTILCLKDHSKGNAVDNFRPISCLPLMWKLMTGVIAEVMYKHLEGILPEEQKGCRRRSRGTKDQLLIDKAILKDCKRRHTNLAMAWIDYRKAYDMVPHSWIGECLEMFGIAVNVRQFLLSSMKKWKTELTSCGQQLGVVNINRGIFQGDSLSPLLFVLCMVPLSLVLRRSKAGYEWGGHEFKINHLLFMDDLKLFGKSYEQIDSLVQTVHTFSIDIGMEFGIKKCGVLVLKRGKIAKMEGVLLPDGQVMKEIEDRGYRYLGILETDHLKEKEMKDLFSKEYKRRLKLVLKSKLSGKNKIMAANTWAVAILRYSAGVVEWKTDELKVLDRKTRKMMTLYGALHPKSDVDRVYLAREKGGRGLISCEMCVKAEENNLAWYVRNSNERLMAGVRKIKILDSEGAKEKNEFKRDRQNASLNRWTEKKMYGQFLREMPETVDKDKTWEWTRKSDLKVETEALIFAAQEQALRTNYVKFNIDKSVDSPLCRMCNQKGETINHILSECKMLAQKEYKRRHDNIARLVHWKLCCKYDMSRGEKWYEHQPEGVVENEKCKILWDMTIQCDHVIEARRPDIVVVEKENNKAIIVDIASPWDHRVYEKEGEKIEKYQDLKREIGRLWGIRHLEVVPVVVGALGVVSKRLDAWLEKLGVTIRTGLLQKTALLGTARILRKVLDS

SEQ ID NO: 22428 - protein, 1134 aa, Acropora awi
MGESLNGLLDNGVNGTGAFCEGASSGRCPVGEQRRPGRHPATARMMWSKDVNKVVMECYLKSKPVNENGVPIRGYRQRMFRVWQEIGLFESTEQRICDQARAIRKNGWLSELEIEVIKRKINQEETGDTNVQGLGDATTDENMENDEVQQEEGEFDMQDEPGDDANIKELNDISEEDRRIISEILELSKSGENNLVNFKKANQRQVEEITNRINKVIDKIPTRTITETNNLINAASMYVAKELGLKQTTQKQSKMPWWQRRIEGDIKRIRKDINLLEREKRGELRKSGKMEQLEKKYNIKGKGITTVLEELKQRILAKAAKIKRYDQRRTQYKQNILFKQDQKRFYQELNGTARNENVIPDADESKKFWSDIWSVGKEHNRSAEWLNNIKNDIKDNQQGELEITSDMVTSQCRKLPNWKAPGKDGVQGFWLKKLRGLHGRIAKQLNNILNKEEELPEWLTFGRTILCLKDHSKGNAVDNFRPISCLPLMWKLMTGVIAEVMYKHLEGILPEEQKGCRRRSRGTKDQLLIDKAILKDCKRRHTNLAMAWIDYRKAYDMVPHSWIGECLEMFGIAVNVRQFLLSSMKKWKTELTSCGQQLGVVNIKRGIFQGDSLSPLLFVLCMVPLSLVLRRSKAGYEWGGHEFQINHLLFMDDLKLFGKSYEQIDSLVQTVHTFSIDIGMEFGIKKCGVLVLKRGKIAKMEGILLPDGQVMKEIEDRGYRYLGILETDHLKEKEMKDLFSKEYKRRLKLVLKSKLSGENKIMAANTWAVAILRYSAGVVEWKIDELKVLDRKTRKMMTLYGALHPKSDVDRVYLAREKGGRGLISCEMCVKAEENNLAWYVRNSNERLMAGVRKTKILDSEGAKEKNEFKRDRQNASLNRWTEKKMYGQFLREMPETVDKDKTWEWTRKSDLKVETEALIFAAQEQALRTNYVKFNIDKSVASPLCRMCNQKGETINHILSECKMLAQKENKRRRDNIARLVHWKLCCKYDMSRGEKWYEHQPEGVVENEKCKILWDMTIQCDHVIEARRPDIVVVEKENDKAIIVDIASPWDHRVYEKEGQTIEKYQDLKREIGRLWGIRHLEVVPVVVGALGVVSKRLDAWLEKLGVTISTGLLQKTALLGTARILRKLLDS

SEQ ID NO: 22429 - protein, 990 aa, Acropora muricata
MENDEVQQEEGEFDMQDESGDDANIKELNDIPEEDRRIISEILKLSKSGENNPVNFKKANQRQVEEITNRINKVIDKIPTRTITKTNNLINAASMYVAKELGLKQTTQKQSKMPWWRIEGDIKRIRKDINLLEREKRGELRKSGKMEQLEKKYNIKGKGITTVLEELKQRILAKAAKIKRYDQRRTQYKQNILFKQDQKRFYQELNGTARNENVIPDADESKKFWSDIWSVGKEHNRSAEWLNNIKNDIKDNQQGELEITSDMVTSQCRKLPNWKAPGKDGVQGFWLKKLRGLHGRIAKQLNNILNKEEELPEWLTFGRTILCLKDHSKGNAVDNFRPISCLPLMWKLMTGVIAEVMYKHLEGILPEEQKGCRRRSRGTKDQLLIDKAILKDCKRRHTNLAMAWIDYRKAYDMVPHSWIGECLEMFGIAVNVRQFLLSSMKKWKTELTSCGQQLGVVNINRGIFQGDSLSPLLFVLCMVPLSLVLRRSKAGYKWGGHEFQINHLLFMDDLKLFGKSYEQIDSLVQTVHTFSIDIGMEFGIKKCGVLVLKRGKIAKMEGVLLPDGQVMKEIEDRGYRYLGILETDHLKEKEMKDLFSKEYKSRLKLVLKSKLSGKNKIMAANTWAVAILRYSAGVVEWKTNELKVLDRKTRKMMTLYGALHPKSDVDRVYLARQKGGRGLISCEMCVKAEENNLAWYVRNSNERLMAGVRKIKILDSEGAKEKNEFKRDRQNASLNRWTEKKMYGQFLREMPETVDKDKTWEWTRKSDLKVETEALIFAAQEQALRTNYVKFNIDKSVDSPLCRMCNQKGETINHILSECKMLAQKEYKRRHDNIARLVHWKLCCKYDMSRGEKWYEHQPEGVVENEKCKILWDMTIQCDHVIEARRPDIVVVEKENNKAIIVDIASPWDHRVYEKEGEKIEKYQDLKREIGRLWVIRHLEVVPVVVGALGVVSKRLDAWLEKLGVTIRTGLLQKTALLGTARILRKLLDS

SEQ ID NO: 22430 - protein, 1132 aa, Acropora acuminata
MPVWSQNWCLTDLRDIDRQARKIMCESGGKHPLGLKATVYLPRALGGRGMRSVEEEYKMIKIKSAIKLYSNEDSTMRLVRAFEENAVHQGHQSLVKETRMFAEELGFTLDLSFPHPKCRDNTDGADVPRDKIKRHLKKAALEQRKTEVKEKKWPGKLLAARWEEDQLNQRSCFAWLKNWDTASTHIIAEILELYEQLTLKKVYHARNTQTSHPNDTLCRLCGKTAESIPHVLASMYVAKELGLKQTTQKQRKMPWWQRRIEGDIKRIRKDINLLEREKRGELRKSGKMEQLEKKYNAKGKGITTVLEELKQRILAKAAKIKRYDQRRTQYKQNILFKQDQKRFYQELNGTARNENVIPDADESRKFWSDIWSVGKEHNRSAEWLNNIKNDIKDNQQGELEIISDMVTSQCRKLPNWKAPGKDGVQGFWLKKLRGLHGRIAKQLNNILNKEEELPEWLTFGRTILCLKDHSKGNAVDNFRPISCLPLMWKLMTGVIAEVMYKHLEGILPEEQKGCRRRSRGTKDQLLIDKAILKDCKRRHTNLAMAWIDYRKAYDMVPHSWIGECLEMFGIAVNVRQFLLSSMKKWKTELTSCGQQLGVVNIKRGIFQGDSLSPLLFVLCMVPLSLVLRRSKAGYEWGGHEFQINHLLFMDDLKLFGKSYEQIDSLVQTVHTFSIDIGMEFGIKKCGVLVLKRGKIAKMEGVLLPDGQVMKEIEDRGYRYLGILETDHLKEKEMKDLFSKEYKRRLKLVLKSKLSGKNKIMAANTWAVAILRYSAGVVEWKTDELKVLDRKTRKMMTLYGALHPKSDVDRVYLARQKGGRGLISCEMCVKAEENNLAWYVRNSNERLMAGVRKIKILDSEGAKEKNEFKRDRQNASLNRWTEKKMYGQFLREMPETVDKDKTWEWTRKSDLKVETEALIFAAQEQALRTNYVKFNIDKSVDSPLCRMCNQKGETINHILSECKMLAQKEYKRRHDNIARLVHWKLCCKYDMSRGEKWYEHQPEGVVENEKCKILWDMTIQCDHVIEARRPDIVVVEKENNKAIIVDIASPWDHRVYEKEGEKIEKYQDLKREIGRLWGIRHLEVVPVVVGALGVVSKRLDAWLEKLGVTIRTGLLQKTALLGTARILRKVLDS

SEQ ID NO: 22431 - protein, 673 aa, Tenebrio molitor
MTSCIKVIIYDHCQKLNILNEEQKGCVKECFGCKEQLIIDTVIMEQARKNNRNIYTAFIDYKKAYDSVPHSWLIKILKIYKINLDLINFLSHVMTFWRTTLNLSINNIKLKSEPIQIKRGIYQGDSLSPLWFCLAINPLTNLLNSTGYGFNIRHNNTTLSKLNHLLYMDDIKLYASKKNHILSLLTITENFSNDISMSFGINKCKTQSICRGHYENLEYITKEGEIIKNLNKGEFYKYLGNQSNHIQHSIMKENLEKQFYLRIKSILKSKLNGNNLIKAVNTYAVPLLTYSFGIIKWSKTNLQNINIQTRVLFTKFCKHHPKSAIERFNLPRENGGRGFSNLEILQHNQIASLKNYFLNRARDNTFFNALVSADKGYTPLNLSDNIISDIVEPNIPDTIANIKQKSLHGRYFKELEQPEINIQASHAWLKKSNIHPETEGFIFAIQDRVINTRNYKKHICGLQSIIDKCRICGTEGETIEHIISSCTVLAQSEYKKRHDIFAKIIHMNLAVKFNLLKDTQPHYIYKPESCLENDNYKLYFDRTVLTDIHIQHNRPDIIILNKQQKQAYLLDIAVLNSHNITQTYNTKINKYLELSVAMRNLWCLEKISILLFIISATGIVPQSLFKNLKILDLENTLVVEIQKGISCHIVRKFLNIDTEHKTQKSQNAEARRR

SEQ ID NO: 22432 - protein, 677 aa, Tenebrio molitor
MTSCIKVIIYDHCQKLNILNEEQKGCVKECFGCKEQLIIDTVIMEQARKNNRNIYTAFIDYKKAYDSVPHSWLIKILKIYKINLDLINFLSHVMTFWRTTLNLSINNTKLKSEPIQIKRGIYQGDSLSPLWFCLAINPLTNLLNSTGYGFNIRHNNTTLSKLNHLLYMDDIKLYASKKNHILSLLTITENFSNDISMSFGIDKCKTQSICRGHYENLEYITKEGEIIKNLNKGEFYKYLGINQSNHIQHSIIKENLEKQFYLRIKSILKSKLNGNNLIKAVNTYAVPLLTYSFGIIKWSKTNLQNINIQTRVLFTKFCKHHPKSAIERFNLPRENGGRGFSNLEILQHNQIASLKNYFLNRARDNTFFNALVSADKGYTPLNLSDNIISDIVEPNIPDTIANIKQKSLHGRYFKELEQPEINILASHAWLKKSNIHPETEGFIFAIQDRVINTRNYKKHICGLQSIIDKCRICGTEGETIEHIISSCTVLAQSEYKKRHDIFAKIIHMNLAVKFNLLKDTQPHYIYKPESCLENDNYKLYFDRTVLTDIHIQHNRPDIIILNKQQKQAYLLDIAVPNSHNITQTYNTKINKYLELSVAMRNLWCLEKISILPFIISATGIVPQSLFKNLKILDLENTLVVEIQKGILLYSCHIVRKFLNIDTEHKTQKSQNAEARRR

SEQ ID NO: 22433 - protein, 1117 aa, Tenebrio molitor
MSINSLSNKNAPNVVASASLQSNGATEVKKRKKWTMEMNIFIIREYFRITKLQDVVSTYRLDLFKAFQSKYPQFPVTIQNLADQRRAIMKKNYIPSAILEKIKNDVKLELSINYSDNNEVSNNLLQNSVEPQSLQSLSNHNDSFCPIIDSPNTIQTDIHNLDLSYNDIHVINKNFYYHQNFKEQIEDEFNRTLNEFEHIEPFNRPLLPKQQSSKKFFAMIEILNQFILPKFVNNTTSFKKLHSIIYSGALTIIRLNGSKEIGQTNNIKTKELPKWEQRLNKRINNIRRDLGRITQYLKGINSNHLNNCIQSILNNNRIHCLKYNEYNKTLIEIKDTLLQKLRIYSKRLKRYKNNKQRKFENKLFRNNEKLFYKNLADNKTQTNNGTPNINEIKEFWSNIWSNEVQFNNQAEWIPHLENDIPDSNNRHHIQISLEILVKNINSSHNWKSPGGDQIHNFWLKKFTCIHKCLLDHFNGFIREPNTFPEFLAHGITYLKPKDSDTKNLSKYRPITCLPTIYKIMTSCIKVIIYDHCQKLNILNEEQKGCVKECFGCKEQLIIDTVIMEQARKNNRNIYTAFIDYKKAYDSVPHSWLIKILKIYKINLDLINFLSHVMTFWRTTLNLSINNTKLKSEPIQIKRGIYQGDSLSPLWFCLAINPLTNLLNSTGYGFNIRLNNTTLSKLNHLLYMDDIKLYASKKNHILSLLTITENFSNDIGMSFGIDKCKMQSICRGHYEHLEYITQEGEIIKNLNKGEFYKYLGINQSNHIQHSIIKENLEKQFYLRIKSILKSKLNGNNLIKAVNTYAVPLLTYSFGVIKWSKTNLQNINIKTRVLFTKFSKHHPKSAIERFNLPRENGGRGFSNLEIMLKNQIASLKNYFLNRARDNTFFNALVSADKGYTPLNLSDNIISDIVKPNIPDTIANIKQKSLHGRYFKELEQPEVNIQASHAWLKKSNIHPETEGFIFAIQDRVINTRNYKKHICGLQSIIDKCRICGTEGETIEHIISSCTVLAQSEYKKRHDIFAKIIHMNLAVKFNLLKNTQPHYSYTPESCLENDSYKLYFDRTILTDIHIKHNRPDIIILNKQQKQAYLFDIAVPNSHNIIQTYNTKINKYLELSVA

SEQ ID NO: 22434 - protein, 1196 aa, Tenebrio molitor
MSINSLSNKNAPNVVASASLQSNGATEVRKRKKWTMEMNIFIIREYFRITKLQDVVSTYRLDLFKAFQSKYPQFPVTIQNLADQRRAIMKKNYIPSAILEKIKNDVKLELSINYSDNNEVSNNLLQNSVEPQSLQSLSNHNDSFCSIIDSPNTIQTDIHNLDLSYNDIHVINKNFYYHQNFKEQIEDEFNRTLNEFEHIEPFNRPLLPKQQSSKKFFAIIEILNQFILPKFVNNITSFKKLHSIIYSGALTIIRLNGSKEIGQTNNIKTKELPKWERRLNKRINNIRRDLGRITQYLKGINSNHLNNCIQSILNNNRIHCLKYNEYNKTLIEIKDTLLQKLHIYSKRLKRYKNNKQRKFENKLFRNNEKLFYKNLTDNKTQTNNGTPNINEIKEFWSNIWSNEVQFNNQAEWIPHLENDIPDSNNRHHIQISLEILVKNINSSHNWKSPGGDQIHNFWLKKFTCIHKCLLDHFNGFIREPNTFPEFLAHGITYLKPKDSDTKNPSKYRPITCLPTIYKIMTSCIKVIIYDHCQKLNILNEEQKGCVKECFGCKEQLIIDTVIMEQARKNNRNIYTAFIDYKKAYDSVPHSWLIKILKIYKINLDLINFLSHVMTFWRTTLNLSINNTKLKSEPIQIKRGIYQGDSLSPLWFCLAINPLTNLLNSTGYGFNIRLNNTTLSKLNHLLYMDDIKLYASKKNHILSLLTITENFSNDIGMSFGIDKCKMQSICRGHYEHLEYITQEGEIIKNLNKGEFYKYLGINQSNHIQHSIIKENLEKQFYLRIKSILKSKLNGNNLIKAVNTYAVPLLTYSFGVIKWSKTNLQNINIKTRVLFTKFSKHHPKSAIERFNLPRENGGRGFSNLEILLKNQIASLKNYFLNRARDNTFFNALVSADKGYTPLNLSDNIISDIVKPNIPDTIANIKQKSLHGRYFKELEQPEVNIQASHAWLKKSNIHPETEGFIFAIQDRVINTRNYKKHICGLQSIIDKCRICGTEGETIEHIISSCTVLAQSEYKKRHDIFAKIIHMNLAVKFNLLKNTQPHYSYTPESCLENDSYKLYFDRTILTDIHIKHNRPDIIILNKQQKQAYLLDIAVPNSHNITQTYNTKINKYLELSVAMRNLWCLEKISILPLVISATGIVPQSLFKNLKILDLDNTLVVEIQKGILLYSCHIVRKFLNIDTEHNTQQSQNAEARRR

SEQ ID NO: 22435 - protein, 1074 aa, Tenebrio molitor
MLYLHFNFENIIPFQNTFSLTENIIMEMNIFIIREYFRITKLQDVVSTYRLDLFKAFQSKYPQFPVTIQNLADQRRAIMKKNYIPSAILEKIKNDVKLELSINYSDNNEVSNNLVENSVEPQSLPNHNDSFCCQNNSTPNNTIQNDINNLDLSYNDIHVINQNFYYHQNFKEQIEDEFNRTLNEFEHIEPFNRPLLPKQQSSKKFFAMIEILNQFILPKFVNNTISFKKLHSIIYSGALTIIRLNGSKEIDQTNNIKAKELPKWERRLNKRINNIRRDLGRITQYLKGINSNHLNNCIQSILNKNRIHCLKYNEYNETLIEIKDTLLQKLNIYSKRLKRYKNNKQRKFENKLFRNNEKLFYKNLADNKTQNNNGIPNINEIKEFWSNIWSNEVQFNNQAEWIPNLENEIPDSNNPHHIQISLEILVKNINSSHNWKSPGGDQIHNFWLKKFTCIHKCLLDHFNGFIREPNTFPEFLAHGITYLKPKDSDTKNPSKYRPITCLPTIYKIMTSCIKVIIYDHCQKLNILNEEQKGCVKECFGCKEQLIIDTVIMEQARKNNRNIYTAFIDYKKAYDSVPHSWLIKILKIYKINLDLINFLSHVMTFWRTTLNLSINNTKLKSEPIQIKRGIYQGDSLSPLWFCLAINPLTNLLNSTGYGFNIRHNNTTLSKLNHLLYMDDIKLYASKKNHILSLLTITENFSNDISMSFGIDKCKTQSICRGHYENLEYITKEGEIIKNLNKGEFYKYLGINQSNHIQHSIIKENLEKQFYLRIKFILKSKLNGNNLIKAVNTYAVPLLTYSFGIIKWSKTNLQNINIQTRVLFTKFCKHHPKSAIERFNLPRENGGRGFSNLEILQHNQIASLKNYFLNRARDNTFFNALVSADKGYTPLNLSDNIISDIVEPNIPDTIANIKQKSLHGRYFKELEQPEINIQASHAWLKKSNIHPETEGFIFAIQDRVINTRNYKKHICGLQSIIDKCRICGTEGETIEHIISSCTVLAQSEYKKRHDIFAKIIHMNLAVKFNLLKDTQPHYIYKPESCLENDNYKLYFDRTVLTDIHIQHNRPDIIILSNPVG

SEQ ID NO: 22436 - protein, 1091 aa, Tenebrio molitor
MEMNIFIIREYFRITKLQDVVSTYRLDLFKAFQSKYPQFPVTIQNLADQRRAIMKKNYIPSAILEKIKNDVKLELSINYSDNNEVSNNLLQNSVEPQSLQSLSNHNDSFCPILDSPNTIQTDIHNLDLSYNDIHVINQNFYYHQNFKEQIEDEFNRTLNEFEHIEPFNRPLLPKQQSSKKFFAMIEILNQFILPKFVNNTTSFKKLHSIIYSGALTIIRLNGSKEIGQTNNIKAKELPKWEQRLNKRINNIRRDLGRITQYLKGINSNHLNNCIQSILNNNRIHCLKYNEYNKTLIEIKDTLLQKLNIYSKRLKRYKNNKQRKFENKLFRNNEKLFYKNLTDNKTQTNNGTPNINEIKEFWSNIWSNEVQFNNQAEWIPHLENDIPDSNNRHHIQISLEILVKNINSSHNWKSSGGDQIHNFWLKKFTCIHKCLLDHFNGFIREPNTFPEFLAHGITYLKPKDSDTKNPSKYRPITCLPTIYKIMTSCIKVIIYDHCQKLNILNEEQKGCVKECFGCKEQLIIDTVIMEQARKNNRNIYTAFIDYKKAYDSVPHSWLIKILKIYKINLDLINFLSHVMTFWRTTLNLSINNTKLKSEPIQIKRGIYQGDSLSPLWFCLAINPLTNLLNSTGYGFNIRLNNTTLSKLNHLLYMDDIKLYASKKNHILSLLTITENFSNDIGMSFGIDKCKMQSICRGHYEHLEYITQEGEIIKNLNKGEFYKYLGINQSNHIQHSIIKENLEKQFYLRIKSILKSKLNGNNLIKAVNTYAVPLLTYSFGVIKWSKTNLQNINIKTRVLFTKFSKHHPKSAIERFNLPRENGGRGFSNLEILLKNQIASLKNYFLNRARDNTFFNALVSADKGYTPLNLSDNIISDIVKPNIPDTIANIKQKSLHGRYFKELEQPEVNIQASHAWLKKSNIHPETEGFIFAIQDRVINTRNYKKHICGLQSIIDKCRICGTEGETIEHIISSCTVLAQSEYKKRHDIFAKIIHMNLAVKFNLLKNTQPHYSYTPESCLENDSYKLYFDRTILTDIHIKHNRPDIIILNKQQKQAYLLDIAVPNSHNITQTYNTKINKYLELSVAMRNLWCLEK

SEQ ID NO: 22437 - protein, 1195 aa, Tenebrio molitor
MSINSLSNKNAPNVASASLQSNGATLVRKRKKWTMEMNIFIIREYFRITKLQDVVSTYRLDLFKAFQSKYPQFPVTIQNLADQRRAIMKKNYIPSAILEKIKNDIKLEMSVSDNNEVSNNLVENSVEPQSLQSLPNHNDSFCYQSNSTPNNTIQNDINNLDLSYNDIHVINQNFYYHQNFKEQIEDEFNRTLNEFEHIEPFNRPLLPKQQSSKKFFAMIEILNQFILPKFVNNTTSFRKLHSIIYSGALTIIRLNGSKEIDQTNNIKAKELPKWERRLNKRINNIRRDLGRITQYLKGINSNHLNNCIKSILNKNRIHCLKYNEYNETLIEIKDTLLQKLNIYSKRLKRYKNNKQRKFENKLFRNNEKLFYKNLADNKTQNNNGLPNINEIKEFWSNIWSNEVQFNNQAEWIPNLENEIPDCNNPHHIQISLEILVKNINSSHNWKSPGGDQIHNFWLKKFTCIHKCLLDHFNGFIREPNTFPEFLAHGITYLKPKDSDTKNPSKYRPITCLPTIYKIMTSCIKVIIYDHCQKLNILNEEQKGCVKECFGCKEQLIIDTVIMEQARKNNRNICTAFIDYKKAYDSVPHSWLIKILKIYKINLDLINFLSHVMTFWKTTLNLSINNTKLKSEPIQIKRGIYQGDSLSPLWFCLAINPLTNLLNSTGYGFNIRVNNTTLSKLNHLLYMDDIKLYASKKNHILSLLTITENFSNDIGMSFGIDKCKTQSICRGHYENLEYITKEGEIIKNLNKGEFYKYLGINQSNHIQHSIIKENLEKQFYLRIKSILKSKLNGNNLIKAVNTYAVPLLTYSFGVIKWSKTNLQNINIQTRVLFTKFCKHHHKSAIERFNLPRENGGRGFSNLEILQHNQIASLKNYFLNRARDNTFFNALVSADKGYTPLNLSDNVISDIVEPNIPDTIANIKQKSLHGRYFKELEQPEINIQASHAWLKKSNIHPETEGFIFAIQDRVINTRNYKKHICGLQSIIDKCRICGTEGETIEHIISSCTVLAQSEYKKRHDIFAKIIHMNLAVKFNLLKDTQPHYIYKPESCLENDNYKLYFDRTVLTDIHIQHNRPDIIILNKQQKQAYLLDIAVPNSHNITQTYNTKINKYLELSVAMRNLWCLEKISILPFIISATGIVPQSLFKNLKMLDLEKTLVVEIQKGILLYSCHIVRKFLNIDTEHNTQQSQNAEARRR

SEQ ID NO: 22438 - protein, 677 aa, Tenebrio molitor
MTSCIKVIIYDHCQKLNILNEEQKGCVKECFGCKEQLIIDTVIMEQARKNNRNIYTAFIDYKKAYDSVPHSWLIKILKIYKINLDLINFLSHVMTFWRTTLNLSINNTKLKSEPIQIKRGIYQGDSLSPLWFCLAINPLTNLLNSTGYGFNIRLNNTTLSKLNHLLYMDDIKLYASKKNHILSLLTITENFSNDIGMSFGIDKCKMQSICRGHYEHLEYITQEGEIIKNLNKEEFYKYLGINQSNHIQHSIIKENLEKQFYLRIKSILKSKLNGNNLIKAVNTYAVPLLTYSFGVIKWSKTNLQNINIKTRVLFTKFSKHHPKSAIERFNLPRENGGRGFSNLEILLKNQIASLKNYFLNRARDNTFFNALVSADKGYTPLNLSDNIISDIVKPNIPDTIANIKQKSLHGRYFKELEQPEVNIQASHAWLKKSNIHPETEGFIFAIQDRVINTRNYKKHICGLQSIIDKCRICGTEGETIEHIISSCTVLAQSEYKKRHDIFAKIIHMNFAVKFNLLKNTQPHYSYTPESCLENDSYKLYFDRTILTDIHIKHNRPDIIILNKQQKQAYLLDIAVPNSHNITQTYNTKINKYLELSVAMRNLWCLEKISILPLVISATAIVPQSLFKNLKILDLDNTLVVEIQKGILLYSCHIVRKFLNIDTEHNTQQSQNAEARRR

SEQ ID NO: 22439 - protein, 1192 aa, Tenebrio molitor
MSINSLSNKNAPNVVASASLQSNGATEVRKRKKWTMEMNIFIIREYFRITKLQDVVSTYRLDLFKAFQSKYPQFPVTIQNLADQRRAIMKKNYIPSAILEKIKNDVKLELSINYSDNNEVSNNLLQNSVEPQSLQSLSNHNDSFCPIIDSPNTIQTDIHNLDLSYNDIHVINKNFYYHQNFKEQIEDEFNRTLNEFEHIEPFNRPLLPKQQSSKKFFAMIEILNQFILPKFVNNTTSFKKLHSIIYSAALTIIRLNGSKEIGQTNNIKTKELPKWEQRLNKRINNIRRDLGRITQYLKGINSNHLNNCVQSILNNNRIHCLKYNEYNKTLIEIIDTLLQKLHIYSKRLKRYKNNKQRKFENKLFRNNEKLFYKNLTDNKTQTNNGTPNINEIKEFWSNIWSNEVQFNNQAEWIPHLENDIPDSNNRHHIQISLEILVKNINSSHNWKSPGGDQIHNFWLKKFTCIHKCLLDHFNGFIREPNTFPEFLAHGITYLKPKDFDTKNPSKYRPITCLPTIYKIMTSCIKVIIYDHCQKLNILDEEQKGCVKECFGCKEQLIIDTVIMEQARKNNRNIYTAFIDYKKAYDSVPHSWLIKILKIYKINLDLINFLSHVMTFWRTTLNLSINNTKLKSEPIQIKRGIYQGDSLSPLWFCLAINPLTNLLNSTGYGFNIRLNNTTLSKLNHLLYMDDIKLYASKKNHILSLLTITENFSNDIGMSFGIDKCKMQSICRGHYEHLEYITQEGEIIKNLNKGEFYKYLGINQSNHIQHSIIKENLEKQFYLRIKSILKSKLNGNNLIKAVNTYAVPLLTYSFGVIKWSKTNLQNINIKTRVLFTKFSKHHPKSAIERFNLPHENGGRGFSNLEILLKNQIASLKNYFLNRARDNTFFNALVSADKGYTPLNLSDNIISDIVKPNIPDTIANIKQKSLHGRYFKELEQPEVNIQASHAWLKKSNIHPETEGFIFAIQDRVINTRNYKKHICGLQSIIDKCRICGTEGETIEHIISSCTVLAQSEYKKRHDIFAKIIHMNLAVKFNLLKNTQPHYSYTPESCLENDSYKLYFDRTILTDIHIKHNRPDIIILNKQQKQAYLLDIAVPNSHNITQTYNTKINKYLELSVAMRNLWCLEKISILPLVISATGIVPQSLFKNLKILDLDNTLVVEIQKGILLYSCHIVRKFLNIDTEHNTQQSQNAE

SEQ ID NO: 22440 - protein, 1161 aa, Tenebrio molitor
MEMNIFIIREYFRITKLQDVVSTYRLDLFKVFQSKYPQFPVTIQNLADQRRAIMKKNYIPSAILEKIKNDVKLELSINYSDNNEVSNNLLQNSVEPQSLQSVSNHNDSFCPIIDSPNTIQTDIHNLDLSYNDIHVINKNFYYHQNFKEQIEDEFNRTLNEFEHIEPFNRPLLPKQQSSKKFFAMIEILNQFILPKFVNNTTSFKKLHSIIYSGALTIIRLNGSKEIGQTNNIKTKELPKWEQRLNKRINNIRRDLGRITQYLKGINSNHLNNCIQSILNNNRIHCLKYNEYNKTLIEIKDTLLQKLHIYSKRLKRYKNNKQRKFENKLFRNNEKLFYKNLTDNKTQTNNGTPNINEIKEFWSNIWSNEVQFNNQAEWIPHLENDIPDSNNRHHIQISLEILVKNINSSHNWKSPGGDQIHNFWLKKFTCIHKCLLDHFNGFIREPNTFPEFLAHGITYLKPKDFDTKNPSKYRPITCLPTIYKIMTSCIKVIIYDHCQKLNILNEEQKGCVKECFGCKEQLIIDTVIMEQARKNNRNIYTAFIDYKKAYDSVPHSWLIKILKIYKINLDLINFLSHVMTFWRTTLNLSISNTKLKSEPIQIKRGIYQGDSLSPLWFCLAINPLTNLLNSTGYGFNIRLNNTTLSKLNHLLYMDDIKLYASKKNHILSLLTITESFSNDIGMSFGIDKCKMQSMCRGHYEHLEYITQEGEIIKNLNKGEFYKYLGINQSNHIQHSIIKENLEKQFYLRIKSILKSKLNGNNLIKAVNTYAVPLLTYSFGVIKWSKTNLQNINIKTRVLFTKFSKHHPKSAIERFNLPRENGGRGFSNLEILLKNQIASLKNYFLNRARDNTFFNALVSADKGYTPLNLSDNIISDIVKPNIPDTIANIKQKSLHGRYFKELEQPEVNIQASHAWLKKSNIHPETEGFIFAIQDRVINTRNYKKHICGLQSIIDKCRICGTEGETIEHIISSCTVLAQSEYKKRHDIFAKIIHMNLAVKFNLLKNTQPHYSYTPESCLENDSYKLYFDRTILTDIHIKHNRPDIIILNKQQKQAYLLDIAVPNSHNITQTYNTKINKYLELSVAMRNLWCLEKISILPLVISATGIVPQSLFKNLKILDLDNTLVVEIQKGILLYSCHIVRKFLNIDTEHNTQQSQNAEARRR

SEQ ID NO: 22441 - protein, 1114 aa, Tenebrio molitor
MLNRDEIDQRRAIMKKNYIPSAILEKIKNDVKLELSINYSDNNEVSNNLLQNSVEPQSLQSLSNHNDSFCPIIDSPNTIQTDIHNLDLSYKNFYYHQNFKEQIEDEFNRTLNEFEHIEPFNRPLLPKQQSSKKFFAMIEILNQFILPKFVNNTTSFKKLHSIIYSGALTIIRLNGSKEIGQTNNIKTKELPKWEQRLNKRINNIRRDLGRITQYLKGINSNHLNNCIQSILNNNRIHCLKYNEYNKTLIEIKDTLLQKLHIYSKRLKRYKNNKQRKFENKLFRNNEKLFYKNLTDNKTQTNNGTPNINEIKEFWSNIWSNEVQFNNQAEWIPHLENDIPDSNNRHHIQISLEILVKNINSSHNWKSPGGDQIHNFWLKKFTCIHKCLLDHFNGFIREPNTFPEFLAHGITYLKPKDFDTKNPSKYRPITCLPTIYKIMTSCIKVIIYDHCQKLNILNEEQKGCVKECFGCKEQLIIDTVIMEQARKNNRNIYTAFIDYKKAYDSVPHSWLIKILKIYKINLDLINFLSHVMTFWRTTLNLSINNTKLKSEPIQIKRGIYQGDSLSPLWFCLAINPLTNLLNSTGYGFNIRLNNTTLSKLNHLLYMDDIKLYASKKNHILSLLTITENFSNDIGMSFGIDKCKMQSICRGHYEHLEYITQEGEIIKNLNKGEFYKYLGINQSNHIQHSIIKENLEKQFYLRIKSILKSKLNGNNLIKAVNTYAVPLLTYSFGVIKWSKTNLQNINIKTRVLFTKFSKHHPKSAIERFNLPRENGGRGFSNLEILLKNQIASLKNYFLNRARDNTFFNALVSADKGYTPLNLSDNIISDIVKPNIPDTIANIKQKSLHGRYFKELEQPEVKIQASHAWLKKSNIHPETEGFIFAIQDRVINTRNYKKHICGLQSIIDKCRICGTEGETIEHIISSCTVLAQSEYKKRHDIFAKIIHMNLAVKFNLLKNTQPHYSYTPESCLENDSYKLYFDRTILTDIHIKHNRPDIIILNKQQKQAYLLDIAVPNSHNITQTYNTKINKYLELSVAMRNLWCLEKISILPLVISATGIVPQSLFKNLKILDLDNTLVVEIQKGILLYSCHIVRKFLNIDTEHNTQQSQNAEARRR

SEQ ID NO: 22442 - protein, 1161 aa, Tenebrio molitor
MEMNIFIIREYFRITKLQDVVSTYRLDLFKAFQSKYPQFPVTIQNLADQRRAIMKKNYIPSAILEKIKNDVKLELSINYSDNNEVSNNLLQNSVEPQSLQSLSNHNDSFCSIIDSPNTIQTDIHNLDLSYNDIHVINKNFYYHQNFKEQIEDEFNRTLNEFEHIEPFNRPLLPKQQSSKKFFAMIEILNQFILPKFVNNITSFKKLHSIIYSGALTIIRLNGSKEIGQTNNIKTKELPKWERRLNKRINNIRRDLGRITQYLKGINSNHLNNCIQSILNNNRIHCLKYNEYNKTLIEIKDTLLQKLHIYSKRLKRYKNNKQRKFENKLFRNNEKLFYKNLTDNKTQTNNGTPNINEIKEFWSNIWSNEVQFNNQAEWIPHLENDIPDSNNRHHIQISLEILVKNINSSHNWKSPGGDQIHNFWLKKFTCIHKCLLDHFNGFIREPNTFPEFLAHGITYLKPKDFDTKNPSKYRPITCLPTIYKIMTSCIKVIIYDHCQKLNILNEEQKGCVKECFGCKEQLIIDTVIMEQARKNNRNIYTAFIDYKKAYDSVPHSWLIKILKIYKINLDLINFLSHVMTFWRTTLNLSINNTKLKSEPIQIKRGIYQGDSLSPLWFCLAINPLTNLLNSTGYGFNIRVNNTTLSKLNHLLYMDDIKLYASKKNHILSLLTITENFSNDIGMSFGIDKCKMQSICRGHYEHLEYITQEGEIIKNLNKGEFYKYLGINQSNHIQHSIIKENLEKQFYLRIKSILKSKLNGNNLIKAVNTYAVPLLTYSFGVIKWSKTNLQNINIKTRVLFTKFSKHHPKSAIERFNLPRENGGRGFSNLEVLLKNQIASLKNYFLNRARDNTFFNALVSADKGYTPLNLSDNIISDIVKPNIPDTIANIKQKSLHGRYFKELEQPEVNIQASHAWLKKSNIHPETEGFIFAIQDRVINTRNYKKHICGLQSIIDKCRICGTEGETIEHIISSCTVLAQSEYKKRHDIFAKIIHMNLAVKFNLLKNTQPHYSYTPESCLENDSYKLYFDRTILTDIHIKHNRPDIIILNKQQKQAYLLDIAVPNSHNITQTYNTKINKYLELSVAMRNLWCLEKISILPLVISATGIVPQSLFKNLKILDLDNTLVVEIQKGILLYSCHIVRKFLNIDTEHNTQQSQNAEARRR

SEQ ID NO: 22443 - protein, 1196 aa, Tenebrio molitor
MSINSLSNKNAPNVVASASLQSNGATLVRKCKKWTMEMNIFIIREYFRITKLQDVVSTYRLDLFKAFQSKYPQFPVTIQNLADQRRAIMKKNYIPSAILEKIKNDIKLELSVSDNNEVSNNLVENSVEPQSLQSLPNHNDSFCYQSNSTPNNTIQNDINNLDLSYNDIHVINQNFYYHQNFKEQIEDEFNRTLNEFEHIEPFNRPLLPKQQSSKKFFAMIEILNQFILPKFVNNTTSFRKLHSIIYSGALTIIRLNGSKEIDQTNNIKAKELPKWERRLNKRINNIRRDLGRITQYLKGINSNHLNNCIKSILNKNRIHCLKYNEYNETLIEIKDTLLQKLNIYSKRLKRYKNNKQRKFENKLFRNNEKLFYKNLADNKTQNNNGLPNINEIKEFWSNIWSNEVQFNNQAEWIPNLENEIPDCNNPHHIQISLEILVKNINSSHNWKSPGGDQIHNFWLKKFTCIHKCLLDHFNGFIREPNTFPEFLANGITYLKPKDSDTKNPSKYRPITCLPTIYKIMTSCIKVIIYDHCQKLNILNEEQKGCVKECFGCKEQLIIDTVIMEQARKNNRNICTAFIDYKKAYDSVPHSWLIKILKIYKINLDLINFLSHVMTFWKTTLNLSINNTKLKSEPIQIKRGIYQGDSLSPLWFCLAINPLTNLLNSTGYGFNIRVNNTTLSKLNHLLYMDDIKLYASKKNHILSLLTITENFSNDIGMSFGIDKCKTQSICRGHYENLEYITKEGEIIKNLNKGEFYKYLGINQSNHIQHSIIKENLEKQFYLRIKSILKSKLNGNSLIKAVNTYAVPLLTYSFGVIKWSKTNLQNINIQTRVLFKKFCKHHPKSAIERFNLPRENGGRGFSNLEILQHNQIASLKNYFLNRARDNTFFNALVSADKGYTPLNLSDNVISDIVEPNIPDTIANIKQKSLHGRYFKELEQPEINIQASHAWLKKSNIHPETEGFIFAIQDRVINTRNYKKHICGLQSIIDKCRICGTEGETIEHIISSCTVLAQSEYKKRHDIFAKIIHMNLAVKFNLLKDTQPHYIYKPESCLENDNYKLYFDRTVLTDIHIQHNRPDIIILNKQQKQAYLLDIAVPNSHNITQTYNTKINKYLELSVAMRNLWCLEKISILPFIISATGIVPQSLFKNLKILDLEKTLVVEIQKGILLYSCHIVRKFLNIDTEHNTQQSQNAEARRR

SEQ ID NO: 22444 - protein, 1158 aa, Tenebrio molitor
MSINSLSNKNAPNVVASASLQSNGATLVKKRKKWTMEMNIFIIREYFRITKLQDFVSTYRLDLFKAFQSKYPQFPVTIQNLADQRRAIMKKNYIPSAILEKIKNDVKLELSINYSDNNEVSNNLVENSVEPQSLPNHNDSFCCQNNSTPNNTIQNDINNLDLSYNDIHVINQNFYYHQNFKEQIEDEFNRTLNEFEHIEPFNRPLLPKQQSSKKFFAMIEILNQFILPKFVNNTTSFKKLHSIIYSGALTIIRLNGSKEIGQTNNIKAKELPKWEQRLNKRINNIRRDLGRITQYLKGINSNHLNNCIQSILNKNRIHCLKYNEYNETLIEIKDTLLQKLNIYSKRLKRYKNNKQRKFENKLFRNNEKLFYKNLADNKTQNNNGIPNINEIKEFWSNIWSNEVQFNNQAEWIPNLENEIPDSNNPHHIQISLEILVKNINSSHNWKSPGGDQIHNFWLKKFTCIHKCLLDHFNGFIREPNTFPEFLAHGITYLKPKDSDTKNPSKYRPITCLPTIYKIMTSCIKVIIYDHCQKLNILNEEQKGCVKECFGCKEQLIIDTVIMEQARKNNRNIYTAFIDYKKAYDSVPHSWLIKILKIYKINLDLINFLSHVMTFWRTTLNLSINNTKLKSEPIQIKRGIYQGDSLSPLWFCLAINPLTNLLNSTGYGFNIRHNNTTLSKLNHLLYMDDIKLYASKKNHILSLLTITENFSNDISMSFGIDKCKTQSICRGHYENLEYITKEGEIIKNLNKGEFYKYLGINQSNHIQHSIIKENLEKQFYLRIKSILKSKLNGNNLIKAVNTYAVPLLTYSFGIIKWSKTNLQNINIQTRVLFTKFCKHHPKSAIERFNLPRENGGRGFSNLEILQHNQIASLKNYFLNRARDNTFFNALVSADKGYTPLNLSDNIISDIVEPNIPDTIANIKQKSLHGRYFKELEQPEINIQASHAWLKKSNIHPETEGFIFAIQDRVINTRNYKKHICGLQSIIDKCRICGTEGETIEHIISSCTVLAQSEYKKRHDIFAKIIHMNLAVKFNLLKDTQPHYIYKPESCLENDNYKLYFDRTVLTDIHIQHNRPDIIILNKQQKQAYLLDIAVPNSHNITQTYNTKINKYLELSVAMRNLWCLEKISILPFIISATGIVPQSLFKNLKNFGLREHIGG

SEQ ID NO: 22445 - protein, 923 aa, Tenebrio molitor
MIEILNQFILPKFVNNTTSFKKLHSIIYSGALTIIRLNGSKEIGQTNNIKMKELPKWEQRLNKRINNIRRDLGRITQYLKGINSNHLNNCIQSILNNNRIHCLKYNEYNKTLIEIKDTLLQKLHIYSKRLKRYKNNKQRKFENKLFRNNEKLFYKNLTDNKTQTNNGTPNINEIKEFWSNIWSNEVQFNNQAEWIPHLENDIPDSNNPHHIQISLEILVKNINSSHNWKSPGGDQIHNFWLKKFTCIHKCLLDHFNRFIREPNTFPEFLAHGITYLKPKDSDTKNPSKYRPITCLPTIYKIMTSCIKVIIYDHCQKLNILNEEQKGCVKECFGCKEQLIIDTVIMEQARKNNRNIYTAFIDYKKAYDSVPHSWLIKILKIYKINLDLINFLSHVMTFWRTTLHLSINNTKLKSEPIQIKRGIYQGDSLSPLWFCLAINPLTNLLNSTRYGFNIRLNNTTLSKLNHLLYMDDIKLYASKKNHILSLLTITENFSNDIGMSFGIDKCKMQSICRGHYEHLEYITQEGEIIKNLNKGEFYKYLGINQSNHIQHSIIKENLEKQFYLRIKSILKSKLNGNNLIKAVNTYAVPLLTYSFGVIKWSKTNLQNINIKTRVLFTKFSKRHPKSAIERFNLPRENGGRGFSNLEILLKNQIASLKNYFLNRARDNTFFNALVSADKGYTPLNLSDNIISDIVKPNIPDTIANIKQKSLHGRYFKELEQPEVNIQASHAWLKKSNIHPETEGFIFYIQDRVINTRNYKKHICGLQSIIDKCRICGTEGETIEHIISSCTVLAQSEYKKRHDIFAKIIHMNLAVKFNLLKNTQPHYSYTPESCLENDSYKLYFDRTILTDIHIKHNRPDIIILNKQQKQAYLLDIAVPNSHNITQTYNTKINKYLELSVAMRNLWCLEKISILPLVISATGIVP

SEQ ID NO: 22446 - protein, 1195 aa, Tenebrio molitor
MSINSLSNKNAPNVVASASLQSNGAIEVRKRKKWTMEMNIFIIREYFRITKLQDVVSTYRLDLFKAFQSKYPQFPVTIQNLADQRRAIMKKNYIPSAILEKIKNDVKLELSINYSDNNEVSNNLVENSVEPQSLPNHNDSFCGQNNSTPNNTIQNDINNLDLSYNDIHVINQNFYYHQNFKEQIEDEFNRTLNEFEHIEPFNRPLLPKQQSSKKFFAMIEILNQFILPKFVNNTTSFKKLHSIIYSGALTIIRLNGSKEIDQTNNIKAKELPKWERRLNKRINNIRRDLGRITQYLKGINSNHLNNCIQSILNKNRIHCLKYNEYNETLIEIKDTLLQKLNIYSKRLKRYKNNKQRKFENKLFRNNEKLFYKNLADNKTQNNNGIPNINEIKEFWSNIWSNEVQFNNQAEWIPNLENEIPDSNNPHHIQISLEILVKNINSSHNWKSPGGDQIHNFWLKKFTCIHKCLLDHFNGFIREPNTFPEFLAHGITYLKPKDSDTKNPSKYRPITCLPTIYKIMTSCIKVIIYDHCQKLNILNEEQKGCVKECFGCKEQLIIDTVIMEQARKNNRNIYTAFIDYKKAYDSVPHSWLIKILKIYKINLDLINFLSHVMTFWRTTLNLSINNTKLKSEPIQIKRGIYQGDSLSPLWFCLAINPLTNLLNSTGYGFNIRHNNTTLSKLNHLLYMDDIKLYASKKNHILSLLTITENFSNDISMSFGIDKCKTQSICRGHYENLEYITKEGEIIKNLNKGEFYKYLGINQSNHIQHSIIKENLEKQFYLRIKSILKSKLNGNNLIKAVNTYAVPLLTYSFGIIKWSKTNLQNINIQTRVLFTKFCKHHPKSAIERFNLPRENGGRGFSNLEILQHNQIASLKNYFLNRARDNTFFNALVSADKGYTPLNLSDNIISDIVEPNIPDTIANIKQKSLHGRYFKELEQPEINIQASHAWLKKSNIHPETEGFIFAIQDRVINTRNYKKHICGLQSIIDKCRICGTEGETIEHIISSCTVLAQSEYKKRHDIFAKIIHMNLAVKFNLLKDTQPHYIYKPESCLENDNYKLYFDRTVLTDIHIQHNRPDIIILNKQQKQAYLLDIAVPNSHNITQTYNTKINKYLELSVAMRNLWCLEKISILPFIISATGIVPQSLFKNLKILDLENTLVVEIQKGILLYSCHIVRKFLNIDTEHKTQKSQNAEARRR

SEQ ID NO: 22447 - protein, 677 aa, Tenebrio molitor
MTFCIKVIIYDHCQKFNILNEEQKGCVKECFGCKEQLIIDTVIMEQARKNNRNIYTAFIDYKKAYDSVPHSWLIKILKIYKINLDLINFLSHVMTFWRTTLNLSINNTKSKSEPIQIKRGIYQGDSLSPLWFCLAINPLTNLLNSTGYGFNIRLNNTTLSKLNHLFYMDDIKLYASKKNHILSLLKITENFSNDIGVSFGIDKCKMQSICRGHYEHLEYITQEGEIIKNLNKGEFYKYLGINQSNHIQHSIIKENLEKQFYLRIKSILKSKLNGNNLIKAVNTYAVPLLTYSFGVIKWSKTNLQNINIKTRVLFTKFSKHHPKSAIERFNLPRENGGRGFSNLEILLKNQIALLKNYFLNRARDNTFFNALVSADKGYTPLNLSDNLISDIVKPNIPDTIANIKQKSLHGRYFKELEQPEVNIQASHAWLKKSNIHPETEGFIFAIQDRVINTKNYKKHICGLQSIIDKCRICGTEGETIEHIISSCTVLAQSEYKKRHDIFAKIIHMNLAVKFNLLKNTQPHYSYTPESCLENDSYKLYFDRTILTDIHIKHNRPDIIILNKQQKQAYLLDIAVPNSHNITQTYNTKINKYLELSVAMRNLWCLKKISILPLVISATGTVPQSLFKNLKILDLHNTLVVEIQKGILLYSCHIVRKFLNIDTEHNTQQSQNAEARRP

SEQ ID NO: 22448 - protein, 1032 aa, Tenebrio molitor
MIYMLLIKIFFYYHQNFKEQIEDEFNRTLNEFEHIEPFNRPLLPKQQSSKKFFAMTEILNQFILPKFVNNTTSFKKLHSIIYSGALTIIRLNGSKEIGQTNNIKTKELPKWEQRLNKRINNIRRDLGRITQYLKGINSNHLNNCIQSILNNNRIHCLKYNEYNKTLIEIKDTLLQKLHIYSKRLKRYKNNKQRKFENKLFRNNEKLFYKNLTDNKTQTNNGTPNINEIKEFWSNIWSNEVQFNNQAEWIPHLENDIPDSNNRHHIQISLEILVKNINSSHNWKSPGGDQIHNFWLKNFTCIHKCLLDHFNGFIREPNTFPEFLAHGITYLKPKDSDTKNPSKYRPITCLPTIYKIMTSCIKVIIYDHCQKLNILNEEQKGCVKECFGCKEQLIIDTVIMEQARKNNRNIYTAFIDYKKAYDSVPHSWLIKILKIYKINLDLINFLSHVMTFWKTTLNLSINNTKLKSEPIQIKRGIDQGDSLSPLWFCLAINPLTNLLNSTGYGFNIRVNNTTLSKLNHLLYMDDIKLYASKKNHILSLLTITENFSNDIGMSFGIDKCKTQSICRGHYENLEYITKEGEIIKNLNKGEFYKYLGINQSNHIQHSIIKENLEKQFYLRIKSILKSKLNGNNLIKAVNTYAVPLLTYSFGVIKWSKTNLQNINVQTRVLFTKFCKHHPKSAIERFNLPRENGGRGFSNLEILQHNQIASLKNYFLNRARDNTFFNALVSADKGYTPLNLSDNVISDIVEPNIPDTIANIKQKSLHGRYFKELQQPEINIQASHAWLKKSNIHPETEGFIFAIQDRVINTRNYKKHICGLQSIIDKCRICGTEGETIEHIISSCTVLAQSEYKKRHDIFAKIIHMNLAVKFNLLKDTQPHYIYKPESCLENDNYKLYFDRTVLTDIHIQHNRPDIIILNKQQKQAYLLDIAVPNSHNITQTYNTKINKYLELSVAMRNLWCLEKISILPFIISATGIVPQSFFKNLKILDLENTLVVEIQKGILLYSCHIVRKFLNIDTEHKTQKSQNVEARRR

SEQ ID NO: 22449 - protein, 977 aa, Tenebrio molitor
MIEILNQLILPKFVNNTSFKKLHSIIYSGALTIIRLNGSKEIGQTNNIKAKELPKWEQRLNKRINNIRRDLGRITQYLKGINSNHLNNCIQSILNNNRIHCLKYNEYNKTLIEIKDTLLQKLNIYSKRLKRYKNNKQRKFENKLFRNNEKLFYKNLTDNKTETDNGTPNINEIKEFWSNIWSNEVQFNNQAEWIPHLENDIPDSNNRHHIQISLEILVKNINSSHNWKSPGGDQIHNFWLKKFTCIHKCLLDHFNGFIREPNTFPEFLAHGITYLKPKDSDTKNPSKYRPITCLPTIYKIMTSCIKVIIYDHCQKLNILNEEQKGCVKKCFGCKEQLIIDTVIMEQARKNNRNIYTAFIDYKKAYDSVPHSWLIKILKIYKINLDLINFLSHVMTFWRTTLNLSINNTKLKSEPIQIKRGIYQGDSLSPLWFCLAINPLTNLLNSTGYGFNIRLNNTTLSKLNHLLYMDDIKLYASKKNHILSLLTITENFSNDIGMSFGIDKCKMQSICRGHYEHLEYITQEGEIIKNLNKGEFYKYLGINQSNHIQHSIIKENLEKQFYLRIKSILKSKLNGNNLIKAVNTYAVPLLTYSFGVIKWSKTNLQNINIKTRVLFTKFSKHHPKSAIERFNLPRENGGRGFSNLEILLKNQIASLKNYFLNRARDNTFFNALVSADKGYTPLNLSDNIISDIVEPNIPDTIANIKQKSLHGRYFKELEQPEINIQASHAWLKKSNIHPETEGFIFAIQDRVINTRNYKKHICGLQSIIDKCRICGTEGETIEHIISSCTVLAQSEYKKRHDIFAKIIHMNLAVKFNLLKNTQPHYIYKPESCLENDNYKLYFDRTVLTDIHIQYNRPDIIILNKQQKQAYLLDIAVPNSHNITQTYNTKINKYLELSVAMRNLWCLEKISILPFIISATGIVPQSLFKNLKILDLDNTLVVEIQKGILLYSCHIVRKFLNIDTEHNTQKSQNAEARRR

SEQ ID NO: 22450 - protein, 965 aa, Dufourea novaeangliae
MHHRKGHPDWYDSRVNIPAKKNRWNAEEESILARKEAELTQSGTKFINQALHQAFPERTLDAIKSHRKLPTYRAKVASFLHTSPSTPPGHNVPDRLETATSDTYHIVEYLKKLPPCNNTKFQQPILNRICERVHLAPKDETHEKLCLYLRSIFPPVGPTRARNCPHTIRTLSKKHQRRVDYAKTQDLWRKNRSRCVKEILSDIEAVTYPPQEHMGSFWSTIMCNEANISPGTEPCGGTIHEELWKPITPEEIERSYLRNGSAAGPDGISPRLFRSIPTEVVVKIFNLFLFLGKTPPFLLEAKTTFIAKKTGACEPADFRPITVSSVIIRSFHKILANRLSKSLPFDQRQRAFRAADGCSENIFLLDLALRYHHRKFKPLFLASLDISKAFDPVSHCAIADTLLSIGAPPIFVQYVKYIYEAGVTRLSCPDWTSDPIRPRCGVKQGDPLSPILFNLILDRLLRLLPSDIGADIDGSRINAAAFADDIILMSSTQRGLQMLLDTSISFLSLTGLNINLGKSFTLSIKSVPHVKKAIIDPNIIFTVNHHRLLALKRSDQWTYLGVPFTPEGRLAANPSAKLCQNIDRLSKAPLKPQQRLFILRVFVIPGLYHLLSLGNIKLGVLTKIDRVIRAAARKWLHLPHDTPNGYFHAVSNDGGLGLPSLRWSAPLQRLGRLKKMPLSRQAMSSASGIFLQEEIQRTCKRLDDHGICYDTKTKVSNRWAQHLYRSVDGAALKHSRSVKGQHDWLNDGTSFLTGKDFINSCRARINALPTRSRTSRGRYADRTCRAGCLAAETLNHVIQNCHRSHPMRIKRHNALTRYLERNLRSSGYAVDVEPHFLTDAGLRKPDLVASLGANALIIDAQIVSEQSCLKRAHELKTKYYGENEHLIRSIKDRYNCNMTRTLSCTLTWRGIWSPQSLEGLLEVGVIKRKDIKILSSRTIVGTLACYNTFCASTRVVRASNRTGVG

SEQ ID NO: 22451 - protein, 982 aa, Osmia bicornis
MCEFPGCPRFFPTARGRGLHHRKAHPDWSDSRANTTARKARWNDEEEAIFARKEAELTRAKTRFINQALHQAFPERSLDSIKSHRKNPAYKERVANLLSASSPPPPRGPRAEHPPANDTARHAIVEYLGQLPPCTGTDFQQQELDQICSRIHLVTEEEIHERLTLYLRSIFPATVRNVQMRKRRVPTTLPKRKQRRVEYAKMQDLWIKNRSRCVSEVLNNTGAVTYPPMDQMTSFWKAIMCSGTNTSPGIESPDTIYEDLWKPITTEEIARCYLRNGSAPGPDGISPRLFRSIPVIVLLKIFNLFLFLGKTPTFLLQARTTFIAKKVGAREPGDFRPITVSSVMIRCFHKILANRLSKRLFFDDRQRAFRSSDGCSENIYLLDLALRYHHRKFKSLYLASIDVAKAFDSLSHKAIIDTLYSAGVPSTFVRYVQYIYETGTTQLSCPNWTSESIRPLRGVKQGDPLSPMLFNLVLDRLFKRLPADVGADIDGVKINAAAFADDIFLMSSTARGLQMLLDTCASFLQEAGLQINAGKSFSLAIKSVPHAKKAVIDAGVAFHVGDQRLPALKRSDQWTYLGVPFTPEGRLSVNPATELMKDIENLSRAPFKPQQRLFILRVYIIPGLYHLLALGSVKLGVLTKIDRIIRAAARKWIFLPHDTPNGYFHATIKDGGLGLPSLRWVAPLHRLNRLKQLPLSNQAATSGSGLFLRDEIQRAAKRLEDHGINYDAKYKINNRWAQLLYRSVDGAALKESRAVNGQHDWVGDGTRFLTGKDFINSCRARINALPTRSRTSRGRYADRKCRAGCLAAETLNHVVQNCHRSHATRIKRHDALVHYIARNLRSSGYIVDIEPHFRTSEGLRKPDIVASLGPSAFIIDAQVVSEQTCLKRAHEKKVAYYSGNSDLIRSTMQRYDATEVRTLSCTLTWRGLWSPQALSGLIEMGLLRKKDIKVLSSRTLIGTLACYNIFCRSTRVFHGIYPTGVG

SEQ ID NO: 22452 - protein, 933 aa, Brachyptera putata
MRRRVNEDVIVDVNPPQSAINVENQPTSSSTSSIKDSESGGIQMSAWEQKLTTFLSSTDPCYNVLDEITNELLVFLSEAVHTIPGPVHPAVKHYRARKKRELEKNIHSYKCSSNPQRKTKREKQKRNQQYNYDLTQFLYYNQRRKVVGNIMNTSKTSTCSIPLKTVEEHFSNVFGEENVRTSFDDLNTTTIEGNTMITDDTYNLTLSVEEINEAMMRINIDTAPGPDGVLVRVLRELKCGKTLSLLGNAIFRTNYVPLKLREGRTILIFKGGEEKNISNWRPITIFSIVRRIIEKVLDKRLRSLVEFSTHQRGFVSTPGTFVNSSIINGCLKDAKYKKKDCCVTFLDVSKAFDNVGHLHIERCLNNLPIPSKLRDIILSFTTDNVIQVEVNRSETKCIPVRRGVPQGAPLSPTLFNLSIDHIIRELTEKTVSSSLGYSLVQELDHVSAVAFADDLAVIGRDIHSSSDLVSMAEMSFRKIGLEINSSKSNAINIALGKLSSEPIVSNTGTIIQAIGPAEKIKYLGIDFNSEIVINKNKIINSLHKDIVKLISSDLLKPDQKLNILNQFIWPTLIYPLQCAPIKKLSDNFLEDIDKIVRSAVKEIVGIPGDTPTSFIYSPRKFRGLGIMRATWEANIQNFNICRKLKIVDDPLLHTVRNLNDEMTDCVSKLKLTDSVVLDNRTTGRMLRNIMREKSFQEWVDLPHKGRGVELYKDTPRANKWVYTKEGLSSSQWTNSIKMSVNLAAVRAVPGRSFESTRCRHPACNEYETLPHVLGSCLKGELLRNNRHHNVRRLVADAFKQKNWDVYEEISCLSTCGSTKRVDIIAIRHDKKMVLILDPTIRFELGSTQAEDVNKEKRDHYMPCIPDLARKYKIDCQYWNVIGLFLGARGVIPSFFTNFLKTYAISTINLDHIVTSILKDSSFILHNHLYYNSS

SEQ ID NO: 22453 - protein, 1172 aa, Nomada fabriciana
MDNTAESGASDAEALSPGASVADLSALDSGTIVDDHGNPNGTETAQIIDLPLGDNNITCNICTRKGLVRCFLRAAEFEVHVTREHPPNNIVWRCGPCQRSFVKLHGWRCHFPRCTALAEEEVTGDAFEFKCTVCGNAYRTQRGLSQHERHRHPLVRNNERIQAGANPGRNRPRRRVPVWSEEETELLKILNVRFQNERYPNVAIRDFLPGKTLKQISDKRRLLPPQGQRAEVGAGTTSSPIWALVESDGYENENEAGEENIIECEVEAQASPQVGEGHVTFQEAILVSPLEEEHPLREIEQEIEEIGGQIGRISKEQINTIVVRLTEKLLQGSLEGPSRKGREGDSNRNRNRNRNRSGNRRAHETQRQNNNNRRKNKRQSRKGYEYSRYQEMYKVCPRRLIDMAVAGKTLNMTRAVETPSKEEVGPLYRDLWETTGPPIGKELYRSPQDITQMEAIWSPITIEEVKGKMRKIKNDTAAGVDGIIKAHLRADGALHVITKLYNLLMMSRVYPEHWKVHRTTLIPKPGKSILSASDWRPITIGSLLGRVYSAMIDRKLRSKVQQHQRQKGFTREDGCKNNVAILSSALNKIKEADGGIITIVDISKAFDTIPHGAIGDSLRAKGVPTSICEYVKSMYDGCKTKISCKERQVVEVTLQRGVKQGDPLSPLLFNLIIEPIIEEIDRTTEGVALGDEAISVLAFADDLVLLARSKEEAQRQIGMLVEFLGKLGMNISVGKCSTFQIVSKHKTWHQVNPDLKIGDGNIPYTEPDTVMKYLGVTVGPWKGLIRVTSQEIVEAAKTISRMGLKPHQKINLIRTHLLPRYIHQLVACPPALGTLREIDQEVKQVVKRILHLHPTTTDGVLYTSKGHGGLGMQRVENIVLVAKIRNAIRMAESDDAAVRQALQGQETIVRKYASAMGLEWPTTLDKVEEARRALRKKDTDKWASLISQGQGIREFFGDKVGNQWLYNPELLKPSRYLDAIRLRTNTFGTRVALHRARKEREIMCRRCHVQVETLGHILGNCTHTKPKRIRRHNEICKLIQDNVPKGWAVFPEPEISIDGELKKPDLVIKDQDRAFIVDVTVRYEDKENLRNAYREKVRKYANTAEYIKRKFKSVRADVIPIIVGCRGAMPIKTKQNMKVLGLGTKHCLTASLIALRSSLEMASEFIDYDHTR

SEQ ID NO: 22454 - protein, 1172 aa, Nomada fabriciana
MDNTAESGASDAEALSPGASVADLSALDSGTIVDDHGNPNGTETAQIIDLPLGDNNITCNICTRKGLVRCFLRAAEFEVHVTREHPPNNIVWRCGPCQRSFVKLHGWRCHFPRCTALAEEEVTGDAFEFKCTVCGNAYRTQRGLSQHERHRHPLVRNNERIQAGANPGRNRPRRRVPVWSEEETELLKILNVRFQNERYPNVAIRDFLPGKTLKQISDKRRLLPPQGQRAEVGAGTTSSPIWALVERDGYENENEAGDENIIECEVEAQASPQVGEGHVTFQEAILVSPLEEEHPLREIEQEIEEIGGQIGRISKEQINTIVVRLTEKLLQGSLEGPSRKGREGDSNRNRNRNRNRSGNRRAHETQRQNNNNRRKNKRQSRKGYEYSRYQEMYKVCPRRLIDMAVAGKTLNMTRAVETPSKEEVGPLYRDLWETTGPPIGKELYRSPQDITQMEAIWSPITIEEVKGKMRKIKNDTAAGVDGIIKAHLRADGALHVITKLYNLLMMSRVYPEHWKVHRTTLIPKPGKSILSASDWRPITIGSLLGRVYSAMIDRKLRSKVQQHQRQKGFTREDGCKNNVAILSSALNKIKEADGGIITIVDISKAFDTIPHGAIGDSLRAKGVPTSICEYVKSMYDGCKTKISCKERQVVEVTLQRGVKQGDPLSPLLFNLIIEPIIEEIDRTTEGIALGDEAISVLAFADDLVLLARSKEEAQRQIGMLVEFLGKLGMNISVGKCSTFQIVSKHKTWHQVNPDLKIGDGNIPYTEPDTVMKYLGVTVGPWKGLIRVTSQEIVEAAKTISRMGLKPHQKINLIRTHLLPRYIHQLVACPPALGTLREIDQEVKQVVKRILHLHPTTTDGVLYTSKGHGGLGMQRVENIVLVAKIRNAIRMAESDDAAVRQALQGQETIVRKYASAMGLEWPTTLDKVEEARRALRKKDTDKWASLISQGQGIREFFGDKVGNQWLYNPELLKPSRYLDAIRLRTNTFGTRVALHRARKEREIMCRRCHVQVETLGHILGNCTHTKPKRIRRHNEICKLIQDNVPKGWAVFPEPEISIDGELKKPDLVIKDQDRAFIVDVTVRYEDKENLRNAYREKVRKYANTAEYIKRKFKSVRADVIPIIVGCRGAMPIKTKQNMKVLGLGTKHCLTASLIALRSSLEMASEFIDYDHTR

SEQ ID NO: 22455 - protein, 907 aa, Nomada fabriciana
MPANEGIQEAGQTDPNRGNWEGVLREAIRAWQLDENHPLRALEVEIEELGSQAEIGREQIDVVVAAMTEKLLQGSPEDPSRRKGKRGGNRDRRAHRNEQDNSNRIRNRSRNRRQSRKGYEFTRYQEMYKVCPKRLIDMAIAGRTINTAKSVETPQKEEVSPLYQGLWEVQGPQIEQGMNCCKGETIPMAEVWTPITVEELTEKMRKIKNDTAAGIDGVAKHHLRANGALHVMAKLFNLLMLSRIYPTRWKIHRTTLIPKPGKFMAKASDWRPITIGSLLGRVYSAMIDRKLRNKIVQHQRQKGFTREDGCKNNIAILSSALSKIKEKEGGVITAVDISKALDTVPHSAIGGCLSAKVVPAAINQYLEDMYDGCKTRINCKDQQVVEVMLRRGVKQGDPLSPLLFNLAIEPIIDEIDKTTEGIALGDERVSVLAFADDLILLARNQEQARKQLSMLVGFLDKLRMSISVEKCSTFRIVSKNKTWHQIDPGLQIGDSNIPYTDPGKVMEYLGVTIGPWKGLSRVTSEEMVEAAKCISSMGLKPHQKVNLIRTHLLPKYIHRLVANPQPLGTLRDIDQEVKQVVKRILHPHPSTTDGVLYTSKGHGGLGLQKVENIVLIAKIRNAVRMKESSDTAVQLALEGQEPIIKKYASAVGLEWPTTLDRIEEARKALRMKDTDKWMGLISQGQGIREYLGDKVGNAWLYNPELLKPLRYIDAIKLRTNTFGTRVVLHRARKEREIMCRRCQVQVETLGHILGKCTHTKPKRIKRHNEICNLIKDNVPRHWAVFPEPEVSVNGELKKPDLVIKDQDKVFIVDVTVGYEDKENLRNAYQEKKRKYKETAEYFKQKLNSERAEVIPIVVGCRGAMPTKSKENMKVLGLGSRHCLTASLIALRSSLEMANEFIDYDRTR

SEQ ID NO: 22456 - protein, 1199 aa, Coccinella septempunctata
MQGGIVPSGADDPAYPSLPDLQVSCLRSEEFNAPVTRSRNQGGRGQRAGPLRSRLEEEPDGVSCGANGAAPRDGTVSQELVSRTAVGDPILDERRSRPMEAPNRRGVRTRWTEEDNILIMRVHFIARDVQERTGRTYRELLNDINPQRQSYANLLANRVRYLMDREKFSSVELDEIKRSFIPRSDTIHTDHQENETATEGRVHIRLSIQPSRLERVYYGNLLKYSGLSPYNRPKIPRLKHSIEMVNCVERVNAMVERYVEAANTLREMVDCVYAGAVTVCEELRVRIGEVRPMHGTGTTPPWQVRLERKIKFVRKRIGILNTYLNTETHTKKLMKGIRQIASESRIRTHGPKQQFNSQLELVCDKLKQKIKVLGNRMKRYNERVKRFKNNQLYYKNPKEFFRTLEAKETTEGSYPAEKDMYETWRGIWERDESHDDEAFWIRNAEGETLKYDMENLNITGDDITLVLKKTSNWTAPGSDKLHNYWWKNFTSTHQKLATLFQEALSDPTIIPEFLTLGVTHMIPKGNVSPDPKAFRPITCLPTVYKILTGIITKHLWKHVSRHKILAREQNGCRKNAQGCKELLTIDHLVTKQARKRLKNISIAWIDYKKAFDTVPHSWLLKILEIYGVSANIIELLKHLMTSWRTSLIFDNKRTPEIRISTGIFQGDKLSTLWFCLAMNPLSRLLNDNRYGYIIDTRSNTRITHQLYVDDLKLYATNEEQLRCLMRIVTSFTQTIKMEMGLDKCAVIHVKRGKLTRRGEMFVRDELAIKELGPDETYKYLGIQQALEIRSSEQKETFKSNLFGRVRKVLASKLNSKAMFTAINTWAVPSIAYSFGIIKWSKTDLKAIDTQIRVLLSKCGIHHPHASVNRLYLPRHQGGRGLQNIEMIHNKTVVELREYFHSKNSPFLHTICQEDLNITALNLGCRNHPPETITRDGMIAEWHSKALHGRYPEALKENRVNKELSLTYLKSGYLFPETEGRLAAIQDQVVPTRAYIKHIAKKNIPTDKCRKCSQALETIQHITSSCSILAPREYTHRHNAMAKVFHQAIANKTGLLTTVKKIHEYVPKPLLENSSVKIYWDERILTDRMIPHNRPDIVVIDKTNRKATIIDITVPADDNIARAYSEKLLKYHDLAFEMKEIYHLRSISILPLIISSNELVETHLVENVKHLELDQQLISQAQKEVILWTTRIVRMFMTTT

SEQ ID NO: 22457 - protein, 1215 aa, Coccinella septempunctata
MDSYIYIYIYIYMQGGIVPSGADDPAYPSLPDLQVSCLRSEEFNAPVTRSRNQGGRGQRAGPLRSRLEEEPDGVSCGANGAAPRDGTVSQELVSRTAVGDPILDERRSRPMEAPNRRGVRTRWTEEDNILIMRVHFIARDMQERTGRTYRELLTDIWNDINPQRQSYANLLANRVRYLMDREKFSSVELDEIKRSFIPRSDTIHTDHQENETATEGRVHIRLSIQPSRLERVYYGNLLKYSGLSPYNRPKIPRLKHSIEMVNCVERVNTMMERYVEAANTLREMVDCVYAGAVTVCEELRVRIGEVRPMHGTGTTPPWQVRLERKIKFVRKRIGILNTYLNTETHTKKLMKGIRQIASESRIRTHGPKQQFNSQLELVCDKLKQKIKVLGNRMKRYNERVKRFKNNQLYYKNPKEFFRTLEAKETTEGSYPAEKDMYETWRRIWERDESHDDEAFWIRNAEGETLKYDMENLNITGDDITLVLKKTSNWTAPGSDKLHNYWWKNFTSTQQKLATLFQEALSDPTIIPEFLTLGVTHMIPKGNVSPDPKAFRPITCLPTVYKILTGIITKHLWKHVSRHKILAREQNGCRKNAQGCKELLTIDHLVTKQARKRQKNISIAWIDYKKAFDTVPHSWLLKILEIYGVSANIIALLKHLMTSWRTSLIFDNKRTPEIRISTGIFQGDKLSTLWFCLAMNPLSRLLNDNRYGYIIDTRSNTRITHQLYVDDLKLYATNEEQLRCLMRIVTSFTQTIKMEMGLDKCAVIHVKRGKLTRRGEMFVRDELAIKELGPDETYKYLGIQQALEIRSSEQKETFKSNLFGRVRKVLASKLNSKAMFTAINTWAVPSIAYSFGIIKWSKTDLKAIDTQIRVLLSKYGIHHPHASVNRLYLPRHQGGRGLQNIEMIHNKTVVELREYFHSKNSPFLQTICQEDLNITALNLGCRNHPPETITRDGMIAEWHSKALHGRYPEALKENRVNKELSLTYLKSGYLFPETEGRLAAIQDQVVPTRAYIKHIAKKNIPTDKCRKCSQALETIQHVTSSCSILAPREYTHRHNAMAKVFHQAIANKTGLLTTVKKIHEYVPKPLLENSSVKIYWDERILTDRMIPHNRPDIVVIDKTNRKATIIDITVPADDNIARAYSEKLLKYHDLAFEMKEIYHLRSISILPLIISSNGLVETHLVENVKHLELDQQLISQAQKEVILWTTRIVRMFMTTT

SEQ ID NO: 22458 - protein, 1214 aa, Coccinella septempunctata
MLRPVYGRSIIQDAIVYGPKTMYGRNIVCWINIYIYIYIYIYIYIYIYIYIYIYIYIYIYIYIYIYIYIYIYIYIYIYIYIYIYIYIYTSEEDGASVMNEVQTHSTDASVRRDRRTRWTEEDNILILRVHFIAKDLQQREGRNYREVLTQIWNEINPHRQSYTNLLSNRVRWLLENNKFSNPELDTIKESFIPRGATDNEQDELEDDEEERNGYQISMRTTKLERNLLKNIYKYYGLSPKNRPKIPRMKGSKKLLECVQRVDLLLETHITPNTTLQTMVDYVYAGAITICEELGMKIGEFPMAANPIVSTPPWKTRLERKIKVMRKKIGTLHTYLNNGVRTKRVIKGINQIIKDFKINPKSSTESLQLSLLAVDDRLKQKVKSLGNRIKRYNDRVKRFKNNQLYYKNQKEFFRSLEPVENLEGEYPTEKNMYDTWKRIWEQEEQHDDDAYWIKNAENEIHRYTMDEVAITVEDVWEVMKKSNNWSAPGSDKIHNYWWKNFKSTHQQLAVLFHKALDDPTTVPNAFTAGVTHMIPKGNNINDPKKYRPITCLPTVYKFLTGVLTKHIWRHVNKHQILSREQNGCRKNAQGCKELLTIDCLITKQAKKKMRNISIAWIDYKKAFDSVPHSWLLKILKLYGVSQNIINLLEYLMKTWRTHLSFGNKQENIKTAEIKIKRGIFQGDKLSALWFCLALNFLSKLLNEGNYGYAIDKIKNIRITHQLYVDDLKLYATNEEQLMRLLRIVASFSQTIRMEMGLDKCAVIHVKRGRLVDGEEMLVQDGIAIQRLAPEETYKYLGVQQALEIRTSDAKASFQQKFFDRVKKILKSKLNSKAMFTAINIWAVPSLTYSFGVIKWSNTELKAIDTKVRVLMSKYGIHHPHASVNRLYMPRHSGGRGLQNIEITHQKAVNELRKYFHSRNSPFFKTICREDHNITALNLRSTTDPPRMLTLETMSEEWHSKPLHGRYPAALKEKRVNQQHSLTYLTSGYLFPETEGRITAIQDQVIPTRAYLKHITGKNILTDRCRKCCQALETIQHITSSCSILAPKEYTNRHNAMAKVYHQAIAIKTGLINSTKKIHEYVPATVLDNQGFKLYWDNSVETDRMITHNRPDIILFDKEKRKVTIIDVTVPADDNISRAYSEKLNKYHDLAFEMKEMYQLKTISILPLIITTNGLVESHLVDNTQSLELDLNLISIAQKEVILWTARIVRMFLTTT

SEQ ID NO: 22459 - protein, 1117 aa, Coccinella septempunctata
MDGAQTHSTDVTARRDRRTRWTEEDNILILRVHFIAKDLQQREGRNYREQLTETWNDINPHRQSYPNLLANRVRWLLENNKFSNAELDTIKNSFIPRGATNNQQNEAEDDDGERTCSRISIRTTKLERNLLKNIHKYYGLSPENRPIIPRIKGSKKLLECVQRMDLLLESHIKTNTTLEAMVDYVYAGALTICEELGKKINEPHTDTHQVGSTPPWKARLERKIKVMRKKIGTLHTYLNTDTRTNRVIKGINQITKEFSINTNCSNETFQLALVAVGDRLKQKIKSLGNRIKRYNDRVKRFKNNQLYYKNQKEFFRSLEPAENLEGEYPTEKEMHEAWKGIWEHDEKHEDEAYWIKDAEKEMGQYTMDDVAITVEDIWEVMRKSNNWSAPGSDKIHNYWWKNFKSTHQQLALLFQGALNDPTTVPETFTSGVTHMIPKDNNISNPNKYRPITCLPTIYKFLTGVLTKYIWKHVNKHKILSREQNGCRRDAQGCKELLTIDCLITKQAKKKLRNISIAWVDYKKAFDSVPHSWLLKILKLYGVSENIVNLLESLMRTWRTQLSFGNKQKNFRTSVIKIMRGIFQGDKLSALWFCLALNFMSKLLNEGNYGYVIDKIKNIRITHQLYVDDLKLYAANEEQLMRLLRIVTSFSQTIKMEMGLDKCAVIHVKRGKLVSGEEMLIQNGITIQRLASDETYKYLGVQQALEIKTSDAKASFQQKFFDRVKKILKSKLSSKAMFTAINIWAVPSLAYSFGVIKWSNTELKAIDTKVRVLMSKYGIHHPHASINRLYMPRHSGGRGLQNIEITHQKAVTELRKYFQSRNSPFFNIICREDHNITALNLGCTTDPPQMLTLAALSEEWYSKPLHGRYPAALKEKKVNQQHSLTYLTSGYLFPETEGRIAAIQDQVVPTRAYMKHIAGKNIPTDRCRKCGQARETIQHITSSCSILAPKEYTNRHNAMAKVYHQAIAIKTGLITAMKKTHEYKPATVLENRSFKIYWDNTVETDRRIPHNRPDIVLFDKENRKVIIIDITVPADDNISRAYSEKVNKYHDLAFEMKEIYALKTVSVLPLIISTNGLVESHLVDNTKSLELDLNIISTAQKEVLLWTARIVRMFLTTT

SEQ ID NO: 22460 - protein, 1117 aa, Coccinella septempunctata
MDGAQTHSTDATARRDRRTRWTEEDNILILRVHFIAKDLQQREGRNYREQLTETWNDINPHRQSYPNLLANRVRWLLENNKFSNAELDTIKNSFIPRGATNNQQNEAEDDDGERTCSRISIRTTKLERNLLKNIHKYYGLSPENRPIIPRIKGSKKLLECVQRMDLLLESHIKTNTTLEAMVDYVYAGALTICEELGKKINEPHTDTHQVGSTPPWKARLERKIKVMRKKIGTLHTYLNTDTRTNRVIKGINQITKEFSINTNCSNETFQLALVAVGDRLKQKIKSLGNRIKRYNDRVKRFKNNQLYYKNQKEFFRSLEPAENLEGEYPTEKEMHEAWKGIWEHDEKHEDEAYWIKDAEKEMGQYTMDDVAITVEDIWEVMRKSNNWSAPGSDKIHNYWWKNFKSTHQQLALLFQGALNDPTTVPETFTSGVTHMIPKDNNISNPNKYRPITCLPTIYKFLTGVLTKYIWKHVNKHKILSREQNGCRRDAQGCKELLTIDCLITKQAKKKLRNISIAWVDYKKAFDSVPHSWLLKILKLYGVSENIVNLLESLMRTWRTQLSFGNKQKNFRTSVIKIMRGIFQGDKLSALWFCLALNFMSKLLNEGNYGYVIDKIKNIRITHQLYVDDLKLYAANEEQLMRLLRIVTSFSQTIKMEMGLDKCAVIHVKRGKLVSGEEMLIQNGITIQRLASDETYKYLGVQQALEIKTSDAKASFQQKFFDRVKKILKSKLSSKAMFTAINIWAVPSLAYSFGVIKWSNTELKAIDTKVRVLMSKYGIHHPHASINRLYMPRHSGGRGLQNIEITHQKAVTELRKYFQSRNSPFFNIICREDHNITALNLGCTTDPPQMLTLAALSEEWYSKPLHGRYPAALKEKKVNQQHSLTYLTSGYLFPETEGRIAAIQDQVVPTRAYMKHIAGKNIPTDRCRKCGQARETIQHITSSCSILAPKEYTNRHNAMAKVYHQAIAIKTGLITAMKKTHEYKPATVLENRSFKIYWDNTVETDRRIPHNRPDIVLFDKENRKVIIIDITVPADDNISRAYSEKVNKYHDLAFEMKEIYALKTVSVLPLIISTNGLVESHLVDNTKSLELDLNIISTAQKEVLLWTARIVRMFLTTT

SEQ ID NO: 22461 - protein, 997 aa, Coccinella septempunctata
MRTTKLERNLLKNIYKYYGLSPKNRPKIPRMKGSKKLLECVQRVDLLLETHITPNTTLQTMVDYVYAGAITICEELGMKIGEFPMAANPIVSTPPWKTRLERKIKVMRKKIGTLHTYLNNGVRTKRVIKGINQIIKDFKINPKSSTESLQLSLLAVDDRLKQKVKSLGNRIKRYNDRVKRFKNNQLYYKNQKEFFRSLEPVENLEGEYPTEKNMYDTWKRIWEQEEQHDDDAYWIKNAENEIHRYTMDEVAITVEDVWEVMKKSNNWSAPGSDKIHNYWWKNFKSTHQQLAVLFHKALDDPTTVPNAFTAGVTHMIPKGNNINDPKKYRPITCLPTVYKFLTGVLTKHIWRHVNKHQILSREQNGCRKNAQGCKELLTIDCLITKQAKKKMRNISIAWIDYKKAFDSVPHSWLLKILKLYGVSQNIINLLEYLMKTWRTHLSFGNKQENIKTAEIKIKRGIFQGDKLSALWFCLALNFLSKLLNEGNYGYAIDKIKNIRITHQLYVDDLKLYATNEEQLMRLLRIVASFSQTIRMEMGLDKCAVIHVKRGRLVDGEEMLVQDGIAIQRLAPEETYKYLGVQQALEIRTSDAKASFQQKFFDRVKKILKSKLNSKAMFTAINIWAVPSLTYSFGVIKWSNTELKAIDTKVRVLMSKYGIHHPHASVNRLYMPRHSGGRGLQNIEITHQKAVNELRKYFHSRNSPFFKTICREDHNITALNLRSTTDPPRMLTLETMSEEWHSKPLHGRYPAALKEKRVNQQHSLTYLTSGYLFPETEGRITAIQDQVIPTRAYLKHITGKNILTDRCRKCCQALETIQHITSSCSILAPKEYTNRHNAMAKVYHQAIAIKTGLINSTKKIHEYVPATVLDNQGFKLYWDNSVETDRMITHNRPDIILFDKEKRKVTIIDVTVPADDNISRAYSEKLNKYHDLAFEMKEMYQLKTISILPLIITTNGLVESHLVDNTQSLELDLNLISIAQKEVILWTARIVRMFLTTT

SEQ ID NO: 22462 - protein, 1010 aa, Propylea japonica
MEDQPEERTENRISIRTTRLERNLLKNLYLYSGISPQNRPKIPRMKGSKKLLENVQKVNSLIQNQISSTSSIQEIVDLVYAAAVTVCEEHGLKIGEIHNTYQPGSAPPWKVRLERKIKVMRKKIGLLHTYLNTELRTKKILRGINKITKEMNINANCPIEAFHQALTVVQDKLKQKIKALGNRIKRYNERVLRFRNNQLFYKNQKEFFRSLDSSEELGGNYPTEKEMYDSWRGVWEKDERHDDEAYWIKNAEGEIDKYPMDDVKITVQDIKEVIRKASNWSAPGSDKIHNYWWKNLTSTHEQLATLFQRALTDPKIIPETLTSGITHMIPKDNNTHDPTKYRPITCLPTIYKILTAVITKYIWRHVNKHNILAREQNGCRKDARGCKELLTIDSLVTKQARKKLKNISIAWIDYKKAFDSVPHSWLLKILKLYGVSEKITNLLEYLMKSWRTELMFGNKKQTFKTSMIKILRGIFQGDKLSALWFCLVLNLLSKLLNEGNYGYVIDKTRNIRITHQLYVDDLKLYATNEDQLLRLLRIVSSYTQTIKMEMGLDKCAVIHVKRGKLVEGTDMLIQDGTTLQRLTQEETYKYLGVQQALEIKTSDAKASFQHKFFDRIRKVLKSKLNSKAMFTAINIWAIPSITYSFGIIKWSNTELKAIDTKVRVLMSKYGIHHPHSSINRLYLPRHCGGRGLQNIEMTHQRAVSELRTYFKSRRSPFFQAICREDNNITPLNLNSTTEPPQMMTYETLANEWHGKSLHGRYPTALKEKRINKQHSLTYLTSGYLFPETEGRIIAIQDQVMPTRAYMKHIAGKNILTDRCRRCGQALESIQHITSSCSILAPKEYTNRHNAMAKVYHQGIAIKTGLLKNRKKLHEYIPPTVLENNRYLLYWDNVIQTDRKIAHNRPDIVLFNKVNKEATIIDITVPADDNITKAYSEKISKYQDLAFELKEIHKLKTVSILPLIISTNGLVESHLKDHTVSLDLELNLIDTAQKEVLLWTARMVRIFLTTT

SEQ ID NO: 22463 - protein, 1117 aa, Coccinella septempunctata
MDGAQTHSTDVTARRDRRTRWTEEDNILILRVHFIAKDLQQREGRNYREQLTKTWNDINPHRQSYPNLLANRVRWLLENNKFSNAELDTIKNSFIPRGATNNQQNEAEDDDGERTCSRISIRTTKLERNLLKNIHKYYGLSPENRPIIPRIKGSKKLLECVQRMDLLLESHIKTNTTLEAMVDYVYAGALTICEELGKKINEPHTDTHQVGSTPPWKARLERKIKVMRKKIGTLHTYLNTDTRTNRVIKGINQITKEFSINTNCSNETFQLALVAVGDRLKQKIKSLGNRIKRYNDRVKRFKNNQLYYKNQKEFFRSLEPAENLEGEYPTEKEMHEAWKGIWEHDEKHEDEAYWIKDAEKEMGQYTMDDVAITVEDIWEVMRKSNNWSAPGSDKIHNYWWKNFKSTHQQLALLFQGALNDPTTVPETFTSGVTHMIPKDNNISNPNKYRPITCLPTIYKFLTGVLTKYIWKHVNKHKILSREQNGCRRDAQGCKELLTIDCLITKQAKKKLRNISIAWVDYKKAFDSVPHSWLLKILKLYGVSENIVNLLESLMRTWRTQLSFGNKQKNFRTSVIKIMRGIFQGDKLSALWFCLALNFMSILLNEGNYGYVIDKIKNIRITHQLYVDDLKLYAANEEQLMRLLRIVTSFSQTIKMEMGLDKCAVIHVRRGKLVSGEEMLIQNGITIQRLASDETYKYLGVQQALEIKTSDAKASFQQKFFDRVKKILKSKLSSKAMFTAINIWAVPSLAYSFGVIKWSNTELKAIDTKVRVLMSKYGIHHPHASINRLYMPRHSGGRGLQNIEITHQKAVTELRKYFQSRNSPFFNIICREDHNITALNLGCTTDPPQMLTLAALSEEWYSKPLHGRYPAALKEKKVNQQHSLTYLTSGYLFPETEGRIAAIQDQVVPTRAYMKHIAGKNIPTDRCRKCGQARETIQHITSSCSILAPKEYTNRHNAMAKVYHQAIAIKTGLITAMKKTHEYKPATVLENRSFKIYWDNTVETDRRIPHNRPDIVLFDKENRKVIIIDITVPADDNISRAYSEKVNKYHDLAFEMKEIYALKTVSVLPLIISTNGLVESHLVDNTKSLELDLNIISTAQKEVLLWTARIVRMFLTTT

SEQ ID NO: 22464 - protein, 1117 aa, Coccinella septempunctata
MDGAQTHSTDVTARRDRRTRWTEEDNILILRVHFIAKDLQQREGRNYREQLTETWNDINPHRQSYPNLLANRVRWLLENNKFSNAELDTIKNSFIPRGATNNQQNEAEDDDGERTCSRISIRTTKLERNLLKNIHKYYGLSPENRPIIPRIKGSKKLLECVQRMDLLLESHIKTNTTLEAMVDYVYAGALTICEELGKKINEPHTDTHQVGSTPPWKARLERKIKVMRKKIGTLHTYLNTDTRTNRVIKGINQITKEFSINTNCSNETFQLALVAVGDRLKQKIKSLGNRIKRYNDRVKRFKNNQLYYKNQKEFFRSLEPAENLEGEYPTEKEMHEAWKGIWEHDEKHEDEAYWIKDAEKEMGQYTFDDVAITVEDIWEVMRKSNNWSAPGSDKIHNYWWKNFKSTHQQLALLFQGALNDPTTVPETFTSGVTHMIPKDNNISNPNKYRPITCLPTIYKFLTGVLTKYIWKHVNKHKILSREQNGCRRDAQGCKELLTIDCLITKQAKKKLRNISIAWVDYKKAFDSVPHSWLLKILKLYGVSENIVNLLESLMRTWRTQLSFGNKQKNFRTSVIKIMRGIFQGDKLSALWFCLALNFMSKLLNEGNYGYVIDKIKNIRITHQLYVDDLKLYAANEEQLMRLLRIVTSFSQTIKMEMGLDKCAVIHVKRGKLVSGEEMLIQNGITIQRLASDETYKYLGVQQALEIKTSDAKASFQQKFFDRVKKILKSKLSSKAMFTAINIWAVPSLAYSFGVIKWSNTELKAIDTKVRVLMSKYGIHHPHASINRLYMPRHSGGRGLQNIEITHQKAVTELRKYFQSRNSPFFNTICREDHNITALNLGCTTDPPQMLTLAALSEEWYSKPLHGRYPAALKEKKVNQQHSLTYLTSGYLFPETEGRIAAIQDQVVPTRAYMKHIAGKNIPTDRCRKCGQARETIQHITSSCSILAPKEYTNRHNAMAKVYHQAIAIKTGLITAMKKTHEYKPATVLENRSFKIYWDNTVETDRRIPHNRPDIVLFDKENRKVIIIDITVPADDNISRAYSEKVNKYHDLAFEMKEIYALKTVSVLPLIISTNGLVESHLVDNTKSLELDLNIISTAQKEVLLWTARIVRMFLTTT

SEQ ID NO: 22465 - protein, 1117 aa, Coccinella septempunctata
MDGAQTHSTDVTARRDRRTRWTEEDNILILRVHFIAKDLQQREGRNYREQLTETWNDINPHRQSYPNLLANRVRWLLENNKFSNAELDTIKNSFIPRGATNNQQNEAEDDDGERTCSRISIRTTKLERNLLKNIHKYYGLSPENRPIIPRIKGSKKLLECVQRMDLLLESHIKTNTTLEAMVDYVYAGALTICEELGKKINEPHTDTHQVGSTPPWKARLERKIKVMRKKIGTLHTYLNTDTRTNRVIKGINQITKEFSINTNCSNETFQLALVAVGDRLKQKIKSLGNRIKRYNDRVKRFKNNQLYYKNQKEFFRSLEPAENLEGEYPTEKEMHEAWKGIWEHDEKHEDEAYWIKDAEKEMGQYTMDDVAITVEDIWEVMRKSNNWSAPGSDKIHNYWWKNFKSTHQQLALLFQGALNDPTTVPETFTSGVTHMIPKDNNISNPNKYRPITCLPTIYKFLTGVLTKYIWKHVNKHKILSREQNGCRRDAQGCKELLTIDCLITKQAKKKLRNISIAWVDYKKAFDSVPHSWLLKILKLYGVSENIVNLLESLMRTWRTQLSFGNKQKNFRTSVIKIMRGIFQGDKLSALWFCLALNFMSKLLNEGNYGYVIDKIKNIRITHQLYVDDLKLYAANEEQLMRLLRIVTSFSQTIKMEMGLDKCAVIHVKRGKLVSGEEMLIQNGITIQRLASDETYKYLGVQQALEIKTSDAKASFQQKFFDRVKKILKSKLSSKAMFTAINIWAVPSLAYSFGVIKWSNTELKAIDTKVRVLMSKYGIHHPHASINRLYMPRHSGGRGLQNIEITHQKAVTELRKYFQSRNSPFFNIICREDHNITALNLGCTTDPPQMLTLAALSEEWYSKPLHGKYPAALKEKKVNQQHSLTYLTSGYLFPETEGRIAAIQDQVVPTRAYMKHIAGKNIPTDRCRKCGQARETIQHITSSCSILAPKEYTNRHDAMAKVYHQAIAIKTGLITAMKKTHEYKPATVLENRSFKIYWDNTVETDRRIPHNRPDIVLFDKENRKVIIIDITVPADDNISRAYSEKVNKYHDLAFEMKEIYALKTVSVLPLIISTNGLVESHLVDNTKSLELDLNIISTAQKEVLLWTARIVRMFLTTT

SEQ ID NO: 22466 - protein, 954 aa, Coccinella septempunctata
MDLLLESHIKTNTTLEAMVDYVYAGALTICEELGKKINEPHTDTHQVGSTPPWKARLERKIKVMRKKIGTLHTYLNTDTRTNRVIKGINQITKEFSINTNCSNETFQLALVAVGDRLKQKIKSLGNRIKRYNDRVKRFKNNQLYYKNQKEFFRSLEPAENLEGEYPTEKEMHEAWKGIWEHDEKHEDEAYWIKDAEKEMGQYTMDDVAITVEDIWEVMRKSNNWSAPGSDKIHNYWWKNFKSTHQQLALLFQGALNDPTTVPETFTSGVTHMIPKDNNISNPNKYRPITCLPTIYKFLTGVLTKYIWKHVNKHKILSREQNGCRRDAQGCKELLTIDCLITKQAKKKLRNISIAWVDYKKAFDSVPHSWLLKILKLYGVSENIVNLLESLMRTWRTQLSFGNKQKNFRTSVIKIMRGIFQGDKLSALWFCLALNFMSKLLNEGNYGYVIDKIKNIRITHQLYVDDLKLYAANEEQLMRLLRIVTSFSQTIKMEMGLDKCAVIHVKRGKLVSGEEMLIQNGITIQRLASDETYKYLGVQQALEIKTSDAKASFQQKFFDRVKKILKSKLSSKAMFTAINIWAVPSLAYSFGVIKWSNTELKAIDTKVRVLMSKYGIHHPHASINRLYMPRHSGGRGLQNIEITHQKAVTELRKYFQSRNSPFFNIICREDHNITALNLGCTTDPPQMLTLAALSEEWYSKPLHGRYPAALKEKKVNQQHSLTYLTSGYLFPETEGRIAAIQDQVVPTRAYMKHIAGKNIPTDRCRKCGQARETIQHITSSCSILAPKEYTNRHDAMAKVYHQAIAIKTGLITAMKKTHEYKPATVLENRSFKIYWDNTVETDRRIPHNRPDIVLFDKENRKVIIIDITVPADDNISRAYSEKVNKYHDLAFEMKEIYALKTVSVLPLIISTNGLVESHLVDNTKSLELDLNIISTAQKEVLLWTARIVRMFLTTT

SEQ ID NO: 22467 - protein, 891 aa, Coccinella septempunctata
MRKKIGTLHTYLNTDTRTNRVIKGINQITKEFSINTNCSNETFQLALVAVGDRLKQKIKSLGNRIKRYNDRVKRFKNNQLYYKNQKEFFRSLEPAENLEGEYPTEKEMHEAWKGIWEHDEKHEDEAYWIKDAEKEMGQYTMDDVAITVEDIWEVMRKSNNWSAPGSDKIHNYWWKNFKSTHQQLALLFQGALNDPTTVPETFTSGVTHMIPKDNNISNPNKYRPITCLPTIYKFLTGVLTKYIWKHVNKHKILSREQNGCRRDAQGCKELLTIDCLITKQAKKKLRNISIAWVDYKKAFDSVPHSWLLKILKLYGVSENIVNLLESLMRTWRTQLSFGNKQKNFRTSVIKIMRGIFQGDKLSALWFCLALNFMSKLLNEGNYGYVIDKIKNIRITHQLYVDDLKLYAANEEQLMRLLRIVTSFSQTIKMEMGLDKCAVIHVRRGKLVSGEEMLIQNGITIQRLASDETYKYLGVQQALEIKTSDAKASFQQKFFDRVKKILKSKLSSKAMFTAINIWAVPSLAYSFGVIKWSNTELKAIDTKVRVLMSKYGIHHPHASINRLYMPRHSGGRGLQNIEITHQKAVTELRKYFQSRNSPFFNIICREDHNITALNLGCTTDPPQMLTLAALSEEWYSKPLHGRYPAALKEKKVNQQHSLTYLTSGYLFPETEGRIAAIQDQVVPTRAYMKHIAGKNIPTDRCRKCGQARETIQHITSSCSILAPKEYTNRHNAMAKVYHQAIAIKTGLITAMKKTHEYKPATVLENRSFKIYWDNTVETDRRIPHNRPDIVLFDKENRKVIIIDITVPADDNISRAYSEKVNKYHDLAFEMKEIYALKTVSVLPLIISTNGLVESHLVDNTKSLELDLNIISTAQKEVLLWTARIVRMFLTTT

SEQ ID NO: 22468 - protein, 1042 aa, Coccinella septempunctata
MDGAQTHSTDVTARRDRRTRWTEEDNILILRVHFIAKDLQQREGRNYREQLTETWNDINPHRQSYPNLLANRVRWLLENNKFSNAELDTIKNSFIPRGATNNQQNEAEDDDGERTCSRISIRTTKLERNLLKNIHKYYGLSPENRPIIPRIKGSKKLLECVQRMDLLLESHIKTNTTLEAMVDYVYAGALTICEELGKKINEPHTDTHQVGSTPPWKARLERKIKVMRKKIGTLHTYLNTDTRTNRVIKGINQITKEFSINTNCSNETFQLALVAVGDRLKQKIKSLGNRIKRYNDRVKRFKNNQLYYKNQKEFFRSLEPAENLEGEYPTEKEMHEAWKGIWEHDEKHEDEAYWIKDAEKEMGQYTMDDVAITVEDIWEVMRKSNNWSAPGSDKIHNYWWKNFKSTHQQLALLFQGALNDPTTVPETFTSGVTHMIPKDNNISNPNKYRPITCLPTIYKFLTGVLTKYIWKHVNKHKILSREQNGCRRDAQGCKELLTIDCLITKQAKKKLRNISIAWVDYKKAFDSVPHSWLLKILKLYGVSENIVNLLESLMRTWRTQLSFGNKQKNFRTSVIKIMRGIFQGDKLSALWFCLALNFMSKLLNEGNYGYVIDKIKNIRITHQLYVDDLKLYAANEEQLMRLLRIVTSFSQTIKMEMGLDKCAVIHVKRGKLVSGEEMLIQNGITIQRLASDETYKYLGVQQALEIKTSDAKASFQQKFFDRVKKILKSKLSSKAMFTAINIWAVPSLAYSFGVIKWSNTELKAIDTKVRVLMSKYGIHHPHASINRLYMPRHSGGRGLQNIEITHQKAVTELRKYFQSRNSPFFNIICREDHNITALNLGCTTDPPQMLTLAALSEEWYSKPLHGRYPAALKEKKVNQQHSLTYLTSGYLFPETEGRIAAIQDQVVPTRAYMKHIAGKNIPTDRCRKCGQARETIQHITSSCSILAPKEYTNRHNAMAKVYHQAIAIKTGLITAMKKTHEYKPATVLENRSFKIYWDNTVETDRRIPHNRPDIVLFDKENRKVIIIDITVPADDNISTLKK

SEQ ID NO: 22469 - protein, 1085 aa, Coccinella septempunctata
MRVHFIARDIQQRTGGSYRELLTEVWNDIYPQRHSYPNLLANRVRWLIERQKFSVTELNTIEHSITPRGASTEADPVEPEEALSEARAHARLSIQPSRLERVYYGNLQKYSGLSPSKRPKIPRMRQSKQLLECVQKMDKTMKRYLEASVTLRDVVDCVFAGAVTVCEELGIKIGDNYMTRHPKSAPPWKLRLEKKIKLIRKRIGILHTYLNEESHNRKIMKSIKQIASESHIRTSGSNLHLREKLTVVSDMLKQKIKALGNRLKRFNERVKRYRNNQLYYKNQKEFFRTLEDTEIKRGAYPGEREMYGVWKEIWERNVTHDDEAFWIKDAEKESTKYTMESLEIIPEDIKSALKNTNNWAAPGSDGLHNYWWKNFQSSHQQLAKFFQESLSEPSTIPEFFTLGVTHMLPKGDICPDPRSYRPITCLPTIYKILTGIITKHLWKHVSKYNILARQQNGCRKDAQGCKEILSIDHLITTLARKKMRNISVAWIDYKKAFDSVPHSWLLKVLKLYGVSENIIRLLKHMMMTWRTNLVFGNNSTPEIRILTGIFQGDRLSTLWFCLALNFLSSLLNNNSYGYLVDSRSNIRLNHNLYVDDLKLYAANQEQLRRLLKIVESFTQTIRMGMGLDKCAVIHVKRGKLTRGEEMLIQDEMPLKQLGSEETYKYLGIQQALEIKTSDQKEAFKTKFFSRIRKILRSKLNSKALFTAIKTWAIPSIAYSFGVIKWSNTDLKAIDTQVRVLLSKYGVHHPHASVNRLYIPRNHGGRGLQSVENAHSKAVKVLREYFHSKNSPFIRAICQQDQNITALNLACRDDIPQAQSDDRLLEEWYGKALHGRYPEALKNQRVNKELSLTYLKSGYLFPETEGRLIAVQDQVVPTRAYMKHIAKKNIATDKCRKCSQALETIQHVTSSCSILAPREYTQRHNAMAKVYHQAIAIKTGLILTSRRVHEYLPKPILENTSFKLYWDIPITTDRTVPHNRPDIVVFDKTKNRVTIIDVTVPADDNISRAYAEKLTKYHDLAFEMKEIYKLNMITILPLIISTNGLVESHLAENTRLLELEENLISEAQKEVILWTTRIVRMFLTAG

SEQ ID NO: 22470 - protein, 956 aa, Coccinella septempunctata
MLECVQKMDKTMKRYLEASVTLRDVVDCVFAGAVTVSEELGIKIGDTYITQHPKSAPPWKLRLEKKIKLIRKRIGILHTYLNEESHNRKIMKSIKQIASESHIRTSGSNLHLREKLTVISDKLKQKIKALGNRLKRYNERVKRYRNNQLYYKNQKEFFRTLEDTEIKRGAYPGEREMYGVWKEIWERNVTHDDEVFWIKDAEKESTKYTMESLEITPEDIKSALKNTNNWAAPGSDGLHNYWWKNFQSSHQQLAKFFQESLSEPSTIPEFFTLGVTHMLPKGDICPDPRSYRPITCLPTIYKILTGIITKHLWKHVSKYNILARQQNGCRKDAQGCKEILSIDHLITTLARKKLRNISVAWIDYKKAFDSVPHSWLLKVLKLYGVSENIIKLLKHMMMTWRTNLVFGNNSTPEIKILTGIFQGDRLSTLWFCLALNFLSSLLNNSSYGYLVDSRSNIRLNHNLYVDDLKLYAANEEQLRRLLKIVESFTLTIRMEMGLDKCAVIHVKRGKLTRGGEMLIQDEMPLKQLGSEETYKYLGIQQALEIKTSDQKEAFKTKFFSRIRKILRSKLNSKALFTAINTWAIPSIAYSFGVIKWSNTDLKAIDTQVRVLLSKYGMHHPHASVNRLYIPRNHGGRGLQSVENAHFKAVKVLREYFHSKNSPFIRAICQQDQNITALNLACRDNIPQAQSDDRLLEEWCGKALHGRYPEALKNQRVNKELSLTYLKSGYLFPETEGRLIAVQDQVVPTRAYMKHIAKKNIATDKCRKCSQALETIQHVTSSCSILAPREYTQRHNAMAKVYHQAIAIKTGLILTSRRVHEYLPKPILENTSFKLYWDIPITTDRTVPHNRPDIVIFDKTKNRVTIIDVTVPADDNISRAYAEKLTKYHDLAFEMKEIYELNMITILPLIITTNGLVESHLAENTRLLELEENLISEAQKEVILWTTRIVRMFLTAG

SEQ ID NO: 22471 - protein, 1166 aa, Propylea japonica
MLLCQGGRGQRAGPLRSRQEEEPDGVNCGASGAAPRDGTVSRILVSQNVEREPSLDETRSYPAGSLNRRDARTRWSEEDNILLMRVHYIAKDMQPRTGKTYRELLTQTWNDINPQRPSYANLLSNRVRWLLEREKFTTTELDTIAQSFIPRGAPENTDIGEVTGTENRRSIRLSVQPSRLERAYYSNLQLYSGLSPSKRPKIPRMKQSKEMLDNMQRMNRIMGRYVEEATTLREVVDCVYAGAVTVCEELKINIDEVPQTYHQERTPPWKIRLERKIKIIRKKIGTIHTYLNTETPANRILRRIRQIVSESRIRNNGSNQFLKEQLMVISDKLKQKIKALGNRIKRYNERVKRYRNNQLYYKNPKEFFRRLDSADTASGVYPREEEMFEEWRGIWEQRKTHDDEASWIKDAEKETKNYTMEDLKIVQEDITTVLKKANNWAAPGSDKLHNYWWKYFETTHGKLAELFQRALAEPSIIPEFFTLGVTHMLPKSNINPDPRSYRPITCLPTVYKILTGIITKHLWSHVSKHNILAKEQNGCRRDAQGCKELLTIDHLITKQARKKLRNISVAWIDYKKAFDSVPHSWLLKVLKLYGVSEKIINLLKHLMSAWRTNLTFGSNTTPEIRILTGIFQGDKLSTLWFCLALNLLSKLLNNNRYGYLVDTRSNIKITHQLYIDDLKLYAANEEQLRRLLSIVTTYTKDIKMEMGLEKCALIHVKRGKLTYGGQMLVNNDIAIQELAPGETYKYLGIQQALEIRTSEQKEAFKNKFFDRIKKVLRSKLNSKAMFTAINTWAIPSIAYSFGVISWSNTDLKAIDMQVRVLMTKYGIHHPHASVNRLYMPRHQGGRGLQNVEMTHDKAVIELRKHFHTKHLPFFQSICQEDHNITALNLACRSSPPPTLTPDRLMEEWHSKPLHGRYPEALKEKRVNKDLSLTYLKSGYLFPETEGRLIAIQDQVVPTRAYMKHIAKKNIPTDRCRKCFQATESIQHVTSSCSILAPREYTQRHNAMAKVFHQAIAIKKGLLLTSRRVHEYSPKTILENNEYKLYWDNPIVTDRAVQHNRPDIVIFDKMNSKVIIIDVTVPADDNISKAYTEKLTKYHDLAFEMKEIYQLRMVTILPLIISTNGLVESHLTENTELLELEPELISRAQKEVILWTTRIVRMFLTAT

SEQ ID NO: 22472 - protein, 1198 aa, Coccinella septempunctata
MTPLGSDVPAYPNHPDLQISSLRSVEYDAPVTRSGNQGGSGQRAGPLRSRLEVEPDGVSCGASGAAPREGTVSHGLDSGNAEGNPSLDERESHPTGAPNRRDARTRWTQEDNILLMRVHYIAKEMQPTTGRSYRELLTEIWNDINPHRPSYANLLSNRVRWLFEREKFTTTELHTIAQSFIPRGAPITEDIAEEAQENARSHTRMSLQPSRLEREYYRNLQCYSGLSSSKRPKIPRMKQSREMLDCVQRVNRTMERYTGASATLREMVDCVYAGAVTVCGELKINIGEGHTTYSQEQTPPWKLRLEKKIKVMRKKIGTLHTYLNTNTPTNKILRKIRQIASESRIRTNSSIQLLKEKLIVVSDQLKQKIKALGNRIKRYNERVKRYRNNHLYYKNPKEFYRSLDSQKTSEGVYPRKEEMFEEWKGIWERRETHEDGAFWIKDAEKETENYAMEDLKIMEEDIKNVLKKANNWASPGSDKIHNYWWKNFTVTHSKLAEFFQRALTEPSIIPEFFTLGVTHMLPKGHISPDPRAYRPITCLPTVYKILTGIITKHLWSHVSKHKILAKEQNGCRRDAQGCKELLTVDHLITKQARKKSRNISVAWIDYKKAFDSIPHSWLLKVLKLYGVSKNIVILLEHLMTTWRTNLIIGSDTTPEIRISTGIFQGDKLSTLWFCLALNPLSKLLNNNRYGYLVDTRSNVKINHQLYIDDLKLYAANEEQLRSLLRIVISYTKDIRMEMGLDKCAIIHVKRGKLAQGGEIFVENDLAIQELSQGETYKYLGIQQALEIRTSHQKEAFKNKFFDRVRKILRSKLNSKAMFTALNTWALPSLAYSFGVLSWSSTDLKAIDTKVRVLLTKYGIHHPHASVNRLYVPRHQGGRGLQNVEMAHNKAVNELRKYFHSKTSPFFQSICQEDHEITALNLACRNSPPQTPTPDQLLEEWHGKPLHGRYPEALKERRVNKDLSLTYLKCGYLFPETEGRLTAIQDQVVPTRAYLMHIAKKNMPTDRCRKCSQATESIQHITSSCSILAPREYTSRHNAMAKVFHQAIAAKIGLITTTRRVHEYLPKTILENDGFKLYWDNPMITDRAVQHNRPDIVIFDKINKKVTIIDVTVPADDNITKAYTEKLTKYHDLAFEMKEIYQLKMVKILPLVISTNGLVESHLVENTEFLELNQDLISKVQKEVILWTARIVRMFLTAT

SEQ ID NO: 22473 - protein, 1083 aa, Coccinella septempunctata
MRVHYIAKEMQPTTGRSYRELLTEIWNDINPHRPSYANLLSNRVRWLFEREKFTTTELHTIAQSFIPRGAPITEDIAEEAQENARSHTRMSLQPSRLEREYYRNLQCYSGLSPSKRPKIPRMKQSREMLDCVQRVNRTMERYTGASATLREMVDCVYAGAVTVCGELKINIGEGHTTYSQEQTPPWKLRLEKKIKVMRKKIGTLHTYLNTNTPTNKILRKIRQIASESRIRTNSSIQLLKEKLIVVSDKLKQKIKALGNRIKRYNERVKRYRNNHLYYKNPKEFYRSLDSQKTSEGVYPRKEEMFEEWKGIWERRETHEDGAFWIKDAEKETENYAMEDLKIMEEDIKNVLKKANNWASPGSDKIHNYWWKNFTVTHSKLAEFFQRTLTEPSIIPEFFTLGVTHMLPKGHISPDPRAYRPITCLPTVYKILTGIITKHLWSHVSKHKILAKEQNGCRRDAQGCKELLTIDHLITKQARKKSRNISVAWVDYKKAFDSIPHSWLLKVLKLYGVSKNIVILLEHLMTTWRTNLIIGSDTTPEIRISTGIFQGDKLSTLWFCLALNPLSKLLNNNRYGYLVDTRSNVKITHQLYIDDLKLYAANEEQLRSLLRIVISYTKDIRMEMGLDKCAIIHVKRGKLAQGGEIFVENDLAIQELSQGETYKYLGIQQALEIRTSHQKEAFKNKFFDRVRKILRSKLNSKAMFTALNTWALPSLAYSFGVLSWSSTDLKAIDTKVRVLLTKYGIHHPHASVNRLYVPRHQGGRGLQNVEMAHNKAVNELRKYFHSKTSPFFQSICQEDHKITALNLACRNSPPQTPTPDQLLEEWHGKPLHGRYPEALKERRVNKDLSLTYLKCGYLFPETEGRLTAIQDQVVPTRAYLMHIAKKNMPTDRCRKCSQATESIQHITSSCSILAPREYTSRHNAMAKVFHQAIAVKIGLITTTRRVHEYLPKTILENDGFKLYWDNPMITDRAVQHNRPDIVIFDKINKKVTIIDVTVPADDNITKAYTEKLTKYHDLAFEMKEIYQLKMVKILPLIISTNGLVESHLVENTEFLELNQDLISKAQKEVILWTARIVRMFLTAT

SEQ ID NO: 22474 - protein, 1112 aa, Coccinella septempunctata
MDGAQTHSTDVTARRDRRTRWTEEDNILILRVHFIAKDLQQREGRNYREQLTKTWNDINPHRQSYPNLLANRVRWLLENNKFSNAELDTIKNSFIPRGATNNQQNEAEDDDGERTCSRISIRTTKLERNLLKNIHKYYGLSPENRPIIPRIKGSKKLLECVQRMDLLLESHIKTNTTLEAMVDYVYAGALTICEELGKKINEPHTDTHQVGSTPPWKARLERKIKVMRKKIGTLHTYLNTDTRTNRVIKGINQITKEFSINTNCSNETFQLALVAVGDRLKQKIKSLGNRIKRYNDRVKRFKNNQLYYKNQKEFFRSLEPAENLEGEYPTEKEMHEAWKGIWEHDEKHEDEAYWIKDAEKEMGQYTMDDVAITVEDIWEVMRKSNNWSAPGSDKIHNYWWKNFKSTHQQLALLFQGALNDPTTVPETFTSGVTHMIPKDNNISNPNKYRPITCLPTIYKFLTGVLTKYIWKHVNKHKILSREQNGCRRDAQGCKELLTIDCLITKQAKKKLRNISIAWVDYKKAFDSVPHSWLLKILKLYGVSENIVNLLESLMRTWRTQLSFGNKQKNFRTSVIKIMRGIFQGDKLSALWFCLALNFMSKLLNEGNYGYVIDKIKNIRITHQLYVDDLKQEQLMRLLRIVTSFSQTIKMEMGLDKCAVIHVRRGKLVSGEEMLIQNGITIQRLASDETYKYLGVQQALEIKTSDAKASFQQKFFDRVKKILKSKLSSKAMFTAINIWAVPSLAYSFGVIKWSNTELKAIDTKVRVLMSKYGIHHPHASINRLYMPRHSGGRGLQNIEITHQKAVTELRKYFQSRNSPFFNIICREDHNITALNLGCTTDPPQMLTLAALSEEWYSKPLHGRYPAALKEKKVNQQHSLTYLTSGYLFPETEGRIAAIQDQVVPTRAYMKHIAGKNIPTDRCRKCGQARETIQHITSSCSILAPKEYTNRHNAMAKVYHQAIAIKTGLITAMKKTHEYKPATVLENRSFKIYWDNTVETDRRIPHNRPDIVLFDKENRKVIIIDITVPADDNISRAYSEKVNKYHDLAFEMKEIYALKTVSVLPLIISTNGLVESHLVDNTKSLELDLNIISTAQKEVLLWTARIVRMFLTTT

SEQ ID NO: 22475 - protein, 1190 aa, Harmonia axyridis
MTTPHTRVTRIFRPATRRSEEMSAPITRSQNQGGRGQRAGPLRSRPEEEPDGGSCGASGAAPRDGTVSQDLVPRNEDRNPSLEEIMSRPTGVSNTRDARMRWTEEDNVLILRVHYTATDMQQRTGSIYRELLTEVWNDINPRRQSYANLLANRVRWLLEKEKFSTTELNSIKQSYLPRIDSENRVEDEEVPLESRIIIRMSIQPSRIERIFNRNLHNYTGISPQYRPKIPRMYGSKRMLECVRRVDRLMERYLDVNITLRGIVDCVYAGAVTVAEELGMKIGEIYSELRQESTPPWKLRLEKKVKNIRKKIGILHTYLNTESHTKKILKGIRQIASESRIRTSRSNEQLKEKLMVVCDRLKQKVKALGNRIKRYNERVKRYKNNHLYYKNQSKFFRNLEATETAKGVYPDEKDMHKAWSEIWERKKMHDDRAFWIKDAEKEKNTYSMDNIEITKEDIKSVLKKANNWAAPGADKLHNYWWKNFHQRLVVLFQGALSDPSTIPEFFTLGLTYMLPKGNITPDPKQYRPITCLPTVYKILTGILTKHLWKHVNKFNILASEQNGCRRDAQGCKELLTIDYLITKQARKKLRNLSIAWIDYKKAFDSVPHSWLLKVLRLYGVSEQFVGLLEHMMTTWRTKLVFGTKTTSEIKILTGIFQGDKLSALWFCLALNFLSKLLNNNSYGYIIDNGANIKITHQLYVDDLKLYATNEEQLRRLLRTVTAFSQTIGMEMGLDKCAVVHVKRGKLTHGGEMLVQDELAIQRLGPEESYRYLGLQQALEIRTADEKISFKKKFFDRVKKVLRSKLNAKALFTALNTWAVPSIAYSFGVIRWSNTDLKAIDKQVRVLLSRHGMHHPHASVIRLYMSRHRGGRGLQNIEMVHNKAIIDLRRYFHSQNSPFFQAICREDQNITALNLACQINQPQTITDDGQLEEWHSKPLHGRYPEALKDKRVNQQLSLTYLKSGYLFPETEGRITAIQDQVVPTRAYLKHIAKKNLPTDRCRKCSQHLETMQHITSSCSILAPKEYTARHNAMAKVFHQAIAIKAGLILTFKKAYEYLPKAVLENDQFKLYWDNLIVTDRSIQHNRPDIVLFDKEEGKVTIIDVTVPADDNISRAYTEKLTKYHDLAFEMKEMYRLNTVLILPLIITTNGLVESHLPDNIKLLDLDLELISTAQKEVILWTTRIVRMVLTTT

SEQ ID NO: 22476 - protein, 1044 aa, Coccinella septempunctata
MLPSPQPPAGLSCVCQNGKIYSSAKALAQHQRLYCRGAPVIDPNACAICQRSFSTYAGMRQHRRQAHPEDYNQELEEAANNARKPWTSEEVINLAAEEADYSGNNLLGYLSGLSGRSEEAIKKRRRTAEWQNAIIRHRECREIELRTQIDEQQQQLREDLDRILEEAQAEPELVEEDLIGPEPIPEEFRPVVDDPVMQHILDIAPTLEEEEDVRFAAEICTGVDKTKALNDYALEIIRKYGRVKRKGRIAPKNPPPVSRRKKRAAAFRDVQRKWATNRKQLAEEIIEGMDPTQQQERPSKEDIEQEYRKILTKDSPPDPAPLKESPEIINLYRPITEDQIIETLKSTKQGAAGPDGITLRQISRIPRCKLLLLYNAMILIGAVPDCLNSSRTTLIPKKKDGLSNVKNWRPITISSLLLRVCNKIVNKRLMEVPIHTNQRGFVSVDGVFANNVSLHTIIKSKRRARRGYSVVALDISKAFDTLSHATVQRALRRKGIDENTRRYIMANYNSASTTISCAGEEICSLPIKRGTRQGDPMSPSIFNYVLDEVIEELEQHTGIALGDQGISCMAYADDLLVLAEDVKTARKLFSICQEFFHLHHLELNVDKCFAISVGRAPGRRLFVHTTSQFYIHGKPVRQIGVKELMEYLGNKFSPMGLTKCSITNLRAQVDRICRAPLKPDQKLQMFKFHLIPRYIYSLQSPQVHLKTLKAADRAIKWGVKRALHLPNHVSDAFLHAPLREGGLGVFCMRDKIPIIISRRMQKLRGFNPVLDSVVENSSIWLGRVVKMIRPPNASTAMKDTSRANELHQSFHGVGLGELKHHKMCSLYVDNPPKYWSGEDYVRAIQLRCNCLPTAGLPWNRGPEAECRAGCKKRESLSHVLQQCSVMHWERITRHNYVAYRLENVAIKNGWQVAREPRIRDRDGKLLKPDLIMTKDNHVIISDVSVCWESPEPLSMSYAVKKAIYSAPAFLEKVAEEYPDKTIQVLPLIVGARGGWCPENRNIVSLIGATDADIGDLIHTALRGGCVIHKQFNRIVWRSARRVRV

SEQ ID NO: 22477 - protein, 1054 aa, Coccinella septempunctata
MLPSPQPPTGFSCVCQNGKIYPSAKGLSQHRRLYCRGAPVVDPNSCSICHRSFATYMGMRQHRRQAHPEEYNQELEEAAASNLKRPWTDDEVINLAAEEAEYTGNNLIAYLSGLSGRSEEAIKKRRRTPEWKNAIIRHRECKELEERARREEEETLLRENLDSILEEVQAEPELVEEELIGPEPIPEGFRPIVGDPVMQYILDVAPTLEEEEDIRFAAEICTGGNKIKSLNDFALEIIKKYGRVRKKGRAPPKTPLPTSRRKKRAAAFRDVQRKWATNRKQLAEEIIEGMDPITQQERPSKDDIEREYKNILSKESPPDPAPMKSRAETINLYRPITEEQLVETLKSTKQGAAGPDGITLRQMSKIPRCKLILLYNAMLLLKSVPACLNSSRTTLIPKKKDDLSNTKNWRPITISSLLLRVCNKIVNKRLMDVPIHTNQRGFVSVDGVFANNMSLHTIVKAKRRARRGYSIVALDISKAFDTLSHATVERALERKGIDKNTRQYIMANYKEASTTISCAGEEICTLPIKRGTRQGDPMSPSIFNFVLDEAIEELEQQNGISLGDQRISCMAYADDLLVMADDVKLARKLLNICQDFFDLHHLNLNVDKCFAISVGRAPGRRLFVYSTSQFHIHGKPVRQVGVKEMMEYLGNKFSPMGISKCSISNLRAQVDRVCRAPLKPDQKLQIFKFHLIPRYIHSMQNPRIHLQTLKAADRAIKWGIKRALHLPTHVSDAVIHAPLREGGLGVFCMRDKIPIIISRRMQRLRGITPILDCVVENSSIWMNRVTKMIRPPNATTAMKDNNRASELHQSYYGKGLNALKNHKMCNTYIDNPPRYWSGEDYVRAIQLRSNCLPTAGLPYNQGPEAVCRAGCMQRESLSHVLQRCSLMHWERITRHNYVAYRLENIAIRNGWQVTREPRIRDREGKLLKPDLLLTKGQHVIISDVSVSWECPEPLSMAYAVKKAIYSTPTFLEKVEEQYPDKIIEVLPLIVGARGGWCPENLNIIKMVGATDADIGDIIHTALRGGCIIHKQFNRVVWRSSRRVRVVRPTARSQW

SEQ ID NO: 22478 - protein, 986 aa, Coccinella septempunctata
MRQHRRQAHPEDYNQELEEAANNARKPWTSEEVINLAAEEADYSGNNLLGYLSGLSGRSEEAIKKRRRTAEWQNAIIRHRECREIELRTQIDEQQQQLREDLDRILEEAQAEPELVEEDLIGPEPIPEEFRPVVDDPVMQHILDIAPTLEEEEDVRFAAEICTGVDKTKALNDYALEIIRKYGRVKRKGRIAPKNPPPVSRRKKRAAAFRDVQRKWATNRKQLAEEIIEGMDPTQQQERPSKEDIEQEYRKILTKDSPPDPAPLKESPEIINLYRPITEDQIIETLKSTKQGAAGPDGITLRQISRIPRCKLLLLYNAMILIGAVPDCLNSSRTTLIPKKKDGLSNVKNWRPITISSLLLRVCNKIVNKRLMEVPIHTNQRGFVSVDGVFANNVSLHTIIKSKRRARRGYSVVALDISKAFDTLSHATVQRALRRKGIDENTRRYIMANYNSASTTISCAGEEICSLPIKRGTRQGDPMSPSIFNYVLDEVIEELEQHTGIALGDQGISCMAYADDLLVLAEDVKTARKLLSICQEFFHLHHLELNVDKCFAISVGRAPGRRLFVHTTSQFYIHGKPVRQIGVKELMEYLGNKFSPMGLTKCSITNLRAQVDRICRAPLKPDQKLQMFKFHLIPRYIYSLQSPQVHLKTLKAADRAIKWGVKRALHLPNHVSDAFLHAPLREGGLGVFCMRDKIPIIISRRMQKLRGFNPVLDSVVENSSTWLGRVVKMIRPPNASTAMKDTSRANELHQSFHGVGLGELKHHKMCSLYVDNPPKYWSGEDYVRAIQLRCNCLPTAGLPWNRGPEAECRAGCKKRESLSHVLQQCSVMHWERITRHNYVAYRLENVAIKNGWQVAREPRIRDRDGKLLKPDLIMTKDNHVIISDVSVCWESPEPLSMSYAVKKAIYSAPAFLEKVAEEYPDKTVQVLPLIVGARGGWCPENRNIVSLIGATDADIGDLIHTALRGGCVIHKQFNRIVWRSARRVRV

SEQ ID NO: 22479 - protein, 715 aa, Anentome helena
MKLILNRHMQWIVDTQRMSTRQKGAMPRNGLQEHVFCLRTAISDFLHTSSTHYTAFIDIKDAFGSIDHQMMFNELVSVGYPQAFVDITKDIYSSSTFQVKTAGGLTRPIQRHVGIIQGCPWSVIVFEQGIDKWIRWIESDHTPVTVPNPVQAYVDDVSISTTNKEDIQTAVEKTDVFMNTVGMGVKHRKCGVLHGRHTGNNWNRNDRTGDTELVIQGHPLPMLGINQSYKYLGYQISLSNTAGKIQTANVVREFRQTLDKIDVAPLPVTAKLQAINIMCCSKLNFYFSNLTLTEKELTELEDEIVSCVRAWLSLNKSSTRSFMFCPRSEGGLGLMNPRLMYYAKHVSFKLAVLNSDDEQVRATARCSLSLQMDKRKAMPASTPADPSFCGYKTDSDGHVIKQSKVNWSRSDWLRLNEICAREGLELKAQFDGMFTLSVCLDEDVTVKTTCPKAFCPMYKKQKLTEVKRDWAEKQYQGRIVREATSADHRLSNSFLTSVTLDDKIVSFIVRGRLQLLQCNSLMALYYPGEYSRRCSICNHPTETTSHILNGCTKFQQLYQARHNRLVGLVREKIPHHSNRTILTETVLKPCHFGAEGQTFTCPATRPDITVVDGDTRSVYLVEIAVPFDPFIDQCYQTKFDKYLPLCLEINNCGYHCRTIIIIVGSLGTVHRNVPSGLRLVGVPQYSTKWLSKFLSTSAAIGSYKVWRARCREVLP

SEQ ID NO: 22480 - protein, 1257 aa, Asobara japonica
MSRWKETELLTLRGFLEGYGPGALTGEAIRGAAELVPGRNVAGTKRKLLELRTEMRGIPVPHGRAKKAATERWTLEDEEKLARLYRAQPGATMGERVKGIVHEFGGRSHKTLMERLRTKFPGIYYQRPGENSVVEAAPAVEQANEADGSIEVITIDDDDEEPGINESSMDPGVSDPRDQGDPGNIDVERNDPIPRHAERVNAEDLSNVPEEIVQRFRSTLGALKKNSRSPQLRSVAIKSRIFTPNLLQIDKLLKHEICLILRKNLSDTRERREVKAAILSAVVVLRDITDCPNNNERTPPGFVKIERAIRKLQKKMAIAKSIRTRTRGSRFNAAQRRVLRELRTGKISLGMYIKSWEDRIGILRRNAQMARQKYENKILRNKFHHNPSKRAIEVKEGKNVSELEASVVEEFYGELFSAKKSAERPPTPSFNQWISRWKIHQQATQPVNVEDRSKLKETIEETLRAARPWKAPGEDGVPVGAYKLLPSAKAYLISFIEDTLTGKRVLSEVDVRGKVILLFKDGDRKTPANYRPIALLNTDYKMLTGVITRCIHECLPQWAIPREQLARNGVHGTMQGMLIDKAHTQSARKNLRTREAYNWSAWFDFTKAYDSVHHYQLLRLVEVLPLTQCVRNTVKAAIKNWSVVVQVGKQKTRPIRVRRGIYQGDSISPLLFILMSAAVIERVKTDDKVNKATRGTHIILAFMDDIKVHSPSQEGLQLIAETIRDAADEVGLSLNQRKCGVYAGTKESTDNDNNNNNNIMEHDEQWFLPEVREGYKYLGIVQLERDTAANEILIREKILGQVKEIFSSKLSVPQMVRLYNTATVPAAVYVVGNLYPEGKCSTTMLQCRRLDTDVRKILVKNWLKGYSTSTAHVYLREDLGGLGLQSIEEAVELHHVRRAAYLQVHPEMADVLNQYERLKRAGWRNPMSDGDRVLSDYGIEPQLALQPIELVNATIRDLVQKVKEEQEVCRLTDWQRNLNYAALVVEKKQTISFPAYKSIRLEPWMSTRLHAAAENQIPQLGSLPDQRRKCPRGCGSDETAYHVVSSCVVPEFIKRHDFVVYWVLKSILDATGAPQEIKGKLGFGSGCLHAEYIARGTRNNIVIRAGGRVLADTQLYHNRPDILVRTSHPAKVFVFEMAVSHLSSIGMQEKLKRARYALNSEHHLTPANLDVIERGRNTVGELSRMYGCEAALGVVVMGCFGELVQSEEMTRSIGLLREIGVSQKQANSCLSQCSYSVALTTAMILVRRIVAASRRRP

SEQ ID NO: 22481 - protein, 1257 aa, Asobara japonica
MSRWKETELLTLRGFLEGYGPGALTGEAIRGAAELVPGRNVAGTKRKLLELRTEMRGIPVPHGRAKKAATERWTLEDEEKLARLYRAQPGATMGERVKGIVHEFGGRSHKTLMERLRTKFPGIYYQRPGENSVVEAAPAVEQANEADGSIEVITIDDDDEEPGINESSMDPGVSDPRDQGDPGNIDVERNDPIPRHAERVNAEDLSNVPEEIVQRFRSTLGALKKNSRSPQLRSVAIKSRIFTPNLLQIDKLLKHEICLILRKNLSDTRERREVKAAILSAVVVLRDITDCPNNNERTPPGFVKIERAIRKLQKKMAIAKSIRTRTRGSRFNAAQRRVLRELRTGKISLGMYIKSWEDRIGILRRNAQMARQKYENKILRNKFHHNPSKRAIEVKEGKNVSELEASVVEEFYGELFSAKKSAERPPTPSFNQWISRWKIHQQATQPVNVEDRSKLKETIEETLRAARPWKAPGEDGVPVGAYKLLPSAKAYLISFIEDTLTGKRVLSEVDVRGKVILLFKDGDRKTPANYRPIALLNTDYKMLTGVITRCIHECLPQWAIPREQLARNGVHGTMQGMLIDKAHTQSARKNLRTREAYNWSAWFDFTKAYDSVHHYQLLRLVEVLPLTQCVRNTVKAAIKNWSVVVQVGKQKTRPIRVRRGIYQGDSISPLLFILMSAAVIERVKTDDKVNKATRGTHIILAFMDDIKVHSPSQEGLQLIAETIRDAADEVGLSLNQRKCGVYAGTKESTDNDNNNNNNIMEHDEQWFLPEVREGYKYLGIVQLERDTAANEILIREKILGQVKEIFSSKLSVPQMVRLYNTATVPAAVYVVGNLYPEGKCSTTMLQCRRLDTDVRKILVKNWLKGYSTSTAHVYLREDLGGLGLQSIEEAVELHHVRRAAYLQVHPEMADVLNQYERLKRAGWRNPMSDGDRVLSDYGIESQLALQPIELVNATIRDLVQKVKEEQEVCRLTDWQRNLNYAALVVEKKQTISFPAYKSIRLEPWMSTRLHAAAENQIPQLGSLPDQRRKCPRGCGSDETAYHVVSSCVVPEFIKRHDFVVYWVLKSILDATGAPQEIKGKLGFGSGCLHAEYIARGTRNNIVIRAGGRVLADTQLYHNRPDILVRTSHPAKVFVFEMAVSHLSSIGMQEKLKRARYALNSEHHLTPANLDVIERGRNTVGELSRMYGCEAALGVVVMGCFGELVQSEEMTRSIGLLREIGVSQKQANSCLSQCSYSVALTTAMILVRRIVAASRRRP

SEQ ID NO: 22482 - protein, 983 aa, Morbakka virulenta
MESERERQIERDFLPSESDNLQSESQNERRSLEISAKIDEESRKILQDVMGKYNGTEDLMLMNLRNVNRNNLKEKVKKVNSTLQYIHTDDITETNRLILAAAVVVQEKLGVKRKEKKQKELWWKKRLCDQVASLRKDLSRIDRIKQGKLKNQQQATRLEKKYNISKRGITVVAEELKQRIIAVSAKIKRYNERHNQFVQNRLFQSNQKMLYEKIDGVVRCNEGVPEAEECREFWRGIWEKEVDHNRDVKWLDDLKKELNEVERQSELTINTEMLVRQLRKIPNWKAPGLDGVQGYWLKNFNSLHDRIKDQLDNCVQGRMSVPKWMTSGRTTLIMKDTNKGTVASNFRPITCLPLMWKLLTGIIADSLYNFLEDSNLLPHEQKGCRKRSRGAKDQLLIDRMVLRNCKRRLIGLGMAWIDYKKAFDFLPHTWILECLDMFGAAKNIQNLISNSMKHWSTRLTAGGVSLGNVKIQRGIFQGDSLSPLLFVIALIPLTLILRKGKEGYDLGEGKSRVNHLLFMDDLKLFGKNEKQLNNLVNTVRVFSKDIRMEFGVEKCAVLIMKRGKFISSEGICLPDGQRIKSLEKEDGYKYLGILEADGVNHEQMKEMIRKEYIRRVRNILKAKLNGGNSIQAINSRAVSVIRYTAGIVKWTVDELRTMDTKTRKLLTIYRTLHPRADVDRLYFKRREGGRGLISVQNCVEVESGSLFAYASNSRENLLQAVIDEGILKKANEIVTMKYVQQERKASYHQKPMHGQFAKIVAEQGSKETWAWLRQGTLKKETEGTIMAAQDQALPTNAMKANIQSKNISPLCRMCGKENETVAHIISSCEKLTQKYYKQWRHDKVAQIFHWNLCKKYDIQAATKFYDHVPEKVSENGLVKILWDFNIQTYKKLKHNKPDITVHDKKNNECLLIEVSCPFDKNINEVEEVKLERYQALKWELKKIWNCKSVKIIPIIIGALGTVNAKVGEWLKTIDINCSIATSS

SEQ ID NO: 22483 - protein, 1006 aa, Ixodes scapularis
MDAPDVGMVACPNCGKHYKIKGLASHRRKCDKVSLNNEIVITKTKPHWSAEESFFLARSEADALLRGVRPVKINSVLYQLHPNRSEEAVKGQRRKKEHKELVIKLVQEGHDKSNATDYSDAPEAEEVESAAGCGGEEISGLRELPNDSNPLGGSAEEGPFEGKRRLEEWLRNSIKSGTSREEKGLNHVILLALRGEPFATDLDRVLAGYEHVPTDRNEPGPGERLSNRQARRKEYREIQNLYEKNRKVCAQRILDGPKEAGLEAGGLLDFWYNIMSRDDSEDSAADCSRHLPDTTVTPLTEAEVKDALPTHSSAPGPDGLTVKEIKSLPLSFLTKLFNLFLYWERAPVKLVVARTIFIPKGECSSDPADFRPITIGSLFLRVFHKVLERRLRQIIVLRTEQRAFCATDGCFENIHLLSSLLKTAHSMGRSLFLANIDLRKAFDSATHRSIINALAKHNQVGSTVVNYLKWFYKNSTTNLTHGSASRAVRPRRGVRQGDPLSPLLFNLVIDEFLSEIPEEFGVKLGERKCAALAFADDLVLIAETERGLQYLLDSFGVFLEERGFEINFSKSSTLSLIGDGKNKRAKIVPMCFSAQGNALPTLGVSDTWAYLGVIFDTDGNVNCSDVDLAKLSHNLGKAPLKPQQKLIILTFYLIPRLIYQLVVCARSRVFLRKIDRKIRAAVRDFLHLPLDTPIAFFYATVDDGGLGVHCMETMIPRVRYSRLLAVEAKEDCMLENLVASKAWVEMVEKARKAMQFNGIFMETKIQVRDYWRNVLLKMVDGRGLREARLAVRATWVRDPPRYLSVREYVHLIKLRIHALPTKSRCARGRAKDLRCRAGCVVNETHTHVIQICPRTYSARLKRHNEVVAWFRRKAERESFISTEEPRVKVGDEILKPDLVLVKDRRALVVDAQVVGEYKPLNSLDAYKIRKYSKPAFIDKVKETFEVSRVDVYAITTSERGIVSSNSANFLNSVGVSKREVAYLGQLVARGTLKCFYHFMRGTQRGF

SEQ ID NO: 22484 - protein, 1039 aa, Bradysia odoriphaga
MLQPNFLVLLVQFFIQRNNCFDCVNIGFTDNPTDVLKPRLFILFSGLITDGHFRLLKPITVTSFKLANNIPCGQYTIVNEDNSSFLIARCNRNDVTNTNTSSQRNGSTSILCPLCPDSKKEYKSQHGLKIHHSRIHPGVSFKPLKTDLQNEESLDFKDKLCRLRMKVRILKRIPKSARIAVANKLSEIIEECVKKNNELAWQKLMTFSYYALRVEKKSSKSLSSIVKKNLVNSENPLNDGNVEKPISNLKTLIEAKVADGDVQGALRILSSEETIAPQNKETFEKLLEKHPPPSRKLDFPEPPDENSECLVVSEKEVRKSINSFKNGSAGGVDGIRPQHLKDLISKVTGQAGIRLLNCITELCNVILAGKVCNEIAEHFYGATLCALTKKDGGVRPIAVGNTFRRLAAKLGCNSVRDYISSIFKPVQMGFGVKGGCEAILHAVRTFLHNNKNLEKILLKIDFKNAFNSIERDEMLKQVKIHTPKLFPFLWQCYYSPSLLFFGNDTILSQIGCQQGDPCGPLVFCLAIHSIISNVEQDINVWYLDDGTLGDRPELVLENFINLINKSLHVGLKINPSKCELHFCGEVSDHIVKKFNEISPGIRVMHDDIELLGSSLYENGCRNVLLKKLTVMENSFEKLKILNAQVAYYLLKHCFWIPKLSYVMRTNPTWLFPDITEKFDSCFKEAFESITNINFNDSQWTLCTLPIKDGGVGIRMIKDIGLPAFLSSVNSTRELINHVLSLPDSDEIHVTFYKEAIKEWKKCHSEVPKNPAIQGHWDAIVIKSTKSSFNCSNKEVSARFLASQLPESSSWLKVLPSKTIGTLLQDNVFRISVALRYGCDICTPHDCNCGKAVVQSNGIHGLSCVNSAARFARHSAFNMILKLSLSSAQIPARLEPLGLNHNNKERTDGVTLIPWSNGRFLTWDATCRDTLAPSYIDFTSISAGKLAEKAATDKRRNYRELLEHCDNIFVPFGIETLGPICAEGKKFLFDIGKKIATISGEPRSTQYLFQRISIALQNYNAGCVMGTFPESKSLDEIFLL

SEQ ID NO: 22485 - protein, 1129 aa, Mugilogobius chulae
MVNDPGLNLTTSKRSFIPPEVLEQGPSLQRCSCGWAKVTSLNGLRIHQGRKKCLKAVAQGSRIDQYFLRSRSDQSSEVQQQEKTHSLQNISIPSTEQEEVQLNTEGNVEANRSQSATEKKIQGRRPLVKWPKSHEKSKWDIVNQDLCGLLEQLKGPAVKKLEKMGEIIYKYGAEHFGTAYKIRNPSTTQTKSRRQQEIEQLVKARRQLKKQWRKASEEEKDGINVLQAEIKNRLSILRRAEHLRRKRRKKEQVRTRFFNDPFRFLKSLFTKEKSGKLVTSKEELEAHLKEIHSGIHRNNPISLPSDMPPVPSPHYQFDISPPKWNEVLATARHARAASSPGPNGVPYRVYKNAPGVLRVLWKLMRVVWQKEEIPTVWRRAGGVLIPKEKDSTTIDQFRHISLLNVEGKIFFTILARRLALFLEKNEYIDTTVQKAGISGFSGCLEHTSMIWHQIQKAKRESKDLHVVFLDLANAFGSVPHKIIWTALNYFNVPRTITTLIQSFFRDIQLCLTTEQYTTAWQSLEVGIMAGCTISPLAFTMAMEIIIRASRWVVGGVRTSEGLRLPPIRAYMDDLTTLTSTKACTRRLLAKLQENIKWAQMEIKPSKSRSVSIVKGKLDQCRFYIGEDPIPTVTERPVKSLGRWYDASLKDSVQIDQIKEDTNNGLKTIDKTLLPGRFKLWCLQFGLLPRLMWPLTIYDIPLYKVEKLERMISSYAKKWLGLPRCITNSALYGRGILELPLTSLQEEFKCAKVRLEMTLAESRDTIVAQTVPTLSAGRKWSPAEAAAQAKTALRHQDIVGYVQMGRQGFGAGDVRPSWKKANPSQRRTMVVDEVRRQEEVLRHTKAVSQGKQGQWVRWEDVEKRKLSWKELWGMEAYKASFLIRSIYDVLPTPSNRQQWYGEDPTCALCPSAASLKHILVGCKTSLSQGRFTWRHNQVLKCLAASLEAKRTAINTLPYVPGKHLSPVVFLQAGVMEKVRDASREHYGLLSEARDWNMIVDLNQRLIFPAEIVSTNLRPDLVLWSPSLRKVLIVELTVPWEDSVDEAYERKSLKYSDLAAEAEQRGWKARVYPVEVGCRGFVSRSTIKLLKDLGIRGKALQQTLKSLSGAAEDASRWLWIKRRDGNWACKQ

SEQ ID NO: 22486 - protein, 1004 aa, Clupea harengus
MGELIYSYGAERFGITEKRKKTSTIPTKSRRQQEIERLVKERRQLKKQWRKAPEEEKEGINLLQAEIKNRLSTLRRAENLRRRRKRKEHARSSFFKDPFKFVKSLFTKEKSGKLITTRKDLEAHLKRIHTDSHRCEQITLPPDMPPIHPPEHQLDVCPPKWSEVERTVRRARAASSPGPNRVPYRLYKNAPDVLRFLWRLMKVVWQKQTIPTAWRRAGGVLIPKEKDAADISQFRHISLLNVEGRIFFSVIAHRLAVYLDRNKYIDTTVQKAGIPGFSGCLEHTNMIWHQIQAAKKEGRDLHVVFLDLANAFGSVPHSLLWTAFDLFSIPQAITTLVKSYFQDVQLCLTTEEYTTAWQRLDIGIMAGCTISPLAFTMAMEVIIRASRWVVGGQQLKAGLRLPPIRAYMDDMTTLTTTMPCTRRLLKKLQENLEWARMKIKPSKSRSISVVKGKLSEQSFFIGEEPIPTVSEKPVKSLGRWYDANLKDKDQVPQLRQDTICGLESIDKSLLPGRLKLWCLQFGLLPRLMWPLTIYEVSISKVEKLERLISSFARKWLGLPRCFSNIGLYGRGILELPVSSLTEEFKCSKVRLEMTLTESRDPCVSQTAPTLATGRKWTASAATQQAKADLRHRDIVGLVQQGRGGFGLGESRPSWHKAAPSQRRGLVVEEVRRQEQATRCAKAVSQSKQGQWMRWEGVERRKFSWKELWSMEAFHTSFILRATYDVLPSPSNLQQWYGEDPTCPVCPSPANLKHILVGCKTGLTQDRYTWRHNQVLKCLAAMLETRRTTINALPPSSRPTSARGFVWEGAKPTKTQASTTSDPGQLGGARDWRLVVDLSPRLYFPPEIATTNLRPDLVLWSSSTKKVYIVELTVPWEDAVEEGYERKRLKYAELATDAEQRGWKAKVCPVEVGCRGFVGKTTTRLLKDLGIRGQAQRQAIKALSSAAEWASRWLWVKRRDATWAPNLWRRRVKAEGGTSGTPGVADEPSGGVVGLSSKHRRRRVM

SEQ ID NO: 22487 - protein, 1133 aa, Oxygymnocypris stewartii
MASDPGMKQTTRMMINKTPEMITHTPGIKLQSCRCGWTKETSYAGLRRHQGLKKCLLSEQQGPCIDRYFLRSRSNKSSEVQQQDQNQSLQDINPPVREEDEEPSIVVPHKANQPQSTTENKIQGRKPQVRWPKSCEKKEWETIDTDISNLLGQLRGTVVKKLERMGDLIYNYGEERFGTAEKRKKASSTPTKSRRQQVIKRLIKERRQLKKQWMKTPEEEKEGINQLQAEIKNRLSTLRRAENLRRRRKMKEQARSNFFKDPYKFAKSLFTKDKSGKLKTSKKDLEAYLKQNHTDSQRCGQINLPPDMPPIHSPEHQLDISPPKWSEVERTVRRVRAASSPGPNGVPYRLYKNSPEVLRFLWRMMKVVWQKQAIPNAWRRVGGILIPKEKDSVDISQFRQISLLNVEGKIFFSVVAHRLAVYLEKNHFIDTTVQKAGIPGFSGCLDHTNMIWYQIQAAKKDGRDLHVVFLDLANAFGSVPHNLLWIAFHYFSVLEAITRLVKSYFQDLHLCLTIGDCTTAWQRVEIGIMAGCTISPLAFTMTMEVIIRASRWVVGGQKLKSGLRLPPIRAYMEDMTILTTTKACARRLLNKLQENFQWARMEIKPSKSRSISIVKGKLSEHRFYVGEEPIPTVAEKPVKSLGRWYHATLKDSEQVDQLRQDTMCGLESINKTMLPGWLKLWCLQFGLLPRLMWPLTIYEVPISKVEKLERVVSSFAKKCLGLPRCFTNIGLYGRGILEIPISSLTEEFKCSKVRLEMTLTESRDPCVSQTAPTLVTGRKWNPTAATQQAKSDLRHRDIIGIVQQGRGGLCLGESRPSWHRAAPAQRRRLVVEEVRRQEQATRCAKAVSQAKQGQWMRWEGVERGKFSWRELMGMEAFHISFILRATYDVLPSPSNLNQWYGEDPTCRLCPSPANLKHILVGCKTSLSQGRYTWRHNHVLKCLAATLEVRRRKINALPPTSVHPSFAREFIREGVKTAKAHIPSDIGQLGGARDWKLAADLNQRLCFPSEIAITNLRPNLVLWSSSLHTVYIIELTVPWEAAVEEAFERKSLKYTELAVEAEQRGWKSKVCPVEVGCRGFVGKSTIRLLKELGVRGQTLRQTIKALSGAAKEASQWLWVKRGDSAWAPNNTCGT

SEQ ID NO: 22488 - protein, 1133 aa, Onychostoma macrolepis
MASDPGPNQTTRMMINKTPEMTTPTPGIKPQSCRCGCTKETSYAGLRRHQGLKKCLLSEQQGPCIDRYFLRSRSNKSSEVQQQDQNQSLQDINPPVREEDEEPSIVVSHKANQPQCTTENKIQRRKPQVRWPKSCEKKEWETIDTDISNLLGQLRGTAVKKLERMGDLIYNYGAERFGTAEKRKKASSTPMKSRRQQEIERLVKERRQLKKQWRKAPEEEKGGINQLQAEIKNRLATLRRAENLRRRRKIKEQARSNFFKDPYKFAKNLFTKDKSGKLKTSKKDLEDYLKQSHTDSQRCGPITLPPDMPPIHSPEHQLGISPPKWSEVERIVSRARAASSPGPNGVPYRLYKNSPEVLRALWRMMKVVWQKQAIPTAWRRAGGILIPKEKDSVDISQFRQISLLNVEGKIFFSVVAHRLAVYLEKNHFIDSTVQKAGIPGFSGCLEHTNMIWNQIQAAKKDGRDLHVVFLDLANAFGSVPHNLLWIAFHFFSVPEAITCLVRSYFQDLQLCLTIGDCTTAWQRVEIGIMAGCTISPLAFTMAMEVIIRASRWVVGGQKLKSGLRLPPIRAYMDDMTILTTTKACARRLLNKLQENIQWGRMEIKPSKSRSISIVKGKLSGHRFYVGEEPTPTVAEKPVKSLGRWYYATLKDSEQVDQLRKDTMCGLESINKTMLPGRLKLWCFQFGLLPRLMWPLTIYEVPISKVEKLERLVSSFAKKWLELPRCFTNIGLYGRGILEIPISSLAEEFKCSKVRLEMTLTESRDPCVSQTAPTLVTGRKWNPTAATHQVKSDLRHRDIIGIVQQGRGGLGLGESRPSWHRAAPAQRQRLVVEEVRRQEQATRCAKAVSQVKQGQWMRWEGVERRKFSWRELMGMEAFHISFILRATYDVLPSLSNLNQWYGEDPMCPLCSSPANLKHILVGCKTSLSQGRYTWRHNHVLKCLAATLEVRRIKINALPPTSVHPSFAREFIREGVKKAKGHIPSDIGQLGGACDWKLAADLNQRLCFPSEIAITNLRPDLVLWSSSLHTVYIIELTVPWKAAVEEAFERKNLRYTELAAEAEQRGWKSMVCPVEVGCRGFVGKSTIRLLKDLGMRGQTLRQTIKALSGAAEEASRWLWVKRGDSAWAPNNTCGT

SEQ ID NO: 22489 - protein, 1150 aa, Labeo rohita
MKQIPPESARAGEDDDSLIDYMVIDPGTKQTTRMMITKIPEMITPTPTPGCKLQICRCGWTKETTYAGLRRHQGLKKCLPSQKQGPCIDRYLLRSGSSKSSEVQQQDQNQSLQNINPPVQEEDEEPSIEVSNLSQPVIENKIQGRKPQVRWPKSCERKEWETIDTDISNLLGQLRGTVVRKLERMGDLIYNYGVERFGMVEKRKKTSPTQTKSRRQQEIERLVKERRQLKKQWRKAPEEEKEGINLLQAEIKNRLATLRRAENLRRRRKKKEQERSSFFKDPYKFAKKLFTKEKNGKLKTSKEDLETYLKQSLTDSQRCGQITLPPEMPPIHSPEHQMDISPPRWSEVKRIVQRARAASSPGPNGVPYRVYKNTPDVLRFLWRLMKVVWQKQAIPTAWRRAGGILIPKEKDSVDISQFRQISLLNVEGKIFFSVVAHRLTAYLEKNHFIDTMVQKAGIPGFSGCLEHLNMIWNQIQSAKKDGRDLHVVFLDLANAFGSVPHNLLWTAFHYFSVPEVITRLVKSYFQDLQLCLTTDECTTAWQRVEIGIMAGCTISPLAFTMAMEVIIRASRWVVGGQKLKSGLRLPPIRAYMDDMTILTTTKACARRLLNKLQENILWARMEIKPSKSRSVSVVKGKLSEQRFYVGKEPIPTVAEKPVKSLGRWYHATLKDTEQVDQLMKDTICGLESINKTKLPGRLKLWCLQFGLLPRLMWPLTIYEVPISKVEKLERVISSFAKKWLGLPRCFTNIGLYGRGILEIPVSSLAEEFKCSKVRLEMTLTESCDPSVSRSAPTLVTGRKWNPAAATHQAKSDLRHRDIIGNVQQGRGGLGLGGSRPSWQRAAPAQRRQLVVEEVRRHEQATRCVKAISQAKQGQWTRWEGVERRKISWRELMGMEAFHISFILRATYDVLPSPSNLNQWYGEDPTCPLCPSPANLKHILIGCKTSLSQGRYTWRHNHVLKCLAATLESRRLKINSLPPSSFHPSYAREFTREGTKTAKVQTISDVGQLGRARDWKLVVDLNQRLHFPSEIATTNLRPDLVLWSSSLHTVYIIELTVPWEDAVEEAFERKSLKYTELAADAEQRGWKSKVCPVEVGCRGFVGKSTIRLLKELGVQGQTLRRTIKALSGAAEEASRWLWVKRGDSNWAPNIT

SEQ ID NO: 22490 - protein, 1132 aa, Pimephales promelas
MVTDPGTKQTTRMMINKTPEMTTPTPGIKLQSCRCGWTKETTYAGLRRHQGLKKCLLSTQQGTCIDRYFLRSRLNKSSEVQQQDQNQSLQNINPPVREEDEEPSIAVSLKPNLSQPTTENKIQGRKTQVKWPKSCEKKEWETIDTDISNLLGQLRGTAVKKLERMGHLIYNYGAQRFGMAEKRKKPLPTPMRFRRQQEIERLVKERRQLKKQWRKAPEEEEGINLLQAEIKNRLATLRRAENLRRRRKMKEQARSNFFKDPYKFAKNLFTKEKSGKLKASKKDLETYLKQSHTDRQRDGETTLPPDMPPIHSPEHELDITPPRWSEVERIVRRARAASSPGPNGVPYRLYKNTPGVLRCLWRLMKVVWQKQEIPTAWRRAGGILIPKDKDSVDISQFRQISLVNVEGKIFFSVVANRLTAYLEKNHYIDTMVQKAGIPGFSGCLEHTNMIWNQIQTAKKNGSDLHVVFLDLANAFGSVPHNLLWTAFQYFSIPDEITRLVKSYFQDLQLCLTTDEYTTAWQRLEIGIMAGCTISPLAFTMAMEVIIRASRWVVGGQKLKSGVRLPPIRAYMDDMTILTTTKACAKRLLNKLQENIQWARMEIKPGKSRSISVVKGKLSEQRFYVGKEPIPTVAEKPVKSLGRWYHATLKDTEQVDQLRQDTMHGLERIDKTMLPGRLKLWCLQFGLLPRMMWPLTIYEVSISKVEKLERLISSFAKKWLGLPSCFTNIGLYGRGILEIPVSSMVEEFKCSKVRLEMTLTESRDPCVSQTAPTLVTGRKWNPAEATHQAKSDLRHRDIIGNVQQGRGGLGSIESRPSWHKAAPAQRRRLVVEEVRRYEQATRCAKAVSQAKQGQWMRWEGVERRKFSWRELMSMEAFHISFILRATYDVLPSPSNLNQWYGKDPTCPLCPSPANLKHILVGCKTSLSQGRYTWRHNHVLKCLATTLECSRLKNNALPSPSFHPTYAKEFIREGVKTAKGYTTTIISQLGKARDWKLVADLNKRLYFPSEIATTNLRPDLVLWSPSLHIVYIIELTVPWEDAVEEAFERKRLKYTELAADAEQRGWKAKVCPVEVGCRGFVGKSTIKLLKELGVRGQTLRQTIKALSGAAEEASRWIWVKRGDSNWAPNTTCGS

SEQ ID NO: 22491 - protein, 1150 aa, Labeo rohita
MKKIPPESARAGEDDDSLIDYMVIDPGTKQTTRMMITKIPEKTTPTPTPGCKLQICRCGWTKETTYAGLRRHQGLKKCLPSQKQGPCIDRYFLRSCSSKSSEVQQQDQNQSLQNINPPVQEEDEEPSIEVSNLSQPAIENKIQGRKPQVRWPKSCERKEWETIDTDISKLLGQLRGTVVRKLERMGDLIYNYGVERFGMVEKRKKTSPTQTKSRRQQEIERLVKERRQLKKQWRKAPEEEKEGINLLQAEIKNRLATLRRAENLRRRLKKKEQERSNFFKDPYKFAKKLFTKEKNGKLKTSKKDLETYLKQSLTDSQRCGQITLPPEMPPIHSPEHQMDISPPRWSEVKRIVQRARAASSPGPNGVPYRVYKNTPDVLRFLWRLMKVVWQKQAIPTAWRRAGGILIPKEKDSVDISQFRQISLLNVEGKIFFSVVARRLTAYLEKNHFIDTMVQKAGIPGFSGCLEHLNMIWNQIQLAKKDGRDLHVVFLDLANAFGSVPHNLLWTAFHYFSVPEVITRLVKSYFQDLQLCLTTDECTTAWQRVEIGIMAGCTISPLAFTMAMEVIIRASRWVVGGQKLKSGLRLPPIRAYMDDMTILTTTKACARRLLNKLQENIQWARMEIKPSKSRSVSVVKGKLSEQRFYVGKEPIPTVAEKPVKSLGRWYHATLKDTEQVDQLMKDTICGLESINKTKLPGRLKLWCLQFGLLPRLMWPLTIYEVPISKVEKLERVISSFAKKWLGLPRCFTNIGLYGRGILEIPVSSLAEEFKCSKVRLEMTLTESRDPSVSRSAPTLVTGRKWNPAAATHQAKLDLRHRDIIGNVQQGRGGLGLGGSRPSWQRAAPAQRRKLVVEEVRRHEQATRCVKAISQAKQGQWTRWEGVERRKISWRELMGMEAFHISFILRATYDVLPSPSNLNQWYGEDPTCPLCPSPANLKHILVGCKISLSQGRYTWRHNHVLKCLAATLESRRIKINSLPPSSFHPSYAREFTREGTKTAKVQTISDVGQLGRARDWKLVVDLNQRLHFPSEIATTNLRPDLVLWSSSLHTVYIIELTVPWEDAVEEAFERKSLKYTELAADAEQRGWKSKVCPVEVGCRGFVGKSTIRLLKELGVQGQTLRRTIKALSGAAEEASRWLWVKRGDSNWAPNIT

SEQ ID NO: 22492 - protein, 823 aa, Labeo catla
MPPIHSPEHQMDISPPRWSEVKRIVQRARAASSPGPNGVPYRAYKNTPDVLRFLWRLMKVVWQKQAIPTAWRRAGGILIPKEKDSVDISQFRQISLLNVEGKIFFSVVARRLTVYLEKNHFIDTMVQKAGIPGFSGCLEHLNMIWNQIQSAKKDGRDLHVVFLDLANAFGSVPHNLLWTAFHYFSVPEVITRLVKSYFQDLQLCLTTDECTTAWQRVEIGIMAGCTISPLAFTMAMEVIIRASRWVVGGQKLKSGLRLPPIGAYMDDMTILTTTKACARRLLNKLQENIQWARMEIKPSKSRSVSVVKGKLSEQRFYVGKEPIPTVAEKPVKSLGHWYHATLKDTEQVDQLMKDTICGLESINKTKLPGRLKLWCLQFGLLPRLMWPLTIYEVPISKVEKLERVISSFAKKWLGLPRCFTNIGLYGRGILEIPVSSLAEEFKCSKVRLEMTLTESCDPSVSRSAPTLVTGRKWNPAAATHQAKSDLRHRDIIGNVQQGRGGLGLGGSRPSWQRAAPAQRRQLVVEEVRRHEQATRCVKAISQAKQGQWTRWEGVERRKISWRELMGMEAFHISFILRATYDVLPSPSNLNQWYGEDPTCPLCPSPANLKHILIGCKTSLSQGRYTWRHNHVLKCLAATLESRRLKINSLPPSSFHPSYAREFTREGTKTAKVQTISDVGQLGRARDWKMVVDLNQRLHFPSEIATTNLRPDLVLWSSSLHTVYIIELTVPWEDAVEEAFERKSLKYTELAADAEQRGWKSKVCPVEVGCRGFVGKSTIRLLKELGVQGQTLRRTIKALSGAAEEASRWLWVKRGDSNWAPNIT

SEQ ID NO: 22493 - protein, 1133 aa, Oxygymnocypris stewartii
MASDPGMKQTTRMMINKKPEMITHTPGIKLQSCRCGWTKETSYAGLRRHQGLKKCLLSEQQGPCIDRYFLRSRSNKSSEFQQQDQNQSLQDINPPVREEDEEPSIVVPHKANQPQSTTENKIQGRKPQVRWPKSCEKKEWETIDTDISNLLGQLRGTVVKKLERMGDLIYNYGAERFGTAEKRKKASSTPAKSRRQQEIERLVKERRQLKKQWRKTPEEEKEGINQLQAEIKNRLSTLRRAENLRRRRQMKEQARSNFFKDPYKFAKSLFTKDKSGKLKTSKKDLEAYLKQNHTDSQRCGQINLPPDMPPIHSPEHQLDISPPKWSEVERIVRRARAASSPGPNGVPYRLYKNSPEVLRFLWRMMKVVWQKQAIPNAWRRAGGILIPKEKDSVDISQFRQISLLNVEGKIFFSVVTHRLAVYLEKNHFIDTTVQKAGIPGFSGCLEHTNMIWNQIQAAKKDGRDLHVVFLDLANAFGSVPHNLLWIAFHYFSVPEAITRLVKSYFQDLQLYLTIGDCTTAWQRVEIGIMAGCTISPLAFTMAMEVIIRASRWVVGGQKLKSGLRLPPIRAYMDDMTILTTTKACTRRLLNKLQENIQWARMEIKPSKSRSISIVKGKLSEHRFYVGEEPIPTVAEKPVKSLGRWYHATLKDSEQVDQLGQDTMSGLESINKTMLPGRLKLWCLQFGLLPRLMWPLTIYEVPISKVEKLERVVSSFAKKWLGLPRCFTNIGLYGRGILEIPISSLTEEFKCSKVRLEMTPTESRDPCVSQTAPTLVTGRKWNPTAATHQAKSDLRHRDIIGIVQQGRGGLGLGESRPSWHRAAPAQRRRLVVEEVRRQEQATRCAKAVSQAKQGQWMRWEGVERRKFSWRELMGMEAFHISFTLRATYDVLPSPSNLNQWYGEDPTCPLCPSPANLKHILVGCKTSLSQGRYTWRHNHVLKCLAATLEVRRRKINALPPTSVHPSFAREFIREGVKTVKVHIPSDIGQLGGARDWKLAADLNQRLCFPSEIAITNLRPDLVLWSSSLHTVYIIELTVPWEAAVEEAFERKSLKYTELAVEAEQRGWKSKVCPVEVGCRGFVGKSTIRLLKELGVRGQTLRQTIKALSGAAEEASRGLWVKRGDSAWAPNNTCGT

SEQ ID NO: 22494 - protein, 987 aa, Clupea harengus
MEVNTDLCNILEGLKGTTRKKLEKMGDLIYSYGSERFGAVERKRSEPTIPTKSRRQKEIDRLVRERRQLKKQWRKATEEEKEGINVLQEAIRSRLVTLRRAENLVKKRRRKEQTRSRFYKDPFKFVKSLFTAEKSGSLSVSKADLEKHLEKSCTDAKRHEEVILPSDMPPINPPEHQLDISPPRWSEVEKTVRRARAASAPGPNGVPYRLYKNAPDALRFLWKLMRVVWQKKEIPTSWQRAGGILIPKEKDSSEIGQFRQISLLNVEGKIFFSVVAHRLAGYLQRNHLIDTSIQKAGISGFSGCLEHASTIWHQIKVAKTEGTDLHVVFLDLANAFGSVPHNLLWTAFDFFRVPVALTSLVKAYFQDVQVCLSTAEYTTAWQHLEVGIMAGCTISPLAFTMAMEMIIRASRWVVGGQLIRPGLRLPPVRAYMDDLTTLTTTKACTVRLLKKLQDNIELARMKIKPSKSRSISIVKGKLSDQRFLIGDEPIPTVSEKPVKSLGRWYDASLKDKEQVDQLRKDVASGLENINRTALPGKLKLWCMQFGLLPRLLWPLTMYEVPISKVEKLERLVSSYARKWLGLPRCLSSIGLYGKGVLELPISSLAEEYKCAKVRLEMMLLDSSDPFVAQAAPILATGRKWTPLEATKQAKAALKHRDIVGRVQHGRSGLGAGASTPAWNKATPFQRRKLVVQEVRQQEEAARCAKAVSQAKQGQWMTWEGVEKRKISWQELWEMEAFKASFTIRAAYDVLPSPKNLSQWYGEDPTCSLCPTPATLKHILVGCKTGLTQGRYTWRHNQVLQCLAAVMESRRMSVNALPPPSRRPATTFVREGGGQATLTTTRPETGQLGGARDWKMLADLGQKLRFPAEIATSNLRPDLVLWSASLKQVYIVELTVPWESAVEEAYERKKLRYADLAADTQQRGWKAKVCPVEVGCRGFVATSTSRLLREMGVRGKAHRQAVKDLSRAAEKGSQWLWIKRKDSAWAVG

SEQ ID NO: 22495 - protein, 991 aa, Anabarilius grahami
MWKATNTDLCNMLEGIRGTAMKKLDRMGDLIYAYGVERFGVVESKRATPSIFTKSRRQTEIDRLVKERRQLKKQWRKATEEEKEGINLLQKEIQGRLATLRRAENLLRKHRRKEQTRSRYYKDPFKFVKNLFTKEKSGSLSVSKADLEEHLKDSCTDDKHQEKVTLPPDMPPVNPPEHELDINPLRWSEVEQTVRRARSASSPGPNGVPYRLYKNAPDVLRFLWKLMRVVWQKKEIPTSWRRAGGILIPKEKDSVEIGQFRQISLLNVEGKIFFSVVAHRLAGYLQRNNLIDTSIQKAGISGFSGCVEHASVIWHQIQVAKKEGTDLHVVFLDLVNAFGSVPHNLLWTAFDYFRVPAALTTLVKAYFQDVQLCVTTAEYTTAWQHLEVGIMAGCTISPLAFTLAMEVIIRASRWTVGGQRIRSGLRLPPIRAYMDDLTTLTTTKVCTAQLLRKLQENIERARMKIKLSKSRSISIIKGKVSDHRFYNGEEPIPTVSEKPVKSLGRWYDASLKDKEQVEQLRKEVASGLEKIDRTLLPGKLKLWCMQYGLLPRLLWPLTLYEVPLSKVEKLERLVSSYVRKWLGLPRCLSSIGLYGKGMLHLPISSLVEEYKCAKVRLEMMLLDSNDPFVAQATPILATGRKWTPLAATEQAKAALRHKDIVGRAQEGRSGLGLGASTPVWSKALPPQRRKMVVQEVRQEEEARRCAQAVAQAKQGQWMTWEGVEKRKISWKELWEMEAFRASFTIRAAYDVLPSPANLSQWYAEDPTCPLCPSLATLKHILVGCKTSLTQGRYTWRHNQVLKCLAAVLESRRTSVNALPPLSSQWQPIPFVREGEGQANFTTIRSDSGQLGRARDWKLLADLNKKLCFPAEIAATNLRPDLVLWSASLKLVYIIELTVPWEGAVEEAYERKKLRYAELATDVQQQGWNVKVRPVEVGCRGFVATSTSRLLREMGVRGKAHRQAVKDLRGCGKGKPVAMGEEKRLCLGLQMS

SEQ ID NO: 22496 - protein, 1123 aa, Clupea harengus
MATKNYKEKIPLESARAGAEDDSSADNPVIDIGTEQTTSLMISIPETATATAGHKLQSCICGWEKVTSTRGLKIHQGKKGCLTKGQQGSCIDSYFLRSRSSQSTEVQQRGQNHSLQDINIPVPEEDEPCTGNQPEPSPARPAVEKKIQGRRPLIKWPKSCEKALWMEVNTDLCNILEGLKGTTRKKLEKMGDLIYSYGSERFGAVERKRSEPTIPTKSRRQKEIDRLVRERRQLKKQWRKATEEEKEGINVLQEAIRSRLVTLRRAENLVKKRRRKEQTRSRFYKDPFKFVKSLFTAEKSGSLSVSKADLEKHLEKSCTDAKRHEEVILPSDMPPINPPEHQLDISPPRWSEVEKTVRRARAASAPGPNGVPYRLYKNAPDALRFLWKLMRVVWPKKEIPTSWQRAGGILIPKEKDSSEIGQFRQISLLNVEGKIFFSVVAHRLAGYLQRNHLIDTSIQKAGISGFSGCLEHASTIWHQIKVAKTEGTDLHVVFLDLANAFGSVPHNLLWTAFDFFRVPVALTSLVKAYFQDVQVCLSTAEYTTAWQHLEVGIMAGCTISPLAFTMAMEMIIRASRWVVGGQLIRPGLRLPPVRAYMDDLTTLTTTKACTVRLLKKLQDNIELARMKIKPSKSRSISIVKGKLSDQRFLIGDEPIPTVSEKPVKSLGRWYDASLKDKEQVDQLRKDVASGLENINRTALPGKLKLWCMQFGLLPRLLWPLTMYEVPISKVEKLERLVSSYARKWLGLPRCLSSIGLYGKGVLELPISSLAEEYKCAKVRLEMMLLDSSDPFVAQAAPILATGRKWTPLEATKQAKAALKHRDIVGRVQHGRSGLGAGASTPAWNKATPFQRRKLVVQEVRQQEEAARCAKAVSQAKQGQWMTWEGVEKRKISWQELWEMEAFKASFTIRAAYDVLPSPKNLSQWYGEDPTCSLCPTPATLKHILVGCKTGLTQGRYTWRHNQVLQCLAAVMESRRMSVNALPPPSRRPATTFVREGGGQATLTTTRPETGQLGGARDWKMLADLGQKLRFPAEIATSNLRPDLVLWSASLKQVYIVELTVPWESAVEEAYERKKLRYADLAADAQQRGWKAKVCPVEVGCRGFVATSTSRLLREMGVRGKAHR

SEQ ID NO: 22497 - protein, 1152 aa, Clupea harengus
MATKNYKEKIPLESARAGAEDDSSADNPVIDIGTEQTTSLMISIPDTATATAGHKLQSCTCGWEKVTSTRGLKIHQGKKGCLKKGQQGSRIDSYFLRSRSSQSTEVQQRGQNHSLQDINIPVPEEDEPCTGNQPEPSPARPAVEKKIQGRRPLIKWPKSCEKALWMEVNTDLCNILEGLKGTTRKKLEKMGDLIYTYGSERFGAVERKRSEPTIPTKSRRQKEIDRLVRERRQLKKQWRKATEEEKEGINVLQEAIRSRLVTLRRAENLVKKRRRKEQTRSRFYKDPFKFVKSLFTAEKSGSLSVSKADLEKHLEKSCTDAKRHEEVILPSDMPPINPPEHQLDISPPRWSEVEKTVRRARAASAPGPNGVPYRLYKNAPDALRFLWKLMRVVWQKKEIPTSWQRAGGILIPKEKDSSEIGQFRQISLLNVEGKIFFSVVAHRLAGYLQRNHLIDTSIQKAGISGFSGCLEHASTIWHQIKVAKTEGTDLHVVFLDLANAFGSVPHNLLWTAFDFFRVPVALTSLVKAYFQDVQVCLSTAEYTTAWQHLEVGIMAGCTISPLAFTMAMEMIIRASRWVVGGQLIRPGLRLPPVRAYMDDLTTLTTTKACTVRLLKKLQDNIELARMKIKPSKSRSISIVKGKLSDQRFLIGDEPIPTVSEKPVKSLGRWYDASLKDKEQVDQLRKDVASGLENINRTALPGKLKLWCMQFGLLPRLLWPLTMYEVPISKVEKLERLVSSYARKWLGLPRCLSSIGLYGKGVLELPISSLAEEYKCAKVRLEMMLLDSSDPFVAQAAPILATGRKWTPLEATKQAKAALKHRDIVGRVQHGRSGLGAGASTPAWNKATPFQRRKLVVQEVRQQEEAARCAKAVSQAKQGQWMTWEGVEKRKISWQELWEMEAFKASFTIRAAYDVLPSPKNLSQWYGEDPTCSLCPTPATLKHILVGCKTGLTQGRYTWRHNQVLQCLAAVMESRRMSVNALPPPSRRPATTFVREGGGQATLTTTRPETGQLGGARDWKMLADLGQKLRFPAEIATSNLRPDLVLWSASLKQVYIVELTVPWESAVEEAYERKKLRYADLAADAQQRGWKAKVCPVEVGCRGFVATSTSRLLREMGVRGKAHRQAVKDLSRAAEKGSQWLWIKRKDSAWAVG

SEQ ID NO: 22498 - protein, 973 aa, Clupea harengus
MEVNTDLCNILEGLKGTTRKKLEKMGDLIYSYGSERFGAVERKRSEPTISTKSRRQKEIDRLVRERRQLKKQWRKATEEEKEGINVLQEAIRSRLVTLRRAENLVKKRRRKEQTRSRFYKDPFKFVKSLFTAEKSGSLSVSKADLEKHLEKSCTDAKRHEEVILPSDMPPINPPEHQLDISPPRWSEVEKTVRRARAASAPGPNGVPYRLYKNAPDALRFLWKLMRVVWQKKEIPTSWQRAGGILIPKEKDSSEIGQFRQISLLNVEGKIFFSVVAHRLAGYLQRNHLIDTSIQKAGISGFSGCLEHASTIWHQIKVAKTEGTDLHVVFLDLANAFGSVPHNLLWTAFDFFRVPVALTSLVKAYFQDVQVCLSTAEYTTAWQHLEVGIMAGCTISPLAFTMAMEMIIRASRWVVGGQLIRPGLRLPPVRAYMDDVTTLTTAKACTVRLLRKLQDNIELARMKIKPSKSRSISIVKGKLSDQRFLIGDEPIPTVSEKPVKSLGRWYDASLKDKEQVDQLRKDVASGLENINRTALPGKLKLWCMQFGLLQHLLWPLTMYEVLISKVEKLERLVSSYARKWLGLPRCLSSIGLYGKGVLELPISSLAEEYKCAKVRLEMMLLDSSDPFVAQAAPILATGRKWTPLEATKQAKAALKHRDIVGRVQHGRSGLGAGASTPAWNKATPFQRRKLVVQEVRQQEEAARCAKAVSQARQGQWMTWEGVEKRKISWQELWEMEAFKASFTIRAAYDVLPSPKNLSQWYGEDPTCSLCPTPATLKHILVGCKTGLTQGRYTWRHNQVLQCLAAVLESRRMSVNALPPPSRRPTTTFVREGGGQATLTTTRPETGQLGGARDWKMLADLGQKLRFPAEIATSNLRPDLVLWSASLKQVYIVELTVPWESAVEEAYERKKLRYADLAADAQQRGWKAKVCPVEVGCRGFVATSTSRLLQEMGVRGKAHRQAVKDLSRAAEKGSQ

SEQ ID NO: 22499 - protein, 1152 aa, Clupea harengus
MATKNYKEKIPLESARAGAEDDSSADNPVIDIGTEQTTSLTISIPETATATAGHKLQSCICGWEKVTSTRGLKIHQGKKGCLKKGQQGSRIDSYFLRSRSSQSTEVQQRGQNHSLQDINIPVPEEDEPCTGNQPEPSPARPAVEKKIQGRRPLIKWPKSCEKALWMEVNTDLCNILEGLKGTTRKKLEKMGDLIYSYGSERFGAVERKRSEPTIPTKSRRQKEIDRLVRERRQLKKQWRKATEEEKEGINVLQEAIRSRLVTLRRAENLVKKRRRKEQTRSRFYKDPFKFVKSLFTAEKSGSLSVSKADLEKHLEKSCTDAKRHEEVILPSDMPPINPPEHQLDISPPRWSEVEKTVRRARAASAPGPNGVPYRLYKNAPDALRFLWKLMRVVWQKKEIPTSWQRAGGILIPKEKDSSEIGQFRQISLLNVEGKIFFSVVAHRLAGYLQRNHLIDTSIQKAGISGFSGCLEHASTIWHQIKVAKTEGTDLHVVFQDLANAFGSVPHNLLWTAFDFFRVPVALTSLVKAYFQDVQVCLSTAEYTTAWQHLEVGIMAGCTISPLAFTMAMEMIIRASRWVVGGQLIRPGLRLPPVRAYMDDLTTLTTTKACTVRLLKKLQDNIELARMKIKPSKSRSISIVKGKLSDQRFLIGDEPIPTVSEKPVKSLGRWYDASLKDKEQVDQLRKDVASGLENINRTALPGKLKLWCMQFGLLPRLLWPLTMYEVPISKVEKLERLVSSYARKWLGLPRCLSSIGLYGKGVLELPISSLAEEYKCAKVRLEMMLLDSSDPFVAQAAPILATGRKWTPLEATKQAKAALKHRDIVGRVQHGRSGLGAGASTPAWNKATPFQRRKLVVQEVRQQEEAARCAKAVSQAKQGQWMTWEGVEKRKISWQELWEMEAFKASFTIRAAYDVLPSPKNLSQWYGEDPTCSLCPTPATLKHILVGCKTGLTQGRYTWRHNQVLQCLAAVMESRRMSVNALPPPSRRPATTFVREGGGQATLTTTRPETGQLGGARDWKMLADLGQKLRFPAEIATSNLRPDLVLWSASLKQVYIVELTVPWESAVEEAYERKKLRYADLAADAQQRGWKAKVCPVEVGCRGFVATSTSRLLREMGVRGKAHRQAVKDLSRAAEKGSQWLWIKRKDSAWAVG

SEQ ID NO: 22500 - protein, 921 aa, Clupea harengus
MEVNTDLCNILEGLKGTTRKKLEKMGDLIYSYGSERFGAVERKRSEPTIPTKSRRQKEIDRLVRERRQLKKQWRKATEEEKEGINVLQEAIRSRLVTLRRAENLVKKRRRKEQTRSRFYKDPFKFVKSLFTAEKSGSLSVSKADLEKHLEKSCTDAKRHEEVILPSDMPPINPPEHQLDISPPRWSEVEKTVRRARAASAPGPNGVPYRLYKNAPDALRFLWKLMRVVWQKKEIPTSWQRAGGILIPKEKDSSEIGQFRQISLLNVEGKIFFSVVAHRLAGYLQRNHLIDTSIQKAGISGFSGCLEHASTIWHQIKVAKTEGTDLHVVFLDLANAFGSVPHNLLWTAFDFFRVPVALTSLVKAYFQDVQVCLSTAEYTTAWQHLEVGIMAGCTISPLAFTMAMEMIIRASRWVIGGQLIRPGLRLPPVRAYMDDLTTLTTTKACTVRLLKKLQDNIELARMKIKPSKSRSISIVKWKLSDQRFLIGDEPIPTVSEKPVKSLGRWYDASLKDKEQVDQLRKDVASGLENINRTALPGKLKLWCMQFGLLPRLLWPLTMYEVPISKVEKLERLVSSYARKWLGLPRCLSSIGLYGKGVLELPISSLAEEYKCAKVRLEMMLLDSSDPFVAQAAPILATGRKWTPLEATKQAKAALKHRDIVGRVQHGRSGLGAGASTPAWNKATPFQRRKLVVQEVRQQEEAARCAKAVSQAKQGQWMTWEGVEKRKISWQELWEMEAFKASFTIRAAYDVLPSPKNLSQWYGEDPTCSLCPTPATLKHILVGCKTGLTQGRYTWRHNQVLQCLAAVMESRRMSVNALPPPSRRPATTFVREGGGQATLTTTRPETGQLGGARDWKMLADLGQKLRFPAEIATSNLRPDLVLWSASLKQVYIVELTVPWESAVEEAYERKKLRYADLAADAQQ

SEQ ID NO: 22501 - protein, 1152 aa, Clupea harengus
MATKNYKEKIPLESARAGAEDDSSADNPVIDIGTEQTTSLMISIPETATATAGHKLQSCICGWEKVTSTRGLKIHQGKKGCLKKGQQGSRIDSYFLRSRSSQSTEVQQRGQNHSLQDINIPVPEEDEPCTGNQPEPSPARPAVEKKIQGRRPLIKWPKSCEKALWMEVNTDLCNILEGLKGTTRKKLEKMGDLIYSYGSERFGAVERKRSEPTIPTKSRRQKEIDRLVRERRQLKKQWRKATEEEKEGINVLQEAIRSRLVTLRRAENLVKKRRRKEQTRSRFYKDPFKFVKSLFTAEKSGSLSVSKADLEKHLEKSCTDAKRHEEVILPSDMPPINPPEHQLDISPPRWSEVEKTVRRARAASAPGPNGVPYRLYKNAPDALRFLWKLMRVVWQKKEIPTSWQRAGGILIPKEKDSSEIGQFRQISLLNVEGKIFFSVVAHRLAGYLQRNHLIDTSIQKAGISGFSGCLEHASTIWHQIKVAKTEGTDLHVVFLDLANAFGSVPHNLLWTAFDFFRVPVALTSLVKAYFQDVQVCLSTAEYTTAWQHLEVGIMAGCTISPLAFTMAMEMIIRASRWVVGGQLIRPGLRLPPVRAYMDDLTTLTTTKACTVRLLKKLQDNIELARMKIKPSKSRSISIVKGKLSDQRFLIGDEPIPTVSEKPVKSLGRWYDASLKDKEQVDQLRKDVASGLENINRTALPGKLKLWCMQFGLLPRLLWPLTMYEVPISKVEKLERLVSSYARKWLGLPRCLSSIGLYGKGVLELPISSLAEEYKCAKVRLEMMLLDSSDPFVAQAAPILATGRKWTPLEATKQAKAALKHRDIVGRVQHGRSGLGAGASTPAWNKATPFQRRKLVVQEVRQQEEAARCAKAVSQAKQGQWMTWEGVEKRKISWQELWEMEAFKASFTIRAAYDVLPSPKNLSQWYGEDPTCSLCPTPATLKHILVGCKTGLTQGRYTWRHNQVLQCLAAVMESRRMSVNALPPPSRRPATTFVREGGGQATLTTTRPETGQLGGARDWKMLADLGQKLRFPAEIATSNLRPDLVLWSASLKQVYIVELTVPWESAVEEAYERKKLRYADLAADAQQRGWKAKVCPVEVGCRGFVATSTSRLLREMGVRGKAHRQAVKDLSRAAEKGSQWLWIKRKDSAWAVG

SEQ ID NO: 22502 - protein, 882 aa, Dallia pectoralis
MGDLIYNYGAERFGLVEKRKKTSPTQTKSRRQQEIERLVKERRQLKKQWRKAPEEENEGINLLQTEIKNHLATLRRAESLRRRGKKKEQERSNFFKDPYKFAKKLFTKEKNGKLKTSKKDLETYLKQSLTDSQRGGQTTLPPEMPPIHSPEHQMDISPPRWSEVKRIVQRARAASSPGPNGVYKNIPDVLCFLWRLMKVVWQKQAIPTAWRRAGSILIPKEKDSVEISQFCQISLLNVEGKIFFSVVARRLTAYLEKNHFIDNMVHKAGIPGFSGCLEHVNMIWNQMQTAKNDGRDLHVVFLDLSSAFGSVPHNLLWTAFHYFSVPEVITRPVKSCLTTDECTTAWQRVEIGIMAGCTISPLAFTMAMEVIIRASRWVVGGQKLKAGLRLPPIRAYMDDMTILTTTKVCARRLLNKLQENIQWARMEIKPSKSRRISVVKGKLSEQRFYVGKEPIPTVAEKPVKSLGRWYYDTLKDTEQVDQLKKDTICGLESYNKTKLPGTLKLWSLQFGLIPRLMWPLTIYEVPISKVEKLERVVSSFAKKWLGLPRCFTNIGLYGRGILEIPVSSLAEEFKCSKVRLEMTLTESRDPCVSGTAPTLVTGRKWNPGAASHQAKTDLRHRDIIGNVQQGREGLGLGEIRPSWQRAAPDLRRRLVVEEVRRHEQATRCVKAISQAKQGQWMKWEGVERRKLSWRELMGMEAFHISFILRATYDVLPSPSNLNQWYGEDPTCLLCPSPANLKHILFGCKTSLLQGRYTWRHNHVLKCLAATLECRRIKVNALPSPSLHPSYAREFIREGTKTAKVQTTSDVGQLGRARDWKLVADLNQRLHFPSEIATTNLRPDLVLWSSSLHSVYIIELTVPWEAAVEEAFERKSLKYTELA

SEQ ID NO: 22503 - protein, 1116 aa, Oryzias latipes
MGVNLGRWDSLLNPLEVSWAYQRNTEEGGRPLENPSDVTTHLLATVSHRCLNYSGITTRKEELGTGEQPESNTSHPPIEKKILGRRPLVKWPKSCDKTLWMEVNNDLCHILEGVRGNTMKKLERMGNLIFTYGLERFGVVEGKRSTPTIHTKSRRQKEIDLLVKERRQLKKQWRKATEEEKEGINVLQEEIKGRLSTLRRAENLLRKRRRKEQTRSRFYKDPFKFVKSLFAKEKSGSLSASKAVLEEHLKKTCTDDRHHEEASLPPDMPPVSTPEYQLDASPPRWSEVVKIVRRARAASAPGPNGIPYRLYKNAPGVLQFLWKLMKVVWIKKEIPTSWRRAGGILIPKEKDSAVLGQFRQISLLNVEGKIFFSVVAHRLTSYLHRNNLIDTSIQKAGIPGFSGCVEHTSVIWHQIQLAKKERKDLHVVFLDLENAFGSVPHKFLWTAFDYFKVPPALTTLVKAYFQDIQLCVTTAEFTTAWQHLEVGIMAGCTISPLAFTLAMEVIIRASQWVVGGQQIRPGLRLPPVRAYMDDLTTLTTTKACTVRLLGKLHKNIELARMKIKPSKSRSISIVKGKLSDHRFHIGEEPIPTVSEKPVKSLGRWYDASLKDKEQVEQLRKDIAGGLENINRTLLPGKLKLWCMQYGLLPRLLWPLTLYEVPLSKVEKLERLINAYARKWLGLPRCLSTIGLYGRGMLELPISSLIEEYKCAKVRLEMTLQDTCDSLVVQAAPILATGRKWAPKAATDLAKAALRHKDIVGCVQEGRSGLGLSSSAPSWRKANPAERRRLVVQEIRREEEAARCAQAVAQAKQGQWMGWEGVEKRKFSWKDLWEMEASRASFIIRATYDVLSSPANLKQWYGEDPSCPLCQSPATLKHILVGCKTSLSQGRYTWRHNVVLRCLATVLEKQRTSVNALPQATSHRQLIHFLREGQATFNTTSAADIGQLGRARDWKMMVDLDRKLCFPREVASTNLRPDLVLWSSTLKLVYIVELTVPWESAIEEAYERKMLRYAELAADAKEQGWSVKVRPVEVGCRGFVATSTPRLLREMGVRGKAQRQAIKDLSQAAEKGSQWLWIKRKDLTWASKCLVTDGGEPGTLGFTAEPSGGVVGLSAKH

SEQ ID NO: 22504 - protein, 1016 aa, Oryzias latipes
MEVNNDLCHILEGVRGNTMKKLERMGNLIFTYGLERFGVVEGKRSTPTIHTKSRRQKEIDLLVKERRQLKKQWRKATEEEKEGINVLQEEIKGRLSTLRRAENLLRKRRRKEQTRSRFYKDPFKFVKSLFAKEKSGSLSASKAVLEEHLKKTCTDDRHHEEASLPPDMPPVSTPEYQLDASPPRWSEVVKIVRRARAASAPGPNGIPYRLYKNAPGVLQFLWKLMKVVWIKKEIPTSWRRAGGILIPKEKDSAVLGQFRQISLLNVEGKVFFSVVAHRLTSYLHRNNLIDTSIQKAGIPGFSGCVEHTSVIWHQIQLAKKERKDLHVVFLDLENAFGSVPHKFLWTAFDYFKVPPALTTLVKAYFQDIQLCVTTAEYTTAWQHLEVGIMAGCTISPLAFTLAMEVIIRASQWVVGGQQIRPGLRLPPVRAYMDDLTTLTTTKACTVRLLGKLHKNIELARMKIKPSKSRSISIVKGKLSDHRFHIGEEPIPTVSEKPVKSLGRWYDASLKDKEQVEQLRKDIAGGLENINRTLLPGKLKLWCMQYGLLPRLLWPLTLYEVPLSKVEKLERLINAYARKWLGLPRCLSTIGLYGRGMLELPISSLIEEYKCAKVRLEMTLQDTCDSLVVQAAPILATGRKWAPKAATDLAKAALRHKDIVGCVQEGRSGLGLSSSAPSWRKANPAERRRLVVQEIRREEEAARCAQAVAQAKQGQWMGWEGVEKRKFSWKDLWEMEASRASFIIRATYDVLPSPANLKQWYGEDPSCPLCQSPATLKHILVGCKTSLSQGRYTWRHNVVLRCLATVLEKQRTSVNALPQATSHRQLIPFLREGQATFNTTSAADIGQLGRARDWKMMVDLDRKLCFPREVASTNLRPDLVLWSYTLKLVYIVELTVPWESAIEEAYERKMLRYAELAADAKEQGWSVKVRPVEVGCRGFVATSTPRLLREMGVRGKAQRQAIKDLSQAAEKGSQWLWIKRKDLTWASKCLVTDGGEPGTLGFTAEPSGGVVGLSAKH

SEQ ID NO: 22505 - protein, 849 aa, Oryzias latipes
MPPVSTPEYQLDASPPRWSEVVKIVRRARAASAPGPNGIPYRLYKNAPGVLQFLWKLMKVVWIKKEIPTSWRRAGGILIPKEKDSAVLGQFCQISLLNVEGKIFFSVVAHRLTSYLHRNNLIDTSIQKAGIPGFSGCVEHTSVIWHQIQLAKKERKDLHVVFLDLENAFGSVPHKFLWTAFDYFRVPPALTTLVKAYFQDIQLCVTTAEYTTAWQHLEVGIMAGCTISPLAFTLAIEVIIRASQWVVGGQQIRPGLRLPPVRAYMDDLTTLTTTKACTLRLLGKLHKNIELARMKIKPSKSRSISIVKGKLSDHRFHIGEEPIPTVSEKPVKSLGRWYDASLKDKEQVEQLRKDIAGGLENINRTLLPGKLKLWCMQYGLLPRLLWPLTLYEVPLSKVEKLERLINAYARKWLGLPRCLSTIGLYGRGMLGIPISSLVEECKCAKVRLEMTLQDTCDSLVVQAAPILATGRKWAPKAATDLAKAALRHKDIVGCVQEGRSSLGLSSSAPSWRKANPAERRRLVVQEIRREEEAARCAQAVAQAKQGQWMGWEGVEKRKFSWKDLWEMEASRASFIIRATYDVLPSPANLKQWYGEDPSCPLCQSPATLKHILVGCKTSLSQGGYTWRHNVVLRCLATVLEKQRTSVNALLQATSHRQLIPFLREGQATFNTTSAADIGQLGRARDWKMLADLDRKLCFPREVASTNLRPDLVLWSSTLKLVYIVELTVPWESAIEEAYERKMLRYAELAADAKEQGWSVKVRPVEVGCRGFVATLTPRLLREMGVRGKAQRQEIKDLSQAAEKGSQWLWIKRKDLTWASKCLVTDGGEPGTLGFTAEPSGGVVGLSARH

SEQ ID NO: 22506 - protein, 1211 aa, Pterostichus madidus
MVLTRKQKARCTEGAHLPSYEDVANPLYSNNGRINMDNDNGNATWNESQNTRVATLQQEEGHYTEYTQRSPSQAEASTAGTKSKTRKQPWSKEEMKEIIWCCQYSRLTGMHYRETFKLWRERNPDSRPTLTANTLQNQRRFIELNNKISHEERQEIINNIQAELDIRITQTRQHEEEHHEILQQDGNPNENIEPLREKNIDQKIKEKINQFLKTTFQKRPNLPRLASSHKNTEQFLIGNNSLDNILKEKDALDMHYLNTAIYSTACVITEVITGTTLEAEKVKSKRNNKPPEWQRRIQSKINLLRADLSRLTEVERGKRLKSAKVHKYIYNTYLKGETNNIKEVIEQIKQRLMATAQRLRRYKSRQQQFVDNKLFSHNEKAFYRRIRTDERNTVAKEDLTIERIEKYWKEIYENNEQHNGEAQWIQNLDRKPNMSFSKMTEEEVGNAIKKTNSWKAAGQDKIPNFWLKTLNTAHKYLVKTYNKIIENPEEVPEWFAAGKTFLLPKNGDPTEPKNYRPITCLNTTYKIFTAVLTRRINSHIEEHKIIPPEQKGCARSCQGCKDHLLYTKAVVVDCKKYKKNLNLAWIDYQKAYDSVPHSWILQSLDIAGISKNIIKLLNHLMLTWKTTMHIHTLGEPVQTKEIKIKRGIYQGDSLSPMLFCLALAPLSRLIKNTSTGYKLKDAGSSITHQLYMDDLKITSKSQIEIDKVLKVVKEFSDDIRMKFGLDKCAVATYQKGRLVWSENLMINAEESIKALNPGRTYKYLGVDEGDGIDHVGMKEKISKEYFTRTKRILKTHLSCKNKIKAIGVLAVPVLRYSFGIIDWTLAEIEKLDRKTRKALTINGLLHPRQDVERLYVKRKMGGRGLQQIEAAYYSTIYNLSSYIKRNPNDDPIIENIKKHDNSLHPTKSLLKKSKNIEEKILTRTQSEGVLIDEEQPRLEQSTPSQFKVQCHTRLYNRWRNKPMHGQKTRDMEKIGYDKEQSYKWLTEGIVKGETESLITAAQDQALKTKYVANMIHGSSQDKKCRICKKADETIHHIMSACSELAKKEYIERHNKVCTLLHFNICKHFKCPVPAEHWYNHTPDRVTANREEKTTILYDSGIQTDRTIIANRPDIIIRTDKKTYLLEVSIPADENIITKNAEKQLKYKDLSIELKRMWKTKVEIIPIIIGATGYVDTDFKNNIKKIPGEHSSSEVQRTALYGTAHIIRRVLT

SEQ ID NO: 22507 - protein, 1258 aa, Pterostichus madidus
MIIIMILIMIIIMIIIMIIIIMIIIIMTIIIMIIIIMIITMIIIIMIIIITRKQKARCTEGAHLPSYEDVANPLYSNNGRINMDNDNGNATWNESQNTRVATLQQEEGHYTEYTQRSPSQAEASTAGTKSKTRKQPWSKEEMKEIIWCCQYSRLTGMHYRETFKLWRERNPDSRPTLTANTLQNQRRFIELNNKISHEERQEIINNIQAELDIRITQTRQHEEEHHEILQQDGNPNENIEPLREKNIDQKIKEKINQFLKTTFQKRPNLPRLASSHKNTEQFLIGNNSLDNILKEKDALDMHYLNTAIYSTACVITEVITGTTLEAEKVKSKRNNKPPEWQRRIQSKINLLRADLSRLTEVERGKRLKSAKVHKYIYNTYLKGETNNIKEVIEQIKQRLMATAQRLRRYKSRQQQFVDNKLFSHNEKAFYRRIRTDERNTVAKEDLTIERIEKYWKEIYENNEQHNGEAQWIQNLDRKPNMSFSKMTEEEVGNAIKKTNSWKAAGQDKIPNFWLKTLNTAHKYLVKTYNKIIENPEEVPEWFAAGKTFLLPKNGDPTEPKNYRPITCLNTTYKIFTAVLTRRINSHIEEHKIIPPEQKGCARSCQGCKDHLLYTKAVVVDCKKYKKNLNLAWIDYQKAYDSVPHSWILQSLDIAGISKNIIKLLNHLMLTWKTTMHIHTLGEPVQTKEIKIKRGIYQGDSLSPMLFCLALAPLSRLIKNTSTGYKLKDAGSSITHQLYMDDLKITSKSQIEIDKVLKVVKEFSDDIRMKFGLDKCAVATYQKGRLVWSENLMINAEESIKALNPGRTYKYLGVDEGDGIDHVGMKEKISKEYFTRTKRILKTHLSCKNKIKAIGVLAVPVLRYSFGIIDWTLAEIEKLDRKTRKALTINGLLHPRQDVERLYVKRKMGGRGLQQIEAAYYSTIYNLSSYIKRNPNDDPIIENIKKHDNSLHPTKSLLKKSKNIEEKILTRTQSEGVLIDEEQPRLEQSTPSQFKVQCHTRLYNRWRNKPMHGQKTRDMEKIGYDKEQSYKWLTEGIVKGETESLITAAQDQALKTKYVANMIHGSSQDKKCRICKKADETIHHIMSACSELAKKEYIERHNKVCTLLHFNICKHFKCPVPAEHWYNHTPDRVTANREEKTTILYDSGIQTDRTITANRPDIIIRTDKKTYLLEVSIPADENIITKNAEKQLKYKDLSIELKRMWKTKVEIIPIIIGATGYVDTDFKNNIKKIPGEHSSSEVQRTALYGTAHIIRRVLT

SEQ ID NO: 22508 - protein, 1028 aa, Eurytoma brunniventris
MINPEENSPGSSVNGPLAAARTQSQRRESRHVCDLCGASFNTNQGLGQHRRHRHPIEHNSAISTARTKAVWTEEEIRSVAVLEIALGPCSGVNAALAEQHRHGRTVEAIKGLRKQQRYKDVLAQLRNEAASAAAPLPPPPQVAPRTDVDAPGRSANAQEEFVQPAPIDHDQRLKEWISRKLPLVPDTTPGIEIFRGIVSGAIQDIPVTQEIEEWLEIIGPGPEERQLSRQPRYTDRTRLRTSKRKAKKEEYKRLQKLWKRNMAKAAKIVLDGDDDARAERLTLDEQEEFWRPLLEGEPDELGDTVGQEERTDEELHDLCKPITEAEVRKWRVPNGTASGPDGVPVCDWREIPDLVKAMLFNVFLLREESTSVLTDSRTVLIPKERGTREPAKHRPLTIASVILRHFHKILAGRLTAAVTFNNAQRAFIEADGVAEHTVTMASLLRDARQRRKQLHVAVLDVKKAFDTVRRSAIREALIKKKVPKKLRNYIMRVYETSRTRLEVGGEKSEWICTHQGVRQGDPLSPFAFNSVMDMGLEGLSRHIGYTIAPGTFISVLAFADDLILLAETSEGMQEQLTAITNALNPLGLRLMPAKCAVLSLVPSGREKKVKVETQPRFRAEGQMVKQIGLLEEWKYLGVIFNSYGPVKRKIDIADYLERLKKAPLKAQQRLKVIRTFLLPRYTHALVLGRTLHGELRRADKMIRRAVRGWLRLPNDTPVGFFHAKSCEGGLGILALESFIPEATKNRVSRMKVSTIPAVKWAASSQWVNDKLKWCSQAKKTSKSWKSSLYQSVDGYELRDCSKCSASYGWVLDDYCRCPTNDWIKYILVRINALPSAVRTSRGRRWSESQVRCRAGCMRQETTAHTIQECPRTHGGRIKRHDAIVRTVANIVREKGWQVEVEPIIPTRRGNCKPDLVITKDDRVLVLDAQVVSGAGDLNRKNKEKIEYYRGNSDFITMVSRRARGGNAVRVIGITLSWRGIWCLDSESALRDLGLTKSQILGLTTRTLLGSYLNFYAFNAATYRTPARS

SEQ ID NO: 22509 - protein, 1131 aa, Torymus geranii
MQKAHTVMAHEQLAKKTYKKEPWTAEEKLLLAKKEAELLVKGTKSLHINAELIKFTVRTLEALKGRRKCADHKDQVNEYVRKYRAGKLTFPGSRKSNPTRVSQGGNHPSQGATPRRPSKRLSQVAQTRASLLRLSRNKRISFERATPRRTPIQVLPKRPSGSSNIITQTSLRCDATKEASQPPQAPSTVACPRGSSNKNPERQRALPEAESSEDDLFSDTEVDLSKDLFDDSTYTAPAPPGPESSSSNRQPDCFIKYFRDITLPENGTDEKFMKLFYLCKSVELTPREELLTDLDLILLEILPPKDPPEPKLERSSSQAPPSRRDRKKEEYKRVQDLWKKDKTRCIKRILAEDLTQDGGLPRETMEPFWTATFTMGSTDAPSLSPPQDLFDIWYPIKPYEIKGMFPPNGTAKGPDGVSVPELKKIPLKWLASILNLFMFCGSLPDRLCASRTIFIQKVKGAQNPKDFRPITISSVLTRLFHKMLAERLKIVPLDLRQRGFRDADGCAENIVLFDMLLRYHQEKKRKLFFALLDMAKAFDTVSHNTIREVLTHKGLPSGFIDYFMHAYKSSYTILQHNGWESGKIFPKCGVKQGDPLSPVIFNFVIDEMLRLLPEEIGVSLDSLRVNAMAFADDINLVASTESGLQILIDTATTFLGECGLKANPAKCHTGALKTVPKEKRTYMDPTCRFRIGKAIIPSLNGIEEWTYLGVTFNSKGRTFADARPKLAKQLELLSAAPLKPQQRMYALRTVIIPGLLYRGALGFSTAGYLKAIDKLLRHYCRRWLHLPHDCPKAYFHADVKYGGLGVCAISLKAMVDRVVRLEKLRSSQVIHGTEGSRYLDREISCAESRLKDTDGRITRCKEMLDDRWARLLYESFDGRPLVKSVDTAGQHRWIGEPTRFLKGGDFVNCAKARINALPTAARTSRGRLKENHCRAGCPDVETLNHVVQFCHRTHGMRIKRHNAVVEYVAKKLEKKNFAVFREPKFKHGDSILKPDLVVAKDNLAQIIDAQIIGETRDMNLAHKDKIRKYGSSEEVANQIVHLTGCENIGGTSITLNLRGVWGPESAKDLLERKLIAKQDVKVISTRVLVGAVAGWRMFMESTSSKKKTTAGAKFTTRDMRRWFRKERTGIG

SEQ ID NO: 22510 - protein, 1131 aa, Torymus auratus
MQKAHTVMAHEQLAKKTYKKEPWTAEEKLLLAKKEAELLVKGTKSLHINAELIKFTVRTLEALKGRRKCADHKDQVNEYVRKYRAGKLTFPGSRKSNPTRVSQGGNHPSQGATPRRPSKRLSQVAQTRASLLRLSRNKRISFERATPRRTPIQVLPKRPSGSSNIITQTSLRCDATKEASQPPQAPSTVACPRGSSNKNPERQRALPEAESSEDDLFSDTEVDLSKDLFDDSTYTAPAPPGPESSSSNRQPDCFIKYFRDITLPENGTDEKFMKLFYLCKSAELTPREELLTDLDLILLEILPPKDPPEPKLERSSSQAPPSRRDRKKAEYKRVQDLWKKDKTRCIKRILAEDLTQDGGLPRETMEPFWTATFTMGSTDAPSLSPPQDLFDIWYPIKPYEIKGMFPPNGSAKGPDGVSVPELKKIPLKWLALILNLFMFCGSLPDRLCASRTIFIQKVKGAQNPKDFRPITISSVLTRLFHKMLAERLKIVPLDLRQRGFRDADGCAENIVLFDMLLRYHQEKKRKLFFALLDMAKAFDTVSHNTIREVLTHKGLPSGFIDYFMHAYKSSYTILQHNGWESGKIFPKCGVKQGDPLSPVIFNFVIDEMLRLLPEEIGVSLDSLRVNAMAFADDINLVASTESGLQILIDTATTFLGECGLKANPAKCHTGALKTVPKEKRTYMDPTCRFRIGKAIIPSLNGIEEWTYLGVTFNSKGRTFADARPKLAKQLELLSAAPLKPQQRMYALRTVIIPGLLYRGALGFSTAGYLKAIDRLLRHYCRRWLHLPHDCPKAYFHADVKYGGLGVCAISLKAMVDRVVRLEKLRSSQVIHGTEGSRYLDREISCAESRLKDTDGRITRCKEMLDDRWARLLYESFDGRPLVKSVDTAGQHRWIGEPTRFLKGGDFVNCAKARINALPTAARTSRGRLKENHCRAGCPDVETLNHVVQFCHRTHGMRIKRHNAVVEYVAKKLEKKNFAVFREPKFKHGDSILKPDLVVAKDNLAQIIDAQIIGETRDMNLAHKDKIRKYGSSEEVADQIVHLTGCENIGGTSITLNLRGVWGPESAKDLLERKLIVKQDVKVISTRVLVGAIAGWRMFMESTSSKKKATAGAKFTTRDMRRWFRKERTGIG

SEQ ID NO: 22511 - protein, 1202 aa, Paelopatides confundens
MVVLPFKEFVFYRSRLRYNIRIDGKYINNWNHLNHLFKIPEPISAPCTIVYKKKTDFLIVLPRDLIQCNVCRLSYSSYIDFSSHTKTHIETFSFACKECRKVFKSPHGFECHYPKCPDRAPPIYHHITTTDSHTEHNASEIATNVESVAELTNNSTPASMQVLETEQNVVEIATIVESITNEFTCMECGISFASKIGLGQHERHKHPLLRNSKRIKQREKDRDAKRAKRRAVREEPVIDTPIQSTHIVTSRDPGRTGALWSKADIIKLTELNLKFEGARNINILIARELVSKTNKQISDKRRGLNLITRASPVSVRRVTRSRVSASLRGPSGRPDKVPFLNNLVGVNIPPEFERPYLNFLEGSCQELIVKIKNYFDELIAECEGGSQDRRGRGVVKPKRVNRTRSAGKAKNFLHTQRLYYSSRKKLVKELLDGKGDAECPIDIKEIESVYAERFGSVSNADIDLSNYPLPPNPTNNVDLMMPLSHLEIKSALNSFSKDTATGPDGIDVPSLIKYASSEKLYIIFNSWFFSGSLPVKFKENRSILIPKGKKDLHDIGNWRPITMSSIISRLYLKIIANRLLHCVSLNPRQRGFINAAGCLENTAILEAIITRCKKEGQFLGVALLDLAKAFDTVSHAHLIVGLRRFGIHEHFIKIVCDLYQGATTSFKTAQGETKQIKILRGVKQGDPLSPILFNIAMDPLFAMLESDPKLGYYIDRGNSIASLAYADDTALVSSTFVGLQSLINITTAFCDSTGLKLNIKKCVCFKITSLSRKSFTVNEGKEWFIGDSKVPWLGPEEKSKYLGKYICPWTTPFGEADLDGVTNELISYCKRIEIAHLKPRQRVCILKTFIVPRIKYGLFMAKPNFVALDSLDSIIRDWTRHWLHLPACINIHFMYTSCRAGGLGLPCLKFEYITHLVQQMQVCITSSDDTIAKLANRFGFGARVGELLTLHDIKTFTKGIINNKWWRKMQLCAWEDLPSQGLGVVSFSRNPLFNYWLGHETWLSDHEYIAALLVRTNTYPTREACGRGRVGTDILCRHCRASPETLGHISGFCPLFTRNRIVRHNKVVNSIFIKARKAGFNIMVEPKLHHDGTNLKPDLIIYKGNDSYIIDPTIIWDKSVSILNLEYDKKYKKYECLTMQVMNITKTASCIVLPLVIGARGSWLPKNNPIIRILGLTKGDIKDMCLKTLTGTLKLLQVFMDK

SEQ ID NO: 22512 - protein, 1077 aa, Anneissia japonica
MSEVCGQICNTHDTDSLTLSYPTDTAIFTCRHCDKILSGHPVIFKHLRDHGLSIDYSCTKCHAKFESIRSISCHFPKCNSITTPLTKEFKCSSCIKSFSTFSGLRLHMKRSHISEFMLTEQDESRKKDIWSPEDIMIMAKYEASLHPNIKFIKALKETLPNRSLEAIKYQRRKQSYKDYVTAFKAEDIPATDTSIDNDIITTNDSDDVRMIEYLDEYTHSTRGRNTSQLQLHLLEIIKCVKDNNSPDYSNILKIIGRKKIRNSINKSINNPIINNNLSKRKRKKILYPIQQELYRKNKRNLARNLLDGTTISNEGPDPAIAFTHFTKVFSKEPQEDNMPIPKKMLYNEKDTQNLSQPISIQEVTTALKSMKRDGSAGPDGIFYKDLSRIRPYDLATLFTIWFMKGTIPDALRTNYTNLLPKGEPIKDDPSKWRPITIGSYILRLYTKILNYRLKDAISINSKQKAFIPTDGCLENTTLLESLITNYRNNNRSHYIMFLDLAKAFDSIHHDTIDRALKRHNVPNHFRLVVKDLYTRITTQLRLPNSLSDPIPIRCGVKQGCPLSPLLFNLVLDELLDNLPSHIGMNCFNYKHNAFAFADDLVLLAESKEGLAKLLQCCQVFFHDRHMSINANKSAVFGSTVTHRIGNRKITKLLPITTSTWKVNDQTIPVIPPGETTKYLGQKFGYTGKANKNIIKSTQRWLNGVQEAFLKPHQKIDIIRQFVLPRLYHNFSNHTYESSALNRLSCCINKCVRKILHLPDTCSKNFLTLPTALGGIGLPDINLTANKLRHGAFMRLAKSSDPIIKAMYASDHIQKQLRKVAKAINLPTIEADKPMVQAHISEVLTEKQQAFALTKHGQGCETFDHPASTAWINKPKILTGSYYTKAIALKGKTLPCRGTLAFMGGITACRHCNAPIESISHILQRCPHMLKARIERHNKTCKQLIRFLEKKYDSIITEPLIHTGTGNYRPDIVAIDRKNSHVYIIDVAIPFEAHRSTLADADRVKSVKYGTTVILKSIAQLYDVSSASAEGCIIGARGAILSTKRLYGGTKLSKNQLGILAEIAIKGSIHIFNSFMRR

SEQ ID NO: 22513 - protein, 1324 aa, Hasora badra
MKKRNKNHYNLRSLSSAQSSTRSIQSDDNSSSSFRSLFESPSSSPRFFENSATSRSTTPTSMSGNVVQEAIATVSVPASDIKRARKKWSDNMNIFILRTYYEVTNMEKDLRTYLTPLHAKFIEQFPEMEISRQRLGDQRRAIIRSNLLPAQTINQIRQEVAAQLQISTESQDTIQTPQDQVIQTGPNNSRMRWSNEINEFIVRNYFKITKLETNRSAYRQILMQATINKYPHLSHLSEQRISDQCRAIINNRMVTEQRLQEIKDEVMIELNSLESSSPHPQSDSFYLAPDTIQSNLTTEAITDTTDSIIEAQNPNINKHPNTPNHVADIEDTFLKALNDYKDVDPTKRPFIPKQRSSKNLAIVTHYINTTLIPKHLTEDGDYALTQSVLYAAAFTAATYNGAKINIPTNKSKIHNAPKWQKRLQNRIQDLRAKVSRLTEYMKGNPSKKLQLHIEEIKTYYKFHAQHENENSGMSQFLDTLKQKLNLLSNRLRRYKLTTLRKKQNKQFTNNQKHFYRTLGLPHSNTQLDTDIPTPAELHSFWSTIWANPKQHIEGDWINKEKNHVKDVPEMEIEEISIDLLKSVIGRTHNWKATGTDKIHNYWYKKFTTLHPHLLTHINKFIRSPETLPLYITKGVTYMLPKDKSDTKNPAKYRPITCLQNIYKIITACISELIYKHIEINNILSEQQKGCRKHSQGCREQLTIDAVTTKQALVNKRNIYTMYVDYKKAFDSVPHSWLLYVLEHYKIHPSLITFLKNAMMSWRTNLKLQQSETEEIVIKRGIFQGDSLSPLWFCLALNPLSNLLNQSMKGFKIKYNNSSFTLSHLMYMDDVKLYGSNLNEIQMLAKITEKFSSDIQMEFGIDKCRIQSIHRGILQHNTYNTSSGEIIEPVDCENGYKYLGYEQSKQLHHKKVKETLTNKFKQRLHNILNTNLNSKNIIKAINTFAISTLTYSFGIINWSQTDLQKLQRILNTTMTKYRKHHPRSCTQRLTLPNVEGGRGLIHIQNLHNKQITTLRTFFHNLAQHSPLHKAVTQADLKHTPLNLHDYSTQKNQTLIQTQQKLDTWLQKSLHGRHRRDLINPHVDKHASNEWLKRGELFPETEGFMVAIQDQVIETRNYKKFIIQDRTLVSDQCRHCHSCSETIQHITGACRSITQTDYKHRHDQIAAIIHQYLAFKYKLIKEQTPYYKYTPQSVIDTTNYKLYWDRTILTDKTVHHNRPDITFHDKRNKSVYLIDIAVPNTHNLVSTHTEKMTKYVDLSIELKSQWRVNTVKTVPIIISSTGVIPRTLHDSLSTLNIHRLTYILLQKAVIMNTCRIVRKFLSIQEF

SEQ ID NO: 22514 - protein, 1372 aa, Pseudonascus paulliniae
MEYTHNFRNFRNENVNNNRDSAVETRMYNLRPLPSRRRETSKTNATCSVRQSDDKAEEGCQTPTCHKRQDAITANSYSSSISSDHSLFESPRSSPHSFESVPISRSVSVTSMSVDVVQEANAREPAPATGTKRTRKKWNTEMNIFILRTYYEITKMETDVRTYLIPLHNKFIERFPDMQVSRQRLGDQRRAIERNRLLPLHTIDQIKEEVRALIHSLVNLNHTPKIDQIICTGVNTRMRWNNEINEFIVRNYFVITSLETNLTAYRQPLKLALITKYPHLSHLSEQRIADQYRAIVNNKMIKDNRLQEIKDEVLIELNRKEQERLHVQSPSPLSLEAISTQTHVFTSTSNTEINLQNDAITERDQHNHSNFNAVNDIEIEKIFVKALNDFITVEPTQRPYIPVQKPSKKLGTITQYVNSTLLPKYMTDVSDFKQTETILYSAAFTVCTYNGAKILPTLGNTPRSQTIPKWQGRIQNRIQDLRVKIGRLTEYVRGNKSKKLITYVEKIKLEYKIHSKYEDENNNLAQFMDTLKQKLNVLSNRLRRYKQTSLRKYQNKQFINNEKLFYRALDTSRHNKEINLDTPTPEQLHTYWSNVWTNTKIHKEGEWIKKDKKTVKNIPEMQFDNIDMTLLKSVITKTHSWKATGSDKIHNYWFKKFTYIHPHLLAHINNFIRNPDTLPSYITKGLTYMIPKDKSDSINPAKYRPITCLQNIYKIITACITELIHKHIDTNNILAEQQKGCRRWSQGCKEQLTIDAVAMKQALTRKRNIYTMYIDYKKAYDTIPHSWLIYILEHYKIHPALIQFLKNAMANWSTALKLNQVETAQINIRRGIFQGDSLSPLWFCLALNPLSTLLNSSNIGYKIRHSQTSYTLSHLLYMDDIKLYGSNLKQIHKLADITQSFSADIHMEFGIDKCKIQSVHRGILEHHSYYTATGEEVEPLDSDNGYKYLGYQQSRQIHHKKTKQTLTNKFKTRLHKILNTALNSKNTFKAINTYAVPLLTYSFGIIKWSQTDLKKLQRIINTSLTKYRKHHPRSCTQRLTLPKLEGGRGLIDLQNLHNKQVMTLRSFFHTRAQQSPLHKAVIHADIKYTPLNLHDMSIQKTITEPQQKLDEWLQKSLHGRHRRDLINPHIDKHASNTWLQRGELFPETEGFMLAIQDQVIETRNYKKFIIRDNTLVSDQCRHCHGASETIQHITGACRSISQTDYKHRHDQVAAIIHQYLGFKYKLIKEKISYYKYTPQAVIESNKFKLYWDRTILTDRTVHHNRPDITLHDKINKIVYLIDVAIPNTHNLTSTYTDKITKYTDLSIELKSQWKVKTVKTVPIVISATGVVPRTLQTSLKTLNIHYFTYILIQKAAIINTCRIVRKFLSLDS

SEQ ID NO: 22515 - protein, 1368 aa, Chiomara georgina
MKKLNTYFNVNKFDCSEETRRYNLRSGGYRKETEIVNSSPVVNLENNLENALIDNNSNCSSPYSSIHSLFPSPCSSPHSFDISSTSRSTTASPRSVDVVQEAIADNPASATGSKCVRKKWSDDMNIFILRTYYEETKIGTDHSTYLKALHTKFIEQFPEMNVSRQRVGDQRRAIERNKLLPTHKIEQIRKEIENKLKSNIILPSNHTSTNQTQTLDQSFNTSQLGTRMRWSPEINEFIVRNYYKITNLENNRSGYRQQLHQVVITQYPHLAHLSEQRISDQCRAIIHNKMLPDEKLQQIKDEIVIEQNTLCNYLDTEVESQISNTIIEDTNTDTMIEAEHCITQQPSWNMHDKTISNNLIRDTFTNALDKFKSTKPSDRPFIPKQKSSKNLAIITSFININLLPLYLTDDSDFETVQLIMYTAAYTASTCNGVKIHTNNENKHISPTRFIPKWQQRLQNRIENLRVKIGKLTEFIRGNSSHRLRKQVEDIKKQYRTHTQFDSENCNASQFLDTLKQKLNLLANRLRRYKQTTLRKTQNAQFSNNEKLFYRTLENKHTSLTETNIPTTDQLHEFWTKIWNDTKEHTVGEWMKVEDEIVTNVSEMHYEKIDIDLLKSVISKTRNWTAPGSDKLHNYWYKKYTNIHTHLLRHINNFIQNPEALPNYVMKGITYMLPKDPSDTKNPAKYRPITCLQNIYKIITSCINELIYKHTDTNKILAEQQKGCRRNSKGCKEQLIIDTVVSKQALSKKRNIYTMYVDYKKAFDSVPHSWLIDVLKNYKIHQSLIEFLKICMSKWSTVLRLRHLETNEIEIRRGIFQGDSLSPLWFCLALNPLSNLLNQSKKGFKIHYSNTSYRLSHLMYMDDIKLYATNLKDLNKLADITQQFSSDIQMEFGIDKCRIQSVHRGKLELNTFQIGNGDLIEPVDSADGYKYLGYAQTRQLHYKQIKQTLITKFRSRLRKILHTHLNSRNTIKSINTFAIPTLTYSFGIISWSQNDLKKLQRIINTTMTKYRKHHPRSCIQRLTLPKSEGGRGLIDIRNLHNSQITSLRNFFHYKSEQSVLHSAVVEADKKYTPLNLNNNATQNNEHITPHQQKHNDWIQKSLHGRHCKDLHHPNIDKEASNYWLQKGELFPETEGFMLAIQDQVIETRNYRKFIIRDKNLNTDQCRHCHSSSETIQHITGACKSITQTDYKHRHDQVASIIHQSIARKYKLITEYTPYYKYKPQAVIDTEKYKMYWDRTILTDKTVHHNRPDITLHDKINKTVYLIDIAVPNTHNLTSTHTEKLTKYTDLSIEIKSQWRVHKVKTIPIVISSTGIVPHSLHDSIRTLDIPRTTYTLLQKAVIMNTYRIVRKILNYYSRNFLHDAVLVYQ

SEQ ID NO: 22516 - protein, 1294 aa, Choaspes benjaminii
MRLRSTNTLPQAGTRNGESRPEQNVSGSPTYSGGGTVSLQPARSATVADRKTHAQTRNTQLHSSSSKTIRNKSITTNNHTINLKTSSTYSSSHSLFESSNSSPHLFGNHPIPTSSSVSPMAIDVVQGAIAHNPTPAIVTTGARKKWSEDMNIFILRTYYEITKMETDLRTYLTTLHNKFTERFPNMNVSRQRVGDQRRAIVRNKLIPDQKIHEIREDVAKQLQNLSEDTPNTPILRQDQLLETGLHNTRMRWSTEINEFIIRSFYTITHLESNRSSYRQPLKQALQNKYPHLSHLSEQRISDQCRAIINNKMISETRIQEIKDEVTIELNNIENQNSQQSQINTNLSHIETIKLNYPQPINTEINTTTETESRILLQHNIHPKNASDIENTFQKAFNDYKLVEPTNRPFIPKQRPSKNLAIVTQFINMTILPKYLTQDSDFPTTQTIIYAAAFTAATCNGSKIHLTSNDKPKPKANPRWQQRILKRMQDLRVKIGRLTEYMRGNTSPKLKSHIDEIKKQYKIHTQHETENSNLSQFMDTLKQKLNLISNRLRRYKKTTERKYQNTQFTRNEKLFYRTLGLPHEETQTHSNTLSFPTADKLHEYWSSVWTTPVQHTESNCIELEKETVKGVLEMQFDEINIDLLQTVIARTHSWKAPGTDRLHNYWYKKFTHVHPYLLKHINNFIKSPETLPPYITKGITYMIPKDDTNTGNPGKYRPITCLQNIYKIITACISELIYQHTEKNNILAEQQKGCRKRSQGCKEQLTIDAVATKQAFVRKRNIYTMYIDYKKAFDSVPHSWLLYILNHYKIHPTLIEFLKNSMTTWSTVLKLKDFQTDEIIIRRGIFQGDSLSPLWFCLALNPLSNILNNSNKGYKIHYGNSSYTLSHLMYMDDIKLYASSLNHIHDLADITQSFSSNIQMEFGIDKCRIQSVQRGKLKQNTYQTNSGHIVEPVDRENGYKYLGYQQSRQIHHKQIKEELVNKFKARLHKILNTHLNARNTTKALNTFAISILTYSFGIINWSQTDLIKLQRIMNTNMTKHRKHHPRTCSQRLTLPKIEGGRGLIDIRNMHNKQITILRTFFHTRAQQSSLHNAITQADVKYTPLNLHDNSTQINQIISLHQQKLNDWLQKSLHGRHRRDLINPNVDKQASNEWLKRGELFPETEGFMLAIQDQVIETRNYRKYIIQDKTQVSDQCRHCHSSSETIQHITGACRSITQTDYKHRHNQVAAIIHQYLAYKYKLITDKTPYYKYTPQTVIDTEYFRLYWDRTILTDKTIHHNRPDITLYDKNTRACSH

SEQ ID NO: 22517 - protein, 1225 aa, Helias cama
MNIFILRTYYEETKIGTDHSTYLMPLHRKFIEKFPEMNVSKQRVGDQRRAIERNKLIPTHKMEQIRQEVENKLKSNIILPSISNETETINQNLSTGRLGTRMRWSSEINEFIVRNYYKITNLENDRSAYRQPLFQVVVTQYPHLAHLSEQRISDQCRAIIYNKMLPEEKLQQIKDEIIIELNTHSNYSHIEAAPQTPHTTIGNTNTDTIVEIGYSITQNLIQNTHDKTINNDMIQDTFNKALNNFKSIKPSDRPFIPKQKSNKNLAIITSFLNTNVLPLYLTEDSDFETVQLILYAAAYTASICNGVKIRSNNENRHNSYTRSIPKWQQRLQNRIENLRVKIGKLTEFIKGNNSYRLRKQVEDIKKQYKTHTQFDGENSNDSQFLDTLKQKLNLLANRLRRYKQTTLRKTQNAQFSNNEKYFYRTLEHQQTSLTETNIPTSDQLHTFWSKIWNGAKEHTIGDWMKTEEKIVKDVPDMQFEKVEIDLLKNVINKTRNWTAPGTDKLHNYWYKKYTNIHKHLLRHINKFIRNPDVLPNYVTNGVTYMLPKDSSDTKNPAKYRPITCLQNIYKIITSCINELIYRHTNTNKILTEQQKGCRRYSQGCKEQLIIDTVVSKQALSKKRNIYTMYVDYKKAFDSVPHSWLIYILKNYKIHPLLINFLEKCMNKWSTVLKLRHLETNEIEIRRGIFQGDSLSPLWFCLALNPLSNLLNQSKKGFKIKDKNTSYSLSHLMYMDDIKLYATNLEDLYKLADITQTFSTDIQMEFGIDKCRIQSVNRGKLQRNTFQTGNGDIIEPVDSNDGYKYLGYVQTRQIHYKEIKQTLINKFRYRLRKILQTHLNSKNTIKSINTFAVPILTYSFGIILWSQSDLKKLQRIINTTMTKYRKHHPRSCIQRLTLTNIEGGRGLIDIRNLHNSQITSLRNFFHTKAQESVLHSAVVKADIKYTPLNLNNNATQTNEHITPPQQKLNEWIQKSLHGRHRKDLLNPNIDKEASNYWLQKGELFPETVGFMLAIQDQVIETRNYRKFIIRDKTLTTDQCRHCHSSSETIQHITGACKSITQTDYKHRHDQVASIIHQSIARKYKLITDYTPYYKYKPQAVIDTDKYKLYWDRTILTDKTVHHNRPDITLHDKVNKTVYLIDIAVPNTHNLDSTQTDKLTKYTDLSIEVKSQWRVQKVKTVPILISSTGIIPHTLHDSLRTLDIPRTTYILLQQAVILHTCRIVRKF

SEQ ID NO: 22518 - protein, 1385 aa, Sarmientola browni
MESMNNYKKSKRINNCHRDSAVKTRTYNLRPLPGGKYARRETMSTNTAGLARQSDNEEIHRQTLAMHKYHDFVTINSVASSPMSTDHSLFESPRSSPHSFEILPTPRSETVTPMSVDVVQEAKAKEPAPATAIKRTRKKWSVEMNIFILRTYYDITKMETDTRTYLTPLHNKFIEQFPDMQVSRQRLGDQRRAIERNRLLPIHTINQIKEEVKAQIRLAEPSTHTSGIDQIISIGLNTTRMRWNNEINEFIVRSYLTITNLETNLTSYRQSLKHALITKYPHLSHLSEQRISDQYRAIINNKMIEDNRLEEIKDEVLIELNRIEQETSHLQSSSNPSLGIELTPVNTTTPPPTENNQINDESNQLIHDVSAETTNGYRTQFNFNTLNVTEIEEIFVKALNNFITFEPTQRPYIPIQKPSKKLAMITHYVNSILLPKYLIDVNEFSKLETIIYSAAFTVCTYNGAKIFTTLRTTPNSPNIPKWQRRLENRIQDLRVKIGRLTEYMRGNTSQKLNSHIEKIKLHYKIHSKHEGENTNLAQFMDTLKQKLNLLSNRLRRYKQTTLRKSQNKQFANNEKLFYRTLDTPQSNSQTNTDTPTSEQLYTYWSSIWTNSKNHTEGDWIKQDKKKVENLPEMQFEEIDIDLLKSVINKTHNWKATGSDRIHNYWFKKFTYIHPQLLTHINNFIRKPDTLPSYITKGLTYMLPKDKDDTKNPAKYRPITCLQNIYKIITACITELIYKHIEKNSILAEQQKGCRRMSQGCKEQLIIDAVATKQALTKKRNIYTMYVDYKKAFDSIPHSWLIYILEHYKIHSTLIQFLKNTMDNWSTTLKLNQVETAQINIRRGIFQGDSLSPLWFCLALNPLSTVLNGSNIGYKIKHNNTSHTLSHLLYMDDIKLYGSNIKEIHKLADITQSFSADINMEFGIDKCRIQSVHRGRLEYNSYYTFEGEKIEPVDDVNGYKYLGYHQSREIHHKTTKQILANKFKERLHKILKTALNSKNTIKAVNAYAVPLLTYSFGIISWSQTDLKKLQRIINTSMTKHRKHHPRSCTQRLTLPKLEGGRGLIDLHNLHNKQISTLRHFFHTRAQQSSLHKAVTQADIKYTPLNLHNNSTQKNQTIIEPKQKLDQWLQKSLHGRHRRDLINPHIDKQASNVWLKRGELFPETEGFMLAIQDQVIETRNYKKYIIRDNTLTSDQCRHCHSASETIQHITGACRSISQTDYKHRHDQVAAIIHQYLALKCKLIKEKNAYYKYTPQAVIESNNFKLYWDRTILTDKTIHHNRPDITLHDKTNKIVYLIDVAVPNTHNLTSTYTEKITKYTDLSIELKSQWKVKTVKTVPIIISATGVIPRSLHNSLDTLNIHYFTYILLQKAVIINTCRIVRKFLSLD

SEQ ID NO: 22519 - protein, 754 aa, Gorgopas trochilus
MEFEVVSLDLLKLVIKKTHNWKAPGSDKLHNYWYKRFTYIHTHLLKHINKFIEKPDTLPDYITKGITYMIPKDNTDTINPAKYRPITCLQNIYKIITACISDLIYKHTETNNILAEEQKGCRKNSQGCKEQLIIDTVASKQAFNKKRNIYTMYIDYKKAFDSIPHTWLIYILKAYKIHPKIINFLENSMLKWSTVLKLKHTETEKILIRRGIFQGDSLSPLWFCLALNPLSFLLNNSKAGFKIKHRNTFHILSHLIYMDDIKLYGSNLSEINKLAHITEQFSADIQMEFGIDKCRIQSINRGKLELNTYQTNNREIIEPVGCDEGYKYLGYAQSRQIHHKEIKQNLINKFRSRLHKILNTYLNSKNTIQAINTFAIPILTYSFGVINWSQSDLKKLQRIINTTMTKYRKHHPRSCSQRLTLPKHEGGRGLIDVQNLHNTQIVSLRTFFQKKGIDSTLHKMVIQADLKYTPLNLHDSSTQKNIVIIHSQQKLDEWLQKSLHGRHRRDLLNPHIDKVASNEWLKRGELFPETEGFMLAIQDQVIETANYRKFIIRDNNLTTDQCRHCHSSPETIQHITGACKSITQTDYKHRHDQVASIIHQYIALKHKILADYTPYYKYTPKAVIDTDEYKLYWDRTILTDKTIRHNRPDITFYDKKNQIVYLIDIAVPNTHNLITTHSEKMTKYADLSIEIKSQWKVQKVKTVPIILSSTGIIPHTLHDGLRTLNIHRSAYILLQKAAILNTCRLVRKFLSLEG

SEQ ID NO: 22520 - protein, 1366 aa, Erynnis brizo
MEKLNDINNIDCKKRSKVLDHTVEKRAYNLRPRSGGHRRNAEFPSRIFSRKKLVGLNDQHLPTTENIINSNPSSPISSTHSLFQSPSSSPHSFEDPPPSRSSTSSPMSIDVVREAIAVNPAPAIGTTCVRKKWSEDMNIFILRTYYEESKLGTDHSTYLIPLHKKFLNQFPDMNVSRQRIGDQRRAIERNKLLPTHKIKQIRQEVENKLKNNIGSLNNPTNTHSQTHFQSLNNEQIGTRMRWSSELNEFIVRSYYKITDLEKNRSAYRQPLYQAVITQYPHLAHLSEQRISDQCRAVIHNKMLSEEILQQIKDEIIMEQNTCSSYTNTQGESQRSHNTPENTGTILETDDTIAQLPIQNTDTMIINNDIIQSTFTEALENFKSVYPTDRPFIPKQKSSKNLAIITHFINTQLLPLYLTENSDFETVQLTLYCAAYTASTCNGVKIHINSENIHRSNTQLIPRWQQRLQNRIENLRVKIGRLTEYSRGNTSYKLTKQVEDIKKQYKTHAQYDTENSNISQFIDTLKQKLSVLANRLRRYKQTTLRKTQNAQFSNNEKHFYRTLEQKHTTLTDDNIPTTTQLHAFWSNIWGNNKDHTVGDWYKVEEEVVKDIPEMQFEKVSIDLLKYIINKTHNWSAPGTDKLQNYWYKKYTNTHTHLLRHINNFIQSPDTLPNYVTKGVTYMLPKDSSDTKNPAKYRPITCLQNLYKIITACISELIYRHTNTNNILTEQQKGCSKNSQGCKEQLIIDTVASKQAMSKKRNIYTMYVDYKKAFDSVPHSWLIQILKNYKIHPILVEFLEKCMVKWSTILKLKQLETNEIEIRRGIFQGDSLSPLWFCLALNPLSNILNHSNKGFKIKHSNTSYTLSHLMYMDDIKLYATNLKDLNKLADITQKFSEDIQMEFGIDKCRIQSVHRGKLELNTFQVGNGEIIEPVDCNDGYKYLGFAQTRQLHHKEIKQTLTKKFRDRLRKILNTHLNSNNTIKSINTFAVPILTYSFGIIMWSQNDLKKLQRIINTTMTKYRKHHPRSCSQRMTLPKPDGGRGIIDLRNLHNAQITSLRKFFHTKAQQSTLHNAVVQADFKHTTLNLQNSTTQKNEYITPPQQKFNEWIQKSLHGRHRKDLLNPHVDRLASNEWLKKGELFPETEGFMLAIQDQVIETRNYRKFIIRDKNLNTDQCRHCHSSSETIQHITGACKSITQTDYKHRHDQVAAIIHQYIARKYKLITNYTPYYKYKPQEVIDTDKYKIYWDRTILTDKTVHHNRPDIVLHDKINKTVYLIDIAVPNTHNLISTHTEKLTKYFDLSIVIKSQWKVQKVKTVPIIISSTGIIPHTLHDSLRALSIPRTTYILLQKAVIMNTCRIVRKFLAIEE

SEQ ID NO: 22521 - protein, 1412 aa, Oechydrus chersis
MHLRKRQLPQAGTLTGESRPEPTGSGCPSYSGGGNASHTTVQTRSVTADKKLASNSLTSPVSSSSLTFKSKYNLRSITRNTRNMKTQINAGQVITSPHRQTTYPTHSPTQRHSNQSSPISSNHSLFQSPSSSPYSFENLSPTRSTTISPLSADVVQEAIADKPVPAAANICARKKWSKEMNIFILCTYFKETKMETDLRTYLIALHKKFTERFPNMLVSRQRIGDQRRAIMRNGLLPKDTINQIRQDVAAELQINSQTSINTHDTQKDQIVTTTQVNPRMRWSHEINEFIVRNYYKITKLETDKSAYRQLLLQTVIAEYPHLSHLSEQRISDQCRAVIYNKMISQEKLQEIRDEVTVELNRRENYIPQSNNSYSTQTQDMHERNTYNTNKTHMTSNLEISNTQHNTQSLTIGNSNKINNTFKRAVNDFRYIEPTQRPHIPKQKPSKYLSNIIHYINNNILPKHLKYDSNFAEIELTLYCAAYTACSCNGARIYDINRENTPRSKPIPKWQQRLQCRIEDLRAKIGKITEYARGNPSPRLRRHVEEIKKHHKTHAQFETENSDLTEFLDTLKQKLNLLSNRLRRYKQTTLRKTQNMKFSNNEKLFYRTLENQSNNSINTNIPSSDQLHKFWSNIWSNPIDHKDGTWCSTDKKNVKSISEMQFDEISLDLLKSIIARTHNWKAPGSDKIHNYWYKKFTSIHPHLLRHINIFIQSPDTLPTYITKGITLLLPKDSSDTLNPAKYRPITCLQNVYKIITACISELIYKHTNSNTILAEQQKGSRRSSQGCKEQLIIDTVASKQAQSKKRNIYTMFIDYKKAFDSVPHSWLLQVLHNYKIHPTIIQFLKSTMFKWSTILKLKEVETEEIMIRRGIFQGDSLSPLWFCLAINPLSNYLNDSKKGFKIMYDNTSFTLSHLMFMDDIKLYGSSVKEINKLADMTQEFSADIRMEFGIDKCKIQSIHRGKLEFNSYRTVDGEVMEPVDCVNGYKYLGYEQTRQIHYKQIKKKITTSFTERLHKILNTHLNSRNTTKAINTYAVPILTYSFGIINWSQSDLKKLQRIINTSMTKHRKHHPRSCSQRLTLPKSEGGRGIIDIRNLHNRQITSLRSFFHSKALQSSLHYAITQSDIKCTPLNLHSKVTQKNQNIVYPQQKFDEWLQKSLHGRHRRDLINPHVDKLASNEWLKRGELFPETEGFMLAIQDQVIETGNYRKFIIRDKTLVTDQCRHCHSSSETIQHITGACRSITQTEYKHRHNQVAAIIHQYLAFKHKLITEHIAYYKYKPQTVIDTEEYKLYWDRTILTDKTIHHNRPDITFYDKKNKIVYLIDIAIPNTHNLTSTHTDKITKYKDLAIEIKSQWKVQKVKTVPIVISATGIIPHTLHDSLRTLNIHRLAYILLQKATIINTCRIVRKFLSIEE

SEQ ID NO: 22522 - protein, 965 aa, Spialia phlomidis
MICKEKLQQIKDEIALEVNAEETYITDTINITNLTEENITTSQNYSTQHNIQNIEVIDEEAIKSTFTSALHDFKLIEPTERDYIPKQKSSRNLANITNFINTKLLPLFLTENSDFKTIQLTLYCAAYTASIHNGTKINSNSDKTLSVRTVPKWQLRMQRRVQNLRAKIGKLTEFIRGNTSQKLKRQIEDIKQQYKIHAQFENKNCDLSEFLDTLKQKLNVVTNRLRRYNKTTLRKRQNTQFINNEKLFYRNLDTQHNSNSTDNSSPTPEQLHTFWSNIWEDAQEHKEGKWCNIAFEKDISDMQFETLSLDLLKSVISRTHNWKAPGSDKLHNYWYKRFTYLHPHLLKHINNFIQNPDSLPDYITKGITYMLPKDNTDTINPSKYRPITCLQNIYKIITSCISELIYKHTESNNILAEEQKGCRKNSQGCKEQLIIDTVASKQALSKKRNIYTMYIDYRKAFDSIPHTWLLYVLQAYKIHPKIIHFLKNSMLKWSTVLKLNQLETEKIMIRRGIFQGDSLSPLWFCLALNPLSVLLNSTQAGFKIKHNNASHTLSHLIYMDDIKLYGSNLSEITKLATITEQFSEDIRMEFGIDKCRIQSIKRGKIEFNSYQTNNDERIEPVEPNEGYKYLGYVQTRQIHYKEIKQNLINKFKNRLHKILHTYLNSKNTIKAINSYAVPILTYSFGVVHWSQTDLQKLQRIINTTMTKHRKHHPRSCTQRLTLPRHEGGRGLIDIKNLHNTQITLLKSFFKDKALNSTLHHTVVNADDKYTPLNLHDSSTQKNQNITHPQQKIDEWLQKSLHGRHRLDLINPCIDKLASNEWLKKGELFPETEGFMMAIQDQVIETANYRKFIIRDTNLKTDQCRHCHCSPETIQHITGACKSITQTDYKHRHDQVASIIHQYIALKHKLIADYTPYYKYNPKAVIDTNEYKLYWDRTILTDKTIYHNRPDITLHDKKNQTVYLPN

SEQ ID NO: 22523 - protein, 1345 aa, Dalla costala
MRLRSRNIVPQAGTSSGESRPEPAGSGSPTYSGEGTTLLLLGHSSSQDANTFTANLNLSSPISSTHSLFQSPSSSPHSFENPPTSRSSTISPMSVDVVQEAFAREPAPATATKCARKKWSVEMNIFILRTYYEVTKMETDLSNYLTLLHNKFIDRFPDMKVSRQRVGDQRRAIERNKLLPSQTYNQIKEDVKTQLNSGSLNNTPIQLHTNSTSLNTSRMRWSNEINECIIRSYFKITRLETNITAYRSQLRSAVIAKYPHLSHVSEQRISDQYRAIVTNKMIKEDMLQQIKDEVAIELNRMTPDSNTILEITSSIQIQDKADSVLESHCSLTQTIDSHSNNTLFVDDAQIEDIFVKALTNFKTVDPTQRPYIPKQKPSKKLATITNFVNTTLLPKHLTDASDFNTFQTILYCAAFTVCTYNGTQIALTHENITRTQGIPKWQRRLQNRIQELRTKIGRLTEYMRGNTSKKLSIHIEKIQSHYRTHSKYEPDNNNLMHFMDTLKQKLNLLANRLRRYKLTTLRKTQNRQFTNNEKVFYRALNNSQHNSQKHIDTPTTEELHKYWSNIWTNPKIHTEGEWIKQDQELVKNVTEMPFEEIDMELLKLVIAKTHNWKATGSDKIHNYWFKKLTNIHPYLFKYINNFIKNPDTLPHYITKGLTYMLPKDDQDTKNPAKYRPITCLQNIYKIITACITELINRHTETHNILAEQQKGCRRRSQGCKEQLTIDAIATKQAVTRRRNIYTMFIDYKKAYDSMPHSWLLYTLEHYKIHPTLIQFLKSTMANWSTTLKIKHLETDEISIRRGIFQGDSLSPLWFCLALNPLSTVLNNSNKGYKINYNKTSYTLSHLMYMDDIKLYGSNLNDIHRLADITQSFSTDIQMEFGIDKCRMQSVHRGKLENNTYSTTTGEEIEPVDCDSGYKYLGYQQSRQIHHKEIKQLLKTKFKERLHKILNSALNSKNTIKAINTFAIPYLTYSFGIIKWSQTDLKTLQRLINTSMTKHRKHHPRSCTQRLTLPRIVGGRGLIDIQNLHNKQITTLRHFFFTKAQQSFLHKAIIPSDIKYTPLNLHDNSLQRNETLIDPKQKFNDWLQKSLHGRHYRDLINPLVDKQASNAWLKRGELFPETEGFMLAIQDQVVETRNYKKFIIRDNTLVTDQCRHCHAASETIQHITGACRSIAQTDYKHRHDQVAAIIHQHLAFKSQLINEKTAYYKYTPQTVLDSDNFKIYWDRTILTDKTIHHNRPDITFHDKHNKIVYLIDIAIPNTHNLTSSYTEKITKYTDLSIELKSQWRVKTVKTVPIVISATGVIPLTLQNSLKVLNIHPLSYTLLQKAVVINTCRIVRKFLAMDE

SEQ ID NO: 22524 - protein, 1330 aa, Signeta flammeata
MKKTNTQQENFRITRSYNLRSLAGRRETRIGSYKRALSQNLARGYHQDNTAMNSNLSSPISSTHSLFQSPSSSPHSFEIPSTSRSITASPMSVDVVQEAFADNPAPAAATKCARKKWSEEMNIFILRTYYEQTNMESDISNYLIPLHSKFIEKFPHMQVSRQRVGDQRRAIERNRLLPIHTINQIRQNVQNSTALPTSTQPPTSRMRWSREINEFIVRTYYKITNLETNKSAYRQPLFDAVITKYPHLSHLSEQRISDQCRAVICNKMLSDQKLQEIRDEVLIESNTIENINAHKQSSQGADTESVHLNTVNNTSYNNIQNENQFNFIAKHETEIKNTFTKAIDNFKNIEPTKRPHIPKQKSSRKLALITHFININLLPKYLREESDFATFELILYCAAYTAATCNGARILTTNKNSPIRVNNIPKWQRRLQDRIDGVRAKIGKLTEYMRGNASYRLRKQVEEIKNQYRTHAQHENNNSDISHFLDTLKQKLNLLANRLRRYKQTTLRKTQNAQFLYNEKQFYRVLENQKCDTSDINIPTSGELHTFWSSIWTNQKDHTEGSWCKEEEEILSNIPQMKFEEVSLELLKTIITRTHNWKATGTDKIHNYWYKKFTNIHTHLLRHINHFIHTPDSLPLYITKGITYMLPKDKTDTKNPAKYRPITCLQNIYKIITACLSELIYKHTESNNILAEQQKGCRKNSQGCKEQLIIDAVASKQAQSKKRNIYTMFIDFKKAFDSVPHSWLICILENYKIHPMLIQFLKNTMLHWTTVLKLKHLETEEIAIRRGIFQGDSLSPLWFCLALNPLSNLLNNSKIGFKIKYNNTSYTLSHLMYMDDIKLYGSNIKEINKLADITQKFSSDIKMEFGIDKCSIQSYHRGKLELNSYRTLNDEVIEPVDSHNGYKYLGYEQTRHIHHKEVKQNLIKKFKVRLQKILKTHLNARNTIKAINSFAVPILTYSFGVIRWSQSDLKNLQRVINTCMTKYRKHHPRSCTQRLTLSKAEGGRGLIDIQNLHNTLITSLRSFFHSKALQSSLHKAVAQADIKHTPLNLHDNSTQKNQNITQPQHKLDEWLQKSLHGRHRKDLINPHVDKHASNEWLRRGELFPETEGFMLAIQDQVIETANYRMHIIRDKALVTDQCRHCHSSSETIQHITGGCKSITQTDYKHRHDQIASIIHQYLAFKYKLITEHLAYYKYKPQAVIDTSEYKLYWDRTILTDKTIHHNRPDITFYDKKNKIVYLIDIAVPNTHNLIATHTQKMTKYADLSIEIKSQWKVQKVKTVPIIISSTGVVPNTLHDSLRTLNIHRLTYISLQKAAILNTCRIVRKFMSIED

SEQ ID NO: 22525 - protein, 1357 aa, Heliopetes ericetorum
MDLITNSENKTISNSLDSTVTARMYNLRPRTGRNQRIFKAEGLRRENNNSQVTIKDSENNAPNPNCSSPPSSSSSFSLFQTPRSSPQSYEDPTTSRSSTVTPLPAEVVQVAFARDTVPATGNKRARKKWSDAMNIFILRTYYELTKMETDTSTYLIPLHQKFTENFPDMHVGRQILGDQRRAIERNRLLPIKIINQIKEEVKTQLNIAQNTNITTETNPIYTMPNTTRMRWGNEINEFIIYSYFKITSVETNISGYRTQLRNAVISKYPHLAHLSEQRISDQHRAIIKNKMISDKILQEIKDKAILELNTTELEHSHETLHTQHDHIKVSHTQMPQHNFSILETRNINQQSKNQSSFNAIEIENIFTKALEEFGSVEDPSIRPYIPAQKPSKRLTAITHFVNTKLLPKYLTGATEFHVFENLIYCAAFTVCKSNGAKILSNSGQSKIKSTPKWEKRLQKRIQDLRSMIGRLTEYIRGNKGNKLTKHIEKIKQNYKIHSKHDQENTCLTQFMDTLKQKLNLLSNRLRRYKQTTIRKTQNLQFMNNEKLFYRKLHLLNNNDNTDKNIPTSSQLHTYWSNIWSNPIVHTEGEWMKPDKDLTQSITEMKFEKVDIDLLKNVIAKTHNWKATGSDKLHNYWFKKFTNIHPQLLAHINNFINNPNSLPPYITKGITYMIPKDKNDTNNPAKYRPITCLQNIYKIITACFTEIIHKHIETNHILAEQQKGCRRGSQGCKEQLTIDAIVSKQALVRKRNIYTMYIDYKKAYDSIPHSWLIYILEHYKIHPTLVYFLKITMSKWNTSLKLNSTQTESISIRRGIFQGDSLSPLWFCLALNPLSTALNNTKYGYKVKSNNITHTLTHLMYMDDIKLYGSNLNEINKLADITQAFSSHIQMEFGIDKCKMQSVRRGQVEHNSYMTLTGEEVESLDWDSGYKYLGYQQSRQIHHADTKKTLKDNFKCRLHKILKTSLNSKNTIKAINTFAIPYLTYSFGIIRWSQTDLKNLQRVINTTMTKHRKHHPRSCLQRLTLPKLEGGRGLIDIKNLHNTQITALRNFFHTRAQTSPLHTAIVQSDVKFTPLNLHDNCIQKNEPIIQIGQKVEDWLRKPLHGRHRRDLINPQIDKQASNAWLKRGELFPETEGFMLAIQDQVIETRNYRKFIIRDNTLITDQCRHCHNASETIQHITGACRSITQSDYKHRHDQVAAIVHQYLALKYNLVSEKTSYYKYKPLPVIDTDEFKLYWDRTILTDKTVHNNRPDITLHDKINGIVYLIDIAVPNTHNLSSTYTDKITKYTDLSIELKSQWKVKTVKTVPIIISATGVIPHTLKNSLITLNINNLTYLQLQKAAIMNTCRIVRKFLSIEQ

SEQ ID NO: 22526 - protein, 754 aa, Cycloglypha thrasibulus
MQFETVDIDLLKNVINKTRNWTAPGSDKLHNYWYKKCTSLHTHLHRHINNFINNPDELPNYFTKGVTYMLPKDPGDTKNPAKYRPITCLQNVYKIITSCINELIYRHTNTNNILAEQQKGCCRNSQGCKEQLIIDTVASKQALSKKRNIYTMYVDYKKAFDSVPHSWLIYILKNYKIHPILIDFLEKCMSNWSTVLKLRHLETNEIEIRRGIFQGDSLSPLWFCLALNPLSNLLNQSKTGFKIKYKNTSYSLSHLMYMDDIKLYATNLKDLNKLANITEKFSTDIQMEFGIDKCRIQSVYRGKLQRNTFQTRSGDIIEPVDSSDGYKYLGYVQTRQIHHKEIKQTLINKFRDRLRKILHTHLNSKNTIKSINTFAVPILTYSFGIISWSQNDLKKLQRIINTTMTKYRKHHPRSCIQRLTLPNAEGGCGLIDLRNLHNSQITSLRIFFHTKTQESVLHNAVVEADKKYTPLNLNNRAIQTNECITTSQQKHNEWIQKSLHGRHRKDLLHPNIDKEASNYWLQKGELFPETVGFMLAIQDQVIETRNYRKFIIRDKNLTTDQCRHCHSSSETIQHITGACKSITQTDYKHRHDQVASIIHQSIARKYKLITDYTPYYKYKPQAVIDTEKYKLYWDRTILTDKTVHHNRPDITLHDKINKTVYLIDIAVPNTHNLDSTQTEKLTKYTDLSIEVRSQWRAQRVKTVPILISSTGIIPHTLHDSLRILDIPRTTYTLMQKAVILNTCRIVRKFLSIEE

SEQ ID NO: 22527 - protein, 1358 aa, Camptopleura auxo
MKKCNNKFSLNKFLDNSEETRRYNLRSLSGGRRKDVDIASKSNFVGLDKKIENTLIEVNNNSNPSSPISSIHSLFPSPQSSPQSFEISSTSRSNTISPMSVDVVQEAIAENPAPAAGTKYVRKKWSDDMNIFILRTYYEESKVGTDHSTYLIPLHRKFIEKYPEMKVSRQRVGDQRRAIERNKLIPTHKIEQIRQEVKNKLKSNTILPSSSNQTETINKKLNAGQIGTRMRWSSEINEFIVRNYYKITNLENDRSAYRQPLFQVVVTQYPHLAHLSEQRISDQCRAIIHNKMLPEEKLQQIRDEIIIEQNTHNNYLHIEVEAQASHTIIENTNTDTIEVTEFSSTRNPTHNIHDTKINNDMIQDTFTKALVNFKPIKPSDRPFIPKQKSSKNLAIITNFINTNLIPLYLTEMSDFETVQLTLYAAAYTASICNGVKIHTNNENTHNSYTRSIPKWQQRLQNRIESLRVKIGKLTEFIRGNNSFRLRKQVEDIKHQYKTHTQFDSENSNVSQFLDTLKQKLNLLANRLRRYKQTTLRKTQNAQFANNEKLFYRTLEHQYTKLTETNIPTSDQLHTFWSNIWNGTKEHTVGDWVKTEQEIVKDVPDMQFEKVEIGLLKNVINKTRNWTAPGSDKLHNYWYKKYTNIHKHLLRHINNFITNPDVLPNYVTKGLTYMLPKDPSDTKNPAKYRPITCLQNIYKIITSCINELIYRHTNTNKILAEQQKGCRRNSQGCKEQLIIDTVVSKQALNKKRNIYTMYVDYKKAFDSVPHSWLIYILKNYKIHPLLLDFLEKCMSKWSTVLKLRHLETKEIEIRRGIFQGDSLSPLWFCLALNPLSNLLNQSKKGFKIKHNNTSYSLSHLMYMDDIKLYATNLKDLNKLADITQKFSTDIQMEFGIDKCRIQSVYRGKPERNTFQTESGDIIEPVDSSDGYKYLGYVQSRQIHYKEIKQTLINKFRDRLRKILHTHLNSKNTIKSINTFAVPILTYSFGIILWSQNDLKKLQRIINTTMTKSRKHHPRSCIQRLTLPKPEGGRGLIDLRNLHNSQITSLRNFFHTKAQESVLHNAVVEADNKYTPLNLNNSATQSNEFITPPQQKLNEWIQKSLHGRHRKDLLNPNIDKEASNYWLQKGELFPETEGFMLAIQDQVIETRNYRKFIIRDKHLITDQCRHCHSSSETIQHITGACKSITQTDYKHRHDQVASIIHQSIARKYKLITDYTPYYKYKPQPVIDTDKYKLYWDRTILTDKTVHHNRPDITLHDKIKKTVYLIDIAVPNTHNLHSTQTDKLTKYTDLSIEVKSQWRVQKVKTVPIIISSTGIVPRTLHDSLRTLDIPHTTYALLQKAVILNTCRIVRKFLSIEE

SEQ ID NO: 22528 - protein, 1370 aa, Heliopetes sublinea
MGWTDYFRALRGYNMDVKTNSKNKTISNNLDSTVTARMYNIRPRTGRNQRILKTGSMQRETNNLQANIKDSENNALNSNCSSPPSHSSSFSLFQTPRSSPQSYEDPTTSRSSTVTPLSADVVQVAIAKETVPATDNKRARKKWSDAMNMFILRTYYEITKMETDTSTYLIPLHNKFIEKFPDMYVGRQRLGDQRRAIERNRLLPITTINQIKEEVQIQLNTQNTNISTETNLIYTTPNTTRMRWGNEINEFIIYSYFKITSIETDISGYRTQLRNAVISKYPHLAHLSEQRISDQHRAIIKNKMISDKRFQEIKDKAIIELNTAELEHSHEVLHTQNDPIEVSHTQMPPYNISMLETHNVNQQLYNQSSLNAIEIENIFTKALEEFGSIEDPSVRPYIPAQKPSRRLTAITHFVNTKLLPKYLTDAKEFHVFENVLYCAAFTVCKSNGAKIISNPGQPKIKPIPRWEKRLQKRIQDLRSMIGRLTEYIRGNSGNKLTKHIEKIKRNYKIHSKHDQENTCLTQFMDTLKQKLNLLSNQLRRYKKTTIRKTQNLQFMNNEKLFYRKLHSLNNNENTEKNTPTSTQLYTYWSNIWSNPIAHTEGEWIKPDKDFAQSITQMKFEKVDIELLKKVISKTHNWKATGSDKLHNYWFKKFTNIHPQLLTHINEFINNPNTLPPYITKGITYMIPKDKNDTNNPAKYRPITCLQNIYKIITACFTEIIHRHIEVNHILAEEQKGCRRGSQGCKEQLTIDAIVSKQALVRKRNIYTMYVDYKKAYDSIPHSWLIYILDHYKIHPTLVNFLKITMSKWNTSLKLNSMLTEPISIRRGIFQGDSLSPLWFCLALNPLSTALNSTRYGYKVKNNNITHTLTHLMYMDDIKLYGSNLNELNKLADITQAFSSHINMEFGIDKCKMQSVRRGQVEHNSYVTLTGEEVESLDWDSGYKYLGYQQSRQIHHADTKKTLKDNFKCRLHKILNTSLNSKNTIKAINTFAISYLTYSFGIIRWSQTDLKNLQRVINTTMTKYRKHHPRSCLQRLTLPNLEGGRGLIDIKNLHNTQITSLRIFFHTRAQTSPLHTAIVQADIKFTPLNLHDNSTQKNETITQIGQKLDDWLRKPLHGRHRLDLINPQIDKQASNAWLKRGELFPETEGFMLGIQDQVIETRNYRKFIIKDNTLITDQCRHCHSSSETIQHITGACRSITQSDYKHRHDQVAAIIHQYLAHKYNLVSEKISYYKYKPLPVIDTDKFKLYWDRTILTDKTVHNNRPDITLHDKMNGTVYLIDIAVPNTHNLSSTYTDKITKYTDLSIELKSQWKVKTVKTVPIIISATGVIPHTLKNSLITLNINNLTYLQLQKAAIINTCRIVRKFLSLDQ

SEQ ID NO: 22529 - protein, 1382 aa, Quadrus cerialis
MRGSVEADYLFPLLIVGIKMKPKPKNIVKPTTSDSDPKIGRYNLRPLSGTRRRNVEVITENNMHLCGINNNNIEQSAAQITTPNSNLSSPISSTYSLFLSPSSSPHSFEVSSTSQSTATSPMSADVVQEADAEKPTPAAGTIRARKKWSTDMNIFIMRTYYEETNLETDTSTYLIQLHTKFIQKFPNMNVSKQRVGDQRRAIVRNKLLTTLQLEQIRQEASIQLKNHTNTLSDLPQPCNQILKSGSTARMRWSRELNEFIIRNYYKITHLESDRSAYRQPLFQIVVAHYPNLAHLSEQRISDQCRAIIYNKMIPEEKLQEIKDEITIELNQQHTHNISTETQTCNILDQELINVNTDMRNDIRNNLTPHRTQYIQDTYHNETTALTTFSKALTDFKTVEPTQRPYIPRQKTSKKLAIVTNFINLNILPSHLTEDSDYNTTQLVLYCAAYTASVCSGVKIYPTVNNIQRTQNIPKWQQRLQHRIDDLRVKIGRLTEYMRGNTSYKLKKYIEELKEHFKIHAQFETENQDLEQYLDTLKQKLNLLSNRLRRYKKTTLRKKQNAQFTNNEKLFYRTLESQHSSSLAVNNTADNNIPTSECLHAFWSNIWGNVQHHEDNGWCREEFVNEVQEMTYEKVSLDLLKSIINRTHNWKSPGSDKIHNYWYKRFTTIHSHLLKHINTFIQQPHTLPTYITKGVTYMLPKDNTDLGNPGKYRPITCLQNIYKIITACISELIYTHTESNNILTEQQKGCRRKSQGCKEQLIIDTVVSKQALHKKRNIYTMFIDYKKAFDSIPHSWLIQILKYYKVNPTIIQFLENTMVKWSTVLKLKQIETEEISIRRGIFQGDSLSPLWFCLALNPLSNMLNNSKNGYKIKLQNTSYSLSHLMYMDDIKLYGSSLNEVNKLADITQIFSADIHMEFGIDKCKIQSVKRGKLEFNSYKTMSGDVIEPVDCIHGYKYLGYAQTTSIHQKEIKQNLINKFSYRLHKILNTHLNARNTTKAINTFAVPILTYSFGVISWSQSDLKKLQRLVNTTMTKYRKHHPRSCSQRLTLSKTEGGRGLIDIQNLHNTQITSLKTFFHAKAPQSTLHKAIVHADIRYTPLHLNNSSTQKNENITHPHLKINEWLQKSLHGRHRRDLVNPHVDKEASNEWLKRGELFPETEGFMLAIQDQVIETANYRKYIIRDKNLLTDQCRHCHSCSETIQHITGACKSITQTDYKHRHDQVASIIHQYLARKHKLITEYTPYYKYKPKTVIDTKEYKLYWDRTILTDKTVHNNRPDITFHDKKSKIVYLIDVAVPNSHNLITTHTQKITKYADLSIEIKSQWKVHKVKTIPIILSSTGIIPHTLHDSLRQLNINHSLFILLQKAVIINTCRIVRKFLTIDE

SEQ ID NO: 22530 - protein, 1371 aa, Gindanes brontinus
MRGSVEADYVFPSLFVGTKMKTSNFKNKTTSFESESGRMRYNLRPLTKSRRRNQVIIATNDRQLKQQSTNEVIASYSNPSSPISSTHSLFQSPSSSPQSFEILSTSRSTIASPLSVDVVQEADAKKPAPATGTTCVRKKWSTDMNIFIMRTYYEETKLESDNSTYLIPLHAKFTKKFPNMEVSRQRVGDQRRAIVRNRLLSTQQLKQIRQEVAEERNRHTSTLTNASQLRLNQNMNSGNSARMRWSQELNEFIVRTYYKITKLETDRSAYRQPLFRTVIAQYPNLAHLSEQRISDQCRAIIYNKMITDEKLQEIRDEILIELNEKQTYDINTVTQPLDILDTELANIMNIDVTDETHHSITQHLTQCTQRTNESGTKVMETFSKALNDFKNVDPTQRPHIPRQKTNKKLALITNFINMNILPLYLTDNSDYDTVQLVLYCAAYTASICNGVKIRSLANNTQSVQNIPKWQQRLQKRIDDLRVKIGRLTEYIRGNTSYKLTKYIEQLKKHFKIHAKHETENQDVEQYMDTLKQKLNVLSNRLRRYKKTTLRKKQNAQFMSNEKSFYRTLESHNSCSSTVNNTPTTEILHEYWSSIWGNVQHHRENGWCREHFVNEVQEMHYEEVSLDLLKIIINRTHNWKAPGSDKIHNYWYKRFTTIHSHLTRHINRFIQKPDTLPAYVMKGVTYMLPKDNTDLKNPGKYRPITCLQNIYKIITACISELIYTHTETNNILTEQQKGCRRKSQGCKEQLIIDSVVSKQALQKKRNIYTMFIDYKKAFDSIPHSWLLQVLKYYKIHPTLIQFLEKTMVKWSTVLKLKQIETDEISIRRGIFQGDSLSPLWFCLALNPLSNILNNSKKGFRIKHHNTYYTLSHLMYMDDIKLYGSSLNEIYNLADITQTFSADIHMEFGIDKCKIQSVKRGKLELNSYETMSGGIIEPVDCINGYKYLGYAQTTNIHHKEIKQILENKFRYRLRRILNTYLNARNTTKAINTFAVPILTYSFGVISWSQSDLKKLQRLINTTMTKYRKHHPRSCSQRLTLSKPEGGRGLIDIQNLHNNQITSLKTFFYAKAPHSVLHKATIHADIKYTPLNLNDSRIQKNQNIKQPQQKINEWLQKSLHGRHRRDLINPHFDKLASNEWLKKGELFAETEGFMIAIQDQVIETGNYRKFIIRDKNLVTDQCRHCHSSSETIQHITGACKSITQTDYKHRHDQVASIIHQYLARKHKLITEYTPYYKYKPKAVIDTEGYKLYWDRTILTDKTIHNNRPDITFYDKKSKTVYLIDIAVPNSHNLITTHTQKITKYADLSIEIKSQWKVQTVKTVPIILSSTGIIPHTLHDSLRTLNINHSIFILLQKAVIINTCRIVRKFLNLNE

SEQ ID NO: 22531 - protein, 1357 aa, Zera sp.
MKAFNSKNNKKTTHCESYTAKGRYNLRSLSGNCSRNRDVIENGKQICDLSNEKQLTKTEVNTSDSKPSSPISSTHSYFRSPYSSPQSFEIPPLSRSTTVSPMSVDVVQETDVDKPAPATGTTLVRKKWSTDMNIFIMRTYYEQTNLETDTHNYLIPLHTKFTNKFPNMNVSRQRLGDQRRAIVRNKLLSDYQLNEIRVEVTTQINNHIRTLTSTPQPMQNQTVNTRSTTRMRWSQELNEFIVRNYYKITKLETDKSAYRQLLFQSVITHYPNLAHLSEQRISDQCRAIIHNKMMSEDKLQEIRDEIVIELNEQHTHNINSETQASGFMDEELEEIINTNITDDTQHNLTQHHTQDIQHTNITETRVRNVFSKALNDFKTIEPTQRPYIPRQKSNKKLAVLTHFINMNVISAYLTEHCDYDMTQLILYCAAYTATICNGFKVHTVTNNIQHKHNLPKWQQRLENRIKELRVKIGKLTEYIRGNTSFKLTKYVEEIKKHFKIHAQYDSENHDLEQYLDTLKQKLNLLSNRLRRYKKTTLRKKQNTQFSNNEKGFYRSLERQQNNSQADIPTSDSLHKFWSGIWENTQQHTENKWCREEFVEQIQEMQYDNISLDLLKSVINRTHNWKAPGTDKIHNYWYKRFTNIHTHLLRHINSFIQEPATLPTYITKGVTYMLPKDDSDLQNPGKYRPITCLQNIYKIITACISEFIYTHTESNNILSEQQKGCRRNSQGCKEQLIIDAVVSKQAFKNKRNIYTMFIDYRKAFDSVPHSWLIHILKHYKIHPLLIQFLENTMVKWSTVLKLQHVETEEIFIRRGIFQGDSLSPLWFCLALNPLSDALNNSKSGFKIKYHNSHYLLSHLMYMDDIKLYGSSHSQINKLADITQAFSADIKMEFGIDKCKMQSVKRGTLEFNTYKTMNAEIIEPVDCKNGYKYLGCAQSRNIHHKDLKQSLTEKFRDRLHKILSTYLNARNTTKAINTFAVPILTYSFGIISWSQSDLKKMQRILNTTLTKHRKHHPRSCSQRLTLSKTEGGRGFIDIQNMHNNQITLLKTFFQDKASHSILHKAITHSDIKYSPLNLSDSSTQKNQNITQTPQKINEWLLKSLHGRHRRYLISPHVDKVASNQWLKKGELFPETEGFMLAIQDQVIETANYRKFIIRDKNLVTDQCRHCHSSSETIQHITGACKSIAQTDYKHRHDQVASIIHQYIARKYKLITEYTPYYKYTPKAVIDTDEYKLYWDRTILTDKTVHNNRPDITFYDKKSKTVYLIDVAVPNSHNLINTHTQKITKYADLSIEIKSQWKVQKVKTVPIILSSTGIIPHTLHESLRILNINPSLFILLQKAVIINTCRIVRKFLTIEE

SEQ ID NO: 22532 - protein, 1362 aa, Telemiades fides
MKSPYKNKHKNNHHRESAIKTRTYNLRPLPGSNRELIRPDSPSSIIQTNDDIRCPTNINMDTNPSLAPPFSHSSFESPISSPDSFEYLPTSRSTTTSPMSVDVVQKASARKTAPATGTKCTRKKWNSEMNIFILRTYYEVTKMETDTRTYLTPLHNKFIEKFPDMQVSRQRLGDQRRAIERNQLLSSHIIKQIREEVREQLHLTDISIVTPRHDQVTPISSSSMRMRWTNEMNEFIIRSYFKITNLETNLSAYRQPLKQAIVTKYPHLAHLTEQRVSDQYRVIINNKMIDDNRLQEIKHEVMIDLNRVENERSQSLLQSSHKSNETDSHTLPTTNNSEIIIQNCETMETANPDSTQLNFNFLNGKAIDDLFVTTLNNFKFTEPTQRPYIPVQKPSKNLVMIIAYVNSVLFPKYLTDMEEFNKLETIIYCAALTVCTYNGSKIFTTPRNTSNSQNIPKWQRRLQNRIQDLRIKIGRLTEYIRGNTGKKLKAHVEKIKLQYKIHSKHEEENKNLAQFMDTLKQKLNLYSNRLRRYKQTTLRKYQNKHFTNNEKLFYRNLNTSCHSSQTNTDSPTPEQLHAYWSNIWTNAKNHTEGEWLKEDKKTAQHISEMNFEEIDSKLLKSVIAKTHNWKATGSDRIHNYWLKKITYIHPHLLKHINNFIKHPDTIPNYITKGVTYMLPKDNNDKRNAAKYRPITCLQTLYKIITACISELIHKHIDTNNILAEQQKGCRRKSQGCKEQLSIDAVATKQALTRKRNIYTMYIDYKKAYDSMPHSWLVYILEHYKIHPVLIHFLKTIMTNWSTVLRLNQIETEQINIRRGIFQGDSLSPLWFCLALNPLSTALNASTVGYKIKHNNTSYTLSHLLYMDDIKLYGSNLKEIHKLADITQIFSEDIQMEFGIDKCRIQSVYRGRLESNSYYTFVGEQIEPVDSETGYKYLGYQQSRQIHHKETKKLLTIKFKERVHRILNTALSSKNTIKAINTYAIPILTYSFGVIKWSQTDLKKLQRIINTSMTKFRKHHPRSCTQRLTLSKLEGGRGLIDLQNLHNKQVTTMRSFFHTKAQQSSLHKAVSQADIKYTPLNLNDYSTQKNQTIVEPQEKLNVWLQKPLHGRHRRDLINPHVDKLASNTWLKRGELFPETEGFMIAIQDQVIETRNYKKFIIRDNNLLTDQCRHCHNASETIQHITGACRSIAQTDYKHRHDQVAAIIHQYLAFKYKLVKEKCAYYKYTPQAVLESDSFKLYWDRTILTDKTIHHNRPDITLHDKINKVVFLIDIAVPNTHNLNSTHTEKMIKYTDLSIELKSQWKLKKVRTVPIIISATGVIPRTLQNCLNVLNINHFIYILLQKAVIINTCRIVRKFLSLDD

SEQ ID NO: 22533 - protein, 1025 aa, Heliopetes ericetorum
MTIQDSAEIETINENNISSHNIIIQDSAEIESIFVKTLNEFKTVNPPDRPYIPVQKPSKRFTALTDFVNNTLLPKYLIDVSNFKTVENILYCAAFTVCTCNGAKIFSNTTHNKKPHTIPKWQKRIEYRIKQLRCMIGRLTEFTKGNVSTKLSRHVEKIKMQHKIHSKYDEENTNLEQVMDTLKQKLNLLSNRLRRYKQTTLRKTQNTQFINNEKHFYRKLNSSNYSKNLNSDLPTSEQLYTFWSNIWAHSKQHHEGEWLNPDRELIKNIPNMKYEEIDINLLRYVIAKTHSWKATGSDKIHNYWFKKFTNIHSHLLTHINKFIQNPDLLPPYITKGVTFMLPKNNNDTKNPANYRPITCLQNIYKIITSCITELIYRYTDTNNIITAKQKGCRRGSQGCKEQLIIDAVVSKQALARKRNIYTMYIDYKKAYDSVPHSWLIYILEHYKIHPTLIHFLKNIMTKWSTALKLQNIETEVISIRRGIFQGDSLSPLWFCLALNPLSNALNDSKYGYKIRYNDSQYTLSHLLYMDDIKLYATNLDQLHKLAEVTQIFSSDIHMEFGVDKCKTQSVRRGHLESNSFETIKGEEIEPVDCNSGYKYLGYQQSRQIHQALTKQTLIKNFKDRLHKILKTSLNSKNTIKAINTFAIPYLTYSFGIIRWSQTDLINLQRVVNTSMTKYRKHHPRSCIQRLTIPKIEGGRGLIDIKNLHNSQITTLRDFFHKRTHQSSLHTAITQSDIKYTPLNLHDTSIQKNQTITEPQLKLDTWLQKPLHGRHRRDLINPQVDKYASNGWLQRGELFPETEGFMLAIQDQVIETRNYKKFIIRDNNLVTDQCRHCHSASETIQHITSACKSISQSDYKHRHDQVAAIIHQYLGLKHKLILEKIAYYKYKPQAVLDSDKFKLYWDRTILTDKTIHNNRPDITLHDKINKIVYLIDIAVPNTHNMASTYTDKTTKYTDLSIEIKSQWKVNVVKTVPIIISATGVVPHTLKNSLNTLSIHNLTYIQLQKAVIINTCRIVRKFLSMDE

SEQ ID NO: 22534 - protein, 1364 aa, Pyrgus malvae
MKSSSNKYKNIKNYCENVDFTVRKSVYNLRPRLIKSHQENLRGENCCTVQIDDSKKSRSRTPDKKKTQDNTCNLSPKNPSSPTSSISLFESPRSSPKSYEDPISSRSSIISQISEDVVQEAEAVEPAPANDNKRARKKWSDAMNIFILRTYYEITRMETDTSTYLIPLHHKFIEKFPDMDVSRQRVGDQRRAIERNRLLPLTTIHQIKEKVRAQLHETEVTNNTPTHFSDTQTANSARMRWSNDINEFIIHSYFKITALETNMTSFRPKLKQAIIEKYPQLAHLSEQRISDQQRAIIRNKMINDTRLQEIKDEVILELNTIEQSSPQISHTAHEILDNTQENFNYNISLETPNNNQIHLHTEIQNAAEIESTFIEALNKFNTLDPTDRPYIPVQKSSRKLAVIRNYVNNTLLPKHLKDAKEFKVIENILYCAAFTVCTHNGAKIGISRTQRPKSKDTPNWQKRLENRIKDLRCMIGRLTEHMKGNKSTKLNKHIENIKLRYKIHSKYDNENTNLTQFMDTLKQKLNLISNRLRRYKQTTLRKSQNILFTNNEKLFYRNLQSSQFSQQSNQNLPTSEQLHTFWSNIWAKPKHHNEGDWMDADKKLVQNVPGMKFEGIDINILKHVIAKTHNWKATGSDKIHNYWFKHFTSLHPYLLTHINNFIKNPDILPSYIIKGITYMLPKDKNDSNNPAKYRPITCLQNIYKIITACITELIYKHTNSNNILAEQQKGCCRGSRGCKEQLTIDAVVSKQARARKRNIYTMYIDYKKAYDSVPHSWLIFILEHYKIHTTLIHFLKETMNKWSTTLKLHNVETEEISIRRGIFQGDSLSPLWFCLALNPLSTALNNSKYGYNIRNINTVYTLSHLMYMDDIKLYAGNLNELHKLADITQIFSSHIHMEFGIDKCKMQSVRRGHLECNSFITRAGEEIEPLDALSGYKYLGYQQSRQIHHTQTKQTLKSNFRDRLHKILKTSLNSKNTIKAINTFAIPYLTYSFGIIRWSQTDLKCLQRTINTSMTKHRKHHPRSCVQRLTLTKLQGGRGLIDIQNLHNKQIKTLRQFFHTRAQHSPLHEAVTTSDLKYTPLNLHDQSIQKCENITEPQLKLDEWLQKPLHGRHRRDLISPHVDMHASNTWLKRGELFPETEGFMLAIQDQVIETRNYKKFIIRDNSLISDQCRHCHSASETIQHITSACRSISQTDYKHRHDQVAAIIHQYLAYKHKLITEKTVYYKYKPEPVIDSNKVKLYWDRTILTDKTIHNNRPDITLHDKINKIVYLIDIAVPNTHNLSSTYTDKNTKYTDLSIELKSQWKVKMVKTVPIVISATGVVPKTLKNSLNTLNIHNLIYVQLQKAVIINTCRIVRKFLSLDE

SEQ ID NO: 22535 - protein, 1134 aa, Ectomis asine
MRWSNEINEYILRSYFTITNLETNLSAYRKPLKFAIITKYPHLLHLSEQRISDQLRAIINNKMIKENRLQEIKDEVLIELNRIEQDRSQSLHTQETTHTHFHPGPPNVTELNLQNDAATEVDNLNCNQYNFNLLNSFEIEDIFLTALSNYSTIEPTQRPYIPVQKPTKKLANITNYVNSILLPKYLTDANEFSKLETIIYCAALTVCKYNGAKIFTTRQSTHTSQNTPKWQIRLQNRIGDLRSKIGRVTAYMKGNTSKKLRTQIEKIKFQYKIHSKYEDENNNLAQFMDTLKQKLNVLSNRLRRYKQTTLRKYQNKQFTYNEKLFYRTLSTSHYNNQTENCTPTPEELHTYWSNIWSSSRKHTEGEWIKEDKESVRNINTMSFKEIDIDLLKSVIAKLHNWKATGSDKIHNYWFKKFIQVHPHLLTHINNFIKKPDTLPTYLTKGVTYMIAKDKEDLKNPAKYRPITCLQNLYKIITACITELIYKHIDTNDILAEQQKGCRRGSQGCKEQLTIDGVVAKQALTKKRNIYTMYIDFKKAYDSIPHSWLIYILEHYKIHATLIGFLKGIMVNWSTILKLNKVETEQIYIRRGIFQGDSLSPLWFCLALNPLSTALNASNIGYKIKNNNMSYTLSHLLYMDDIKLYGSNLKEIHELADITQAFSSDIHMEFGIDKCRTQSVHRGCLENNSYFMITGEEVEPVDNETGYKYLGYQQSRQIHHRETKNLLTNKFKQRLHKILNTTLTSKNTIKAINTYAVPSLTYSFGIIKWSQTDLKKLQRIINTSMTKHRKHHPRSCTQRLTLPKIEGGRGLIDIQNLHNTQITKLRSFFHTKAHLSSLHQAVVQADMKYTPLNLHDHSTQKNQVIKDPQQKLDEWLQKSLHGRHRRDLINPHVDKQASNTWLTKGELFPETEGFMLAIQDQVIETRNYKKFIICDNNLRTDQCRHCHSASETIQHITGACRSISQTDYKHRHDQIAAVIHQYLAFKYKLLTEKIAYYKYTPPSVIESDNLKLYWDRTILTDKTIHHNRPDITLHDKINKIVYLIDIAVPNTHNLSHTYTEKMHKYTDLSIEIKSQWKVKTVKTVPIVISATGVIPRTLRDSLRTLNIPYLTYNLLQKATIINTCRIVRKFLSMDE

SEQ ID NO: 22536 - protein, 1124 aa, Chiomara georgina
MRWSNELNEFIIRSYFKVTASETNLSGYRQALKQAVTSKFPHLSHLSEQRISDQHRAIINNRMIDDNRLQEIKDEIVLELHRVEQENLHINQSLHNSEQNLNEEITLRTQATNITQICQEVQNGAEVEHVFIQALNEFSDIDPTQRPFIPRQRSSKKLQLMVNYVNSTLLPKYLPDGSDFHTFQTVLYCAAFAICVNNGAKINRPTEQIPKIQNVPKWQRRLQKRIEDLRVMIGRLTEYKRGNKSRKLCTHIEKIKVTYKIHSKYENENTSLDQFMDTLKQKLNLLSNRLRRYKKTTLRKSQNTQFDNNEKLFYRNLHSSIDNKQSDTDHDTPTTQQLHKFWSDIWENSKDHKVGGWINSDKKLRESIIEMEFETIDINILNKVILKTHNWKATGSDKIHNFWFKKFTYIHLQLLNHINNFIKNPDILPSYITKGVTYMLAKDKKDTNDPAKYRPITCLQNIYKIITSCITEVIQKHTDFNNILTEEQKGCRRGSQGCKEQLTIDAVVSKQALARKRNIYTMYIDFKKAYDSVPHSWLIYILRHYKIHPTLIHFLKNTMTRWSTTLKLNGKETEEISIKRGIFQGDSLSPLWFCLALNPLSIGLNNSNIGYKIKLNSTLYTLSHLMYMDDIKLYGTNLTELNKLAEITQEFSLDIHMEFGIEKCKIQSVRKGKVENNTYYTSSQEEIEPVDCEKGYKYLGYQQSRQIHHKQIKVTLRQKFKERLHKILKTCLNAKNTIKAVNTFAISYLTYSFGIIRWSQTDLKQLQRIVNTSMTKHRKHHPRSCTQRLTLPKLEGGRGLIDIRNLHNKQIITLRHFFHTREQTSSLHSAIVKSDNKYTPLNLQEHSAQKNETITEPQQKLETWLEKSLHGRHRRDLINPHVDQHASNAWLKRGELFPETEGFMLAIQDQVIETRNYKKFIIGDQNLGSDQCRHCHSASETIQHITSACRFISQTDYQHRHNQVAAIIHQYLALKHKLITEKLPYYKYEPQPVIDSDKYKLYWDRTILTDKTIHCNRPDLTFYDKNNKTVYLIDIAVPNTHNLTTTYTEKITKYKDLSIELKAQWKVKTVKTVPIVISATGVVPRTLHDSLQTLNIHKLTYILLQKAVIINTCRIVRKFLSIDT

SEQ ID NO: 22537 - protein, 1196 aa, Zopyrion sandace
MEQFPHMEVSRQRLGDQRRAIERNRLLPLNIINKIKDEVKAQKLHTSYTTNEIYTQDHNSQTTSNTARMRWSNEVNEYIIYSYYKITSLETNTTGYRPLLKDAVVIKYPYLSHLSEQRISDQHRAIIRNKMINDKRLQEIKDDVILELNRTVSEPQQTSHMLEENIESNNTQEWLDNNITIETHNSNQNHLHIAPNPSEIETIFNKTFRDFKNVDPTDRPYLPIQKASKRLTALTHFVNNTLLPKYLMEANDFKNTENMLYCAAFTVCTYNGAKIFLNTTQKSKTQHNPKWQKRIEDRIKDLRCMIGRLTEYMKGNKGTKLNKHIDKIKIKYKIHSKYEKENTSLAQYMDTLKQKLNLLSNRLRRYKQTTLRKSQNTQFVNNEKLFYRKLHASDCSNQTQDDSPTPEQLHTFWSNIWSNSKTHTEGDWINPDKKLVQNISEMKYEDIDINLLRYVIGKTHNWKATGSDKIHNYWLKKFTSIHSHLLTHINNFIKNPEFLPSYITKGVTYMLPKDKKDTKNPAKYRPITCLQNIYKIITSCITELIYKHTDTNNILTEQQKGCRRGSQGCKEQLTIDAIVSKQAMVRKRNIYTMYIDYKKAYDSIPHSWLIYILEHYKIHPVLIHFLKNIMAKWCTALKLNNIETEEISIRRGIFQGDSLSPLWFCLALNPLSTALNDSKYGYRIKNDNTVYTLSHLLYMDDIKLYASNLNQLHKLADVTQQFSSHIHMEFGIDKCKMQSVRRGNLECNTFLTVTGEEVEPVDYESGYKYLGYQQSRQIHHIHTKQILKKNFKDRLHKILKTSLNSKNTIKAINTFAIPYLTYSFGIIKWSQTDLKGLQRVVNTSMTKHRKHHPRSCVQRLTLPNHEGGRGLIDIQNLHNSQITTLRQFFHTQAQQSSLHIAVTRSDIKYTPLNLHDHSTQNNQTVTEPQSKHEEWLQKPLHGRHRRDLINPHVDKYASNAWLKRGELFPETEGFMMAIQDQVIETRNYKKFIIRDSSLVSDQCRHCHSASETIQHITSACRSISQTDYKHRHDQVAAIIHQYLGLKHKLISEKTAYYKYKPEAVINTDKFKLYWDRTILTDKTIYNNRPDITLHDKINKIVYLIDIAVPNTHNLTSTYTDKTTKYADLSIELKSQWKVNTVKTVPIVISATGVIPETLKNSLNTLNIHHLTYIQLQKAVIINTCRIVRKFLSINDI

SEQ ID NO: 22538 - protein, 1431 aa, Odontoptilum angulatum
MRLRSSNTLPQAGTRNGESRPESRTSGSPTYSGGGTASLRLAQSETAASLPTNSQSLNTQSHPSLPSPTHNLYIREENLQSPKPTHMQKGLANDADFNLRPRRYNLRPRQSYWEKSKNSFCKNQDQSNDAKPMSSSSSSSSESPISPTSLFQSPVSSPYSFENSTLSRASTVSPKSVNVVQEANATEPAPVADVKRVRKKWSTEMNIFILRTYYELTKMETDNSNYLISLHEKFLEQFPYMQVSRQRVGDQRRAIERSRLLPIDQINQIKEEIQLRLQSVSQSVSETLINTPTQSKISSSGPNTTRMRWSNDINEFIIRSYLKITKLETDISAFRQPLKQAIVAKYPHLHHLSEQRISDQYRAIIKNKMIKDQRLQQIRDEVIIELDNIEQERSHMRSTVEPTDINISQDFSSDAILNTHNNIQANVTSLSHQNIEGTFLKALNDFSTIHPTQRPYIPKQKPSRKLALIIHFFNTTLLPKYLPDVSDFVTLEQILYCAAFTASLTNGSKILSTPDKPKTQQIPHWKRRLQNRIQDLRANIGRLTEYMRGNNSNRLNKHIHKIKLHYKIHSKHEQDNNNLSEFLDTLKQKLNLLSNRLRRYNQTTLRKSQNNQFFKNEKLFYRTLESSCSNKQTDIDIPTAEEIHTFWSNIWTTSKKHKEGQWIEHDKKRVENILEMQFQEIDIHLLKTVIARTHNWKAAGSDKIHNFWFKKFTYIHPQLLKHINNFIKNPETMPSYITKGITYMLPKDKNDTKNPAKYRPITCLQNIYKIITSCITELIYKHIDLNNILAEQQKGCRRGSQGCKEQLIIDAVVSKQALVRKRNIYTMYIDYKKAYDSVPHSWLIYILEHYKINPVLIGFLKNTMTKWCTVLKLKNIETEEINIRTGIFQGDSLSPLWFCLALNPLSSALNVNSNGYKIKNNDAAYILSHLMYMDDIKLYGNSLNNIHKLADITQSFSNDIQMEFGIDKCRIQSVCSGRIEHNRYYINTGEAVEPVDSESGYKYLGYQQSRQIHHKEIKQTLTNQFKSRVSKILKSYLNSKNTFKAINTYAISYLTYSFGIITWSQTDLKNLQRVINTSMTKHRKHHPRSCTQRLTLSKLEGGRGLIDIQNLHNKQITALRSYFHTRAQQTSLHKAVTQADFKYTPLNLHDMSNQKNETIIEPKQKINVWLHKSLHGRHRRDLINPHVDKQASNTWLRRGELFPETEGFMLAIQDQVIETRNYKKFIVRDKTLITDQCRHCHAASETIQHITGACKSIAQTDYKHRHNQVAAIIHQYIALKHKLIKEKVAYYKYLPEAVIDSRNYKLYWDRTILTDKTVHHNRPDITFHDKANRTVYLIDVAIPNTHNLTSTYTDKITKYTDLSIELKSQWKVVTVKTVPIIISSTGIIPRSLEKSLSTLHINKLTYILLQKAVIINTCRIVRKFLSLDGVT

SEQ ID NO: 22539 - protein, 1364 aa, Pyrgus malvae
MKSSSNKNKNIKNYCENVDFTVRKSVYNLRPRLIKSRQENLRGENCCTVQIDDSKKSRSRTPDKKKIQDNTCNLSPKNPSSPTSSISLFESPRSSPKSYEDPISSRSSIISQISEDVVQEAEAVEPAPANDNKRARKKWSDAMNIFILRTYYEITRMETDTSTYLIPLHHKLIEKFPDMDVSRQRVGDQRRAIERNRLLPLTTIHQIKEKVRAQLHETEVTNNTPTHFSDTQTANSARMRWSNDINEFIIHSYFKITALETNITSFRPKLKQAIIEKYPQLAHLSEQRISDQQRAIIRNKMINDTRLQEIKDEVILELNTIEQSSPQILQTAHGNLDNTQENLNYNISLETPNNNQIHLHTEIQNAAEIESTFIEALNKFNTLDPTDRPYIPVQKSSRKLAVIRNYVNNTLLPKHLKDAKEFKVIENILYCAAFTVCTHNGAKIGISPTQRPKSKDTPNWQKRLENRIKDLRCMIGRLTEHMKGNKSTKLNKHIENIKLRYKIHSKYENENTNLTQFMDTLKQKLNLISNRLRRYKQTTLRKSQNILFTNNEKLFYRNLQSSQFSQQSNQNLPTSEQLHTFWSNIWAKPKHYSEGDWMDADKKLVQNVPGMKFEGIDINILKHVIAKTHNWKATGSDKIHNYWFKHFTSLHPYLLTHINNFIKNPDILPSYITKGITYMLPKDKNDSNNPAKYRPITCLQNIYKIITACITELIYKHTNSNNILAEQQKGCCRGSRGCKEQLTIDAVVSKQARARKRNIYTMYLDYKKAYDSVPHSWLIFILEHYKIHTTLIHFLKETMNKWSTTLKLHNVETEEISIRRGIFQGDSLSPLWFCLALNPLSTALNNSKYGYNIRNINTVYTLSHLMYMDDIKLYAGNLNELHKLADITQIFSSHIHMEFGIDKCKMQSVRRGHLECNSFITRAGEEIEPLDALSGYKYLGYQQSRQIHHTQTKQTLKSNFRDRLHKILKTSLNSKNTIKAINTFAIPYLTYSFGIIRWSQTDLKCLQRTINTSMTKHRKHHPRSCVQRLTLTKLQGGRGLIDIQNLHNKQIKTLRQFFHTRAQHSPLHEAVTTSDLKYTPLNLHDQSIQKCENITEPQLKLDEWLQKPLHGRHRRDLISPHVDMHASNTWLKRGELFPETEGFMLAIQDQVIETRNYKKFIIRDNSLISDQCRHCHSASETIQHITSACRSISQTDYKHRHDQVAAIIHQYLAYKHKLITEKTAYYKYKPEPVIDSNKVKLYWDRTILTDKTIPNNRPDITLHDKINKIVYLIDIAVPNTHNLSSTYTDKNTKYTDLSIELKSQWKVKMVKTVPIVISATGVVPKTLKNSLNTLNIHNLIYVQLQKAVIINTCRIVRKFLSLDE

SEQ ID NO: 22540 - protein, 1394 aa, Spialia ferax
MAGGCPVSNDPPPLLATRGIMFALPWHAGLCWGGLLISYASRGIDMKKSLGRSKKVNETQSLDYTVETRRYNLRSLSGGHRRQEAVVGSNDQLIDSDSIQRSTTETIILSNFNPPSPMSSHSLFDSPSSSPHSFENPSRSTTISPMSVDVVQEADADNPVPATANRCVRKKWSEEMNIFILRTYYEVTQMESDHSTYLIPLHAKFLEKFPYMDVSRQRVGDQRRAIIRNKLLSPSKINDIRHEVQLQIQNNSTPTATHLHQQQINSILNTNGTAPRMRWKPEINEFIVRTYYKITLLESNKSAYRQPLHQAVIAKYPNLSHLSEQRISDQCRAIIYNKMICEEKLQKIKDEVTLELNAEESYITDTIINTSNVTEENITISQNYSTQHNNIQNIKVIDEKAIKNTFTSALHDFKSIEPTERVFIPKQKSSRNLANITNFINTKILPLFLTENSDFATIQLTLYCAAYTASIHNGAKINSNSDETLRGRKVAKWQLRMQRRVQDLRAKIGKLTEFIRGNTSQKLKRQIEDIKQQYKIHAQFENNNCDLSEFLDTLKQKLNVVTNRLRRYNKTTLRKRQNTQFINNEKSFYRNLDTQQNSYSTGNSIPTPEQLHTFWSNIWGNAREHKEGEWCNIAFEKDISDMQFEKLSLGLLKSVIHRTHNWKAPGSDKLHNYWYKRFTYLHPHLLNHINNFIQNPDSLPDYITKGITYMLPKDNTDTINPSKYRPITCLQNIYKIITSCISDLIYKHTESNNILAEEQKGCRKNSQGCKEQLIIDTVASKQALTKKRNIYTMYIDYRKAFDSIPHSWLLHVMEAYKIHPKIINFLKNSMHRWSTVLKLKQLETEKIMIRRGIFQGDSLSPLWFCLALNPLSVLLNNSQAGFKIKHNNTSHTLSHLIYMDDIKLYGSNLREITKLVTITEQFSENIKMEFGIDKCRIQSIKRGKVEINSYQTNNDEIIEPVEPNEGYKYLGYAQTRQIHYTEIKQNLIKKFKNRLHKILHTHLNSKNTIKAINSYAIPILTYSFGVIHWSQTDLQKLQRIINTTMTKHRKHHPRSCIQRLTLPRHEGGRGLIDIKNLHNTQITLLKSFFNDKALNSTLHHTVINADNKYTPLNLHDSSTQKNQNITHPQQKIDEWLQKSLHGRHRRDLINPCIDKEASNEWLKKGELFPETEGFMVAIQDQVIETANYRKFIIRDTNLKTDQCRHCHSSSETIQHITGACKSITQTDYKHRHDQVASIIHQYIALKHKLIADYTPYYKYNPKAVIDTNEYKLYWDRTILTDKTVYHNRPDITLHDKKNQTVYLIDIAVPNTHNLNNTHAEKMRKYAELSIEIKSQWNVRKVQTVPIILSSTGVIPHTLHEGLRALNINRFAYILLQKAVIMNTCRLVRKFLSLE

SEQ ID NO: 22541 - protein, 1063 aa, Udranomia kikkawai
MISDIKLQEIRDEVAIEIDRTENNNSHIQTQVQGTIDNPNISNSASNNTNNNFIQDLSDNLNLNNDDTKIKETFDKAFKEFNSVTPTERPFIPKQKPSKKLAIITQFINNNILSTYLSEDSDFATVQLVLYCAAYTASLCSGAKISHNTNNTPKIQSIPKWQKRLQYRIEDLRTKIGRLTEFMRGNVSRRLKNHIDQIKKQYKIHAQFQNENSDLPQFLDTLKQKLSLLLNRQRRYKRTTLRKTHNIQFANNEKSFYRSLEQKHNSLTDSNIPSPDQLHTFWSNIWANPVDHNKGRWVTNDTEHLKNISEMHFQEITLDLLKTVINRTHNWKAPGSDKLHNYWYKKITHIHCHLLRHINIFIQSPHTLPPYITKGITYMLPKDNIDTKNPAKYRPITCLQNIYKIITACISELIYKHTESNNILAEQQKGCRRKSQGCKEQLLIDAVVSKQAIKNKRNIYTIYIDYKKAFDSVPHSWLIFILEYYKIHPTIIHFLRNTMLKWSTVLKLKSLETDEILIRRGIFQGDSLSPLWFCLALNPLSFLLNDSKKGFKMKHNNASHILSHLMYMDDIKLYGSSLKDINNLADITQEFSSDIKMEFGIDKCRIQSIHRGQLQQNTYQTSSGETIEPVDSENGYKYLGYEQTRQIHHKQIKHTLTGKFKSRLHSILNTQLNAKNIIHAINTFAIPILTYSFGVISWSQSDLQKLQRIINTLMTKYRKHHPRSCTQRLTLNRLEEGRGLIDIKNLHNTQISTLRAFFHSKALHSSLHNAIVQSDIKHTPLNLHSYSTQKNQAIIHSHQKLDEWLQKSLHGRHRKDLINPHVDKNASNEWLKRGELFPETEGFMLAIQDQVIETGNYRKFIIRNKDQSDQCRHCHSSSETIQHITGACKSITQTDYKHRHDQIASIIHQYLAFKYKLITERITYYKYKPQPVIDTADFRLYWDRTILTDKTVHHNRPDITLHDKRNNIVYLIDIAVPNTHNLITTHTDKMTKYTDLTVEIKSQWKVQQVKTIPIIISSTGVIPHTLHDSLRTLKINRWTYILLQKAVILNTCRIVRKFLSIED

SEQ ID NO: 22542 - protein, 1377 aa, Phoebis sennae
MEKVNLRKYNLRPLPGGRRGASGADAGRDSMRTIGDGGLSRRVPLEQNATAEKSSPSSSPKSLFSSLQSSPASYTNYQSNPSSPSSYSTLYSNPSAEDVVQEATCAELPASAEAVKRARKKWTEEMNIFILRTYFILTSLETNINSYLPALHLSFIQEFPHMQVSRQRIGDQRRAIIRNKLLNQNKIQEIRRNAQEFLSNENNSASLIDLTQSNSTIAKNSGQRMRWSNEINESIMYNYYLITNLETNRTSYIQPLHKSVTSIHPSISHVSEQRIADQRRVIINNKLISDTRLLEIRDAVANTLQSYDHCSPIQTDINTSTTIDCLSLEHRTETNMDTVSNTNVVNETCENILANTQTVIINTQTAIPTPMFTPVDVDNTFKQTLERFNNSDPTQRPSIPKQKASKKLTLLVNYINQTLLPKHISQELSFGILHDIIYAAAYTAASHNGSKIKDSSSSTPRQHKPPFWQTRLENRIDDLRIKIGRLTEYIKGNNSLTLKKHIDAIKRNYKIHSQHEQENTQLSHFLDTLKQKLSALASRLRRYKLTTLRHTQNTDFAKNEKLFYRNLTKPHNEKRDELQELPNAAEVHNYWSNIWAKPISHNSREWMREDRDNLADVLDMKFDEINMDLFQFVIGKTHNWKATGSDKLHNYWYKKFTVAHAPLLSHINAFIKSPNTMPKYITQGITYMLPKDKSDLKNPAKYRPITCLQNIYKIMTSCISELIYKHTEQNNLLTEEQKGCRKRTQGCKEQLIIDSIVSKQAYNKKRNIYTMYIDYQKAFDSVPHSWLIYILEHYKIDNTIINFLKNSMCNWQTVLKLHNSTAAFETAPISIRRGIFQGDALSPLWFCLALNPLSNLLRNSNLGFRLKYNKEHFTISHLMYMDDIKLYGTNLEEITKLADITQNFSLDIHMNFGIDKCKIQSVKRGKLEANPFILHNDEVIGPVDNQIGYKYLGYYQTQKILQKQAKTEIEQNFKSRLHKILNSFLNSKNLIKAINTFAIPVLTYSFGIINWSQTHLKRLQRIINTISTKYRKHHPRSSIERLTLPRAEGGRAIIDIQNLHNKIITNLRTYFHARSQNSTLHKAISAADYKFTPLNLSDTNRQKNEHLRKPQDKIAVWLQKSLHGRHRRDLTHDETDKLASNAWLKRGELFPETEGFMLAIQDQVIDTRNYRKHIRKDTTLVTDQCRHCHSASETIQHITGACRSLAQTDYKHRHDQVASIIHQYLAIKYKLITEKVPYYKYIPQVILDSSNYKLYWDRTIITDKTIQSNRPDITLLDKNNKTVYLIDIAIPNTHNLTSTFSNKIAKYTDLSIEIKTQWQVTTVKTVPIIISSTGIIPNTLHISLKTLNIHHLTYIQLQKAVILNTCRIVRKFLSLNE

SEQ ID NO: 22543 - protein, 1362 aa, Colias croceus
MEEVGGRHRYNLRSLPGGRRGASGADAGRDSMRTIGDRGLNRRSPLRNNTTNENPSSSASSPKSLFSSLQSSPISYTNHLSPSSCSSNYSSSITTEDVVQEATCAEIPAPTNVEKRARKKWTDEMNIFILRTYFTLTLLESDTNTYLPALHTSFIQQFPQMQVSRQRIGDQRRAIIRNNLLNQDKVQEIRREVEVFLSNQNNSATPANPVSLNRENSGQRMRWSNAINESIMYHYYAITNLETNRTSYIQPLHQAVISKHPNISHVSEQRISDQRRVIINNKLISDTRLQEIRNEVASTLLHLEQQPQDEITNETPVSYQYINTAASIEGVLNDETTILSCNLLAENEAEAHKETSMFVSSDVENTFINTLDTFKNTDPTQRPSIPKQKITRKLAHLVNFINHTILPKYCREDTDFSNLQEIIYSAAYTAATHNGSKIRNNPIHTPHKHKTPLWQVRLEKRIEDFRVKIGRLTEYIKGNSSPRLKRHIESIKRSYKIHSQHENENTDLSHFLDTLKQKLSALSSRLRRYKQTTLRKSQNTHFTMNEKSFYRNFNQSSSEPRDELDELPNPEDVHGFWSDIWAKPIQHNPAEWIKDEKDSLIDVLDMKYEDIPIELFRFVIGKTHNWKATGSDKLHNYWYKKFTAVHHLLLTHINTFIKSPESMPKYITQGITVMIPKDKSDPKNPAKYRPITCLQNIYKIITSCISQIMYQHLEKYSIIAEEQKGCRKRTQGCKEQLVIDSVVSKQAYNKKRNIYTMYIDYQKAFDSVPHSWLIYILEHYKIDPTLINFLRSIMNNWQTVLRLHTQTKFTETAPISIRRGIFQGDALSPLWFCLALNPLSNLLNKANVGFRLKYNNNQFILTHLMYMDDIKLYASNLAEINKLADITQVFSSDIRMNFGIDKCKIQSVKRGKLESNSYTLHNDEVIQPVDNQIGYKYLGFYQNQNILHKQVKIEIEKCFRARLHKILNTHLNAKNIVKAINSFAIPILTYSFGTINWSQTQLKKLQRIINTLSTKYRKHHPRSAIERLTLPRAEGGRGIIDIQNLHNKIITNLRSYFHNKTLDSVLHKAISHTDKKLTPLNLSDRSTQKNEKNRKPQEKIDAWLQKSLHGRHRRDLMNTDIDKLASNTWLKRGELFPETEGFMIAIQDQIIDTRNYRKFIRKDPNLVTDQCRQCHSASETIQHITGACRSLAQTDYKHRHDQVASIIHQYLAIKYNLISEKVSYYKYTPKIILDSTNYKLYWDRTIITDKTIQSNRPDITLLDKRNKVVYLIDIAIPNTHNLTSTFSNKIAKYTDLSIEIKTQWRVSTVKTVPIVISSTGIIPKSLHLSLKTLSIHSNTHILLQKAVILNTCRIVRKFLSLD

SEQ ID NO: 22544 - protein, 1362 aa, Colias croceus
MEEVGGRHRYNLRSLPGGRRGASGADAGRDSMRTIGDRGLNRRSPLRNNTTNENPSSSASSPKSLFSSLQSSPISYTNHLSPSSCSSNYSSSITTEDVVQEATCAEIPAPTNVEKRARKKWTDEMNIFILRTYFTLTLLESDTNTYLPALHTSFIQQFPQMQVSRQRIGDQRRAIIRNNLLNQDKVQEIRREVEVFLSNQNNSATPANPVSLNRENSGQRMRWSNAINESIMYHYYAITNLETNRTSYIQPLHQAVISKHPNISHVSEQRISDQRRVIINNKLISDTRLQEIRNEVASTLLHLEQQPQDEITNETPVSYQYINTAASIEGVLNDETTILSCNLLAENEAEAHKETSMFVSSDVENTFINTLDTFKNTDPTQRPSIPKQKITRKLAHLVNFINHTILPKYCREDTDFSNLQEIIYSAAYTAATHNGSKIRNNPIHTPHKHKTPLWQVRLEKRIEDFRVKIGRLTEYIKGNSSPRLKRHIESIKRSYKIHSQHENENTDLSHFLDTLKQKLSALSSRLRRYKQTTLRKSQNTHFTMNEKSFYRNFNQSSSEPRDELDELPNPEDVHGFWSDIWAKPIQHNPAEWIKDEKDSLIDVLDMKYEDIPIELFRFVIGKTHNWKATGSDKLHNYWYKKFTAVHHLLLTHINTFIKSPESMPKYITQGITVMIPKDKSDPKNPAKYRPITCLQNIYKIITSCISQIMYQHLEKYSIIAEEQKGCRKRTQGCKEQLVIDSVVSKQAYNKKRNIYTMYIDYQKAFDSVPHSWLIYILEHYKIDPTLINFLRSIMNNWQTVLRLHTQTKFTETAPISIRRGIFQGDALSPLWFCLALNPLSNLLNKANVGFRLKYNNNQFILTHLMYMDDIKLYASNLAEINKLADITQVFSSDIRMNFGIDKCKIQSVKRGKLESNSYTLHNDEVIQPVDNQIGYKYLGFYQNQNILHKQVKIEIEKCFRARLHKILNTHLNAKNIVKAINSFAIPILTYSFGTINWSQTQLKKLQRIINTLSTKYRKHHPRSAIERLTLPRAEGGRGIIDIQNLHNKIITNLRSYFHNKTLDSVLHKAISHTDKKLTPLNLSDRSTQKNEKIRKPQEKIDAWLQKSLHGRHRRDLMNTDIDKLASNTWLKRGELFPETEGFMIAIQDQIIDTRNYRKFIRKDPNLVTDQCRQCHSASETIQHITGACRSLAQTDYKHRHDQVASIIHQYLAIKYNLISEKVSYYKYTPKIILDSTNYKLYWDRTIITDKTIQSNRPDITLLDKRNKVVYLIDIAIPNTHNLTSTFSNKIAKYTDLSIEIKTQWRVSTVKTVPIVISSTGIIPKSLHLSLKTLSIHSNTHILLQKAVILNTCRIVRKFLSLD

SEQ ID NO: 22545 - protein, 1331 aa, Colias croceus
MRTIGDRGLNRRSPLRNNTTNENPSSSASSPKSLFSSLQSSPISYTNHLSPSSCSSNYSSSITTEDVVQEATCAEIPAPTNVEKRARKKWTDEMNIFILRTYFTLTLLESDTNTYLPALHTSFIQQFPQMQVSRQRIGDQRRAIIRNNLLNQDKVQEIRREVEVFLSNQNNSATPANPVSLNRENSGQRMRWSNAINESIMYHYYAITNLETNRTSYIQPLHQAVISKHPNISHVSEQRISDQRRVIINNKLISDTRLQEIRNEVASTLLHLEQQPQDEITNETPVSYQYINTAASIEGVLNDETTILSCNLLAENEAEAHKETSMFVSSDVENTFINTLDTFKNTDPTQRPSIPKQKITRKLAHLVNFINHTILPKYCREDTDFSNLQEIIYSAAYTAATHNGSKIRNNPIHTPHKHKTPLWQVRLEKRIEDFRVKIGRLTEYIKGNSSPRLKRHIESIKRSYKIHSQHENENTDLSHFLDTLKQKLSALSSRLRRYKQTTLRKSQNTHFTMNEKSFYRNFNQSSSEPRDELDELPNPEDVHGFWSDIWAKPIQHNPAEWIKDEKDSLIDVLDMKYEDIPIELFRFVIGKTHNWKATGSDKLHNYWYKKFTAVHHLLLTHINTFIKSPESMPKYITQGITVMIPKDKSDPKNPAKYRPITCLQNIYKIITSCISQIMYQHLEKYSIIAEEQKGCRKRTQGCKEQLVIDSVVSKQAYNKKRNIYTMYIDYQKAFDSVPHSWLIYILEHYKIDPTLINFLRSIMNNWQTVLRLHTQTKFTETAPISIRRGIFQGDALSPLWFCLALNPLSNLLNKANVGFRLKYNNNQFILTHLMYMDDIKLYASNLAEINKLADITQVFSSDIRMNFGIDKCKIQSVKRGKLESNSYTLHNDEVIQPVDNQIGYKYLGFYQNQNILHKQVKIEIEKCFRARLHKILNTHLNAKNIVKAINSFAIPILTYSFGTINWSQTQLKKLQRIINTLSTKYRKHHPRSAIERLTLPRAEGGRGIIDIQNLHNKIITNLRSYFHNKTLDSVLHKAISHTDKKLTPLNLSDRSTQKNEKIRKPQEKIDAWLQKSLHGRHRRDLMNTDIDKLASNTWLKRGELFPETEGFMIAIQDQIIDTRNYRKFIRKDPNLVTDQCRQCHSASETIQHITGACRSLAQTDYKHRHDQVASIIHQYLAIKYNLISEKVSYYKYTLKIILDSTNYKLYWDRTIITDKTIQSNRPDITLLDKRNKVVYLIDIAIPNTHNLTSTFSNKIAKYTDLSIEIKTQWRVSTVKTVPIVISSTGIIPKSLHLSLKTLSIHSNTHILLQKAVILNTCRIVRKFLSLD

SEQ ID NO: 22546 - protein, 1362 aa, Colias croceus
MEEVGGRHRYNLRSLPGGRRGASGADAGRDSMRTIGDRGLNRRSPLRNNTTNENPSSSASSPKSLFSSLQSSPISYTNHLSPSSCSSNYSSSITTEDVVQEATCAEIPAPTNVEKRARKKWTDEMNIFILRTYFTLTLLESDTNTYLPALHTSFIQQFPQMQVSRQRIGDQRRAIIRNNLLNQDKVQEIRREVEVFLSNQNNSATPANPVSLNRENSGQRMRWSNAINESIMYHYYAITNLETNRTSYIQPLHQAVISKHPNISHVSEQRISDQRRVIINNKLISDTRLQEIRNEVASTLLHLEQQPQDEITNETPVSYQYINTAASIEGVLNDETTILSCNLLAENEAEAHKETSMFVSSDVENTFINTLDTFKNTDPTQRPSIPKQKITRKLAHLVNFINHTILPKYCREDTDFSNLQEIIYSAAYTAATHNGSKIRNNPIHTPHKHKTPLWQVRLEKRIEDFRVKIGRLTEYIKGNSSPRLKRHIESIKRSYKIHSQHENENTDLSHFLDTLKQKLSALSSRLRRYKQTTLRKSQNTHFTMNEKSFYRNFNQSSSEPRDELDELPNPEDVHGFWSDIWAKPIQHNPAEWIKDEKDSLIDVLDMKYEDIPIELFRFVIGKTHNWKATGSDKLHNYWYKKFTAVHHLLLTHINTFIKSPESMPKYITQGITVMIPKDKSDPKNPAKYRPITCLQNIYKIITSCISQIMYQHLEKYSIIAEEQKGCRKRTQGCKEQLVIDSVVSKQAYNKKRNIYTMYIDYQKAFDSVPHSWLIYILEHYKIDPTLINFLRSIMNNWQTVLRLHTQTKFTETAPISIRRGIFQGDALSPLWFCLALNPLSNLLNKANVGFRLKYNNNQFILTHLMYMDDIKLYASNLAEINKLADITQVFSSDIRMNFGIDKCKIQSVKRGKLESNSYTLHNDEVIQPVDNQIGYKYLGFYQNQNILHKQVKIEIEKCFRARLHKILNTHLNAKNIVKAINSFAIPILTYSFGTINWSQTQLKKLQRIINTLSTKYRKHHPRSAIERLTLPRAEGGRGIIDIQNLHNKIITNLRSYFHNKTLDSVLHKAISHTDKKLTPLNLSDRSTQKNEKIRKPQEKIDAWLQKSLHGRHRRDLMNTDIDKLASNTWLKRGEVFPETEGFMIAIQDQIIDTRNYRKFIRKDPNLVTDQCRQCHSASETIQHITGACRSLAQTDYKHRHDQVASIIHQYLAIKYNLISEKVSYYKYTPKIILDSTNYKLYWDRTIITDKTIQSNRPDITLLDKRNKVVYLIDIAIPNTHNLTSTFSNKIAKYTDLSIEIKTQWRVSTVKTVPIVISSTGIIPKSLHLSLKTLSIHSNTHILLQKAVILNTCRIVRKFLSLD

SEQ ID NO: 22547 - protein, 1372 aa, Ectomis octomaculata
MKSTFINKNKNTYSCNAVVDTRPYNLRPGSRKLINQIRATTVRPAKRTDNNVVVDCQSLEFRKHQDSNLTFDPSSPSSSSFESSSSAHSFEYPSTSRSRTVTPLSMDVVQEANANKPAPAIGIKCTRKKWSAEMNIFILRTYYEITKMESETRAYLIPLHNKFIEKFPEMQVSRQRVGDQRRAIERNLLLPSHTINQIREEVTAKLRLTETPDTTAVDGPIIHTRSTTSRMRWTNEVNEFIVRSYFKITELESNLSGYRQTLKQMLLTKYPHLSHLTEQRISDQCRVILKNKMIKDNRLQEIKDEVLIELNRIEEEVSQRSRQSLPQPNENTYINTNIHSPTDNTLNLQNNLNMEINNPNQLNFNSLNANYLEEIFIKALNNFILVEPTERPYIPIQKPSKQLAIITQYVNFVLLPKHLKADDDFNKFETIVYCAAFTVCTYNGAKIFPTVKNRPSLQNIPKWQRRLQNRIEDLRTKIGRLTEYIRGNRGKKLKAQIEKIMLQYRIHSKYEDENKNLAQFMDTLKQRLNLYSNRLRRYKKATLRQYQNKQFNNNEKQFYRNLDSSRHNSQANVLQHSSNTPTSEQLHTYWSNIWTNSKSHVEGDWIREDKKIVQNIPEMQFEEIDMGLLKTVIARTHNWKATGSDKIHNYWLKKFTNIHPFLLIHINNFIRRPHSVPSYITRGVTYMLSKDKADTKNPAKYRPITCLQNIYKIITACITELIHKHIDTNNILTEQQKGCRRTNHGCKEQLTIDAVATKQALTRKRNIYTMYIDYKKAYDSIPHSWLIYILEHYKIHPALVKFLKEVMTNWSTALKLNHTETAQINIRRGIFQGDSLSPLWFCLALNPLSTALNAMNIGYKIKHNNMSYALSHLLYMDDIKLYGSNLKEIHKLADITQTFSTDIKMEFGIDKCRIQSVHRGTLEYHSYYTIAGEEVEPVDSETGYKYLGFQQSRQIHHRETKKQLTSKFKERVHKILNTALNSKNTVKAINTYAVPFLTYSFGIIRWSQTDLKKLQRIINTSMTKFRKHHPRSCTQRLTVPKLEGGRGLIDLQNLHNKQITTLRYYFHTRAHESLLHKAVTQADIKYTPLNLQDSSSQKNQCIVEPQQKLNEWLQKSLHGRHRRDLINPQIDKQASNTWLKRGELFPETEGFMIAIQDQVIETRNYKKFIIRDKYLLSDQCRHCHGASETIQHITGACPSISQTDYKHRHDQVAAIIHQYLAFKHRLVTEKIAYYKYTPQPVIESKNFKLYWDRTILTDKTIHYNRPDITLHDKINKIVYLIDIAVPNTHNLSNTYTEKNTKYTDLSIEIKSQWRVKTVKTVPIIISATGVVPKTLRKSLKELDINYLTYILLQKAAIINTCRIVRKFLSIDE

SEQ ID NO: 22548 - protein, 1108 aa, Ectomis pervivax
MVLAKYPHLSHLTEQRISDQCRVIIKNKMIKEYRLQEIKDEVLIELNRIEQEILQRSQESSHQTNETTHIDNDIPTLTNNTINLQNHQTMELNKPNQLNLNSLNTNDIEDIFIKALNNFKLVEPTERPYIPKQKPSKKLAMITQYVNSVLLPKYLNDENEFSKFETIIYCAAFTVCTYNGAKIFTTVENRPSSKNVPKWQRRLQNRIEDLRTKIGRLTEYMRGNMGKKLKAHIDKIILQYRIHSKYEEENNNLAQFMDTLKQKLNLYSNRLRRYKKATLRQYQKNQFNNNEKQFYRTLDSSHHNSQTNVLQHSSNTPTSEQLHTYWSNIWTNSKNHIEGDWIREDKKIVQNIPEMQFEEIDIELLKTVIARTHNWKATGSDRIHNYWFKKFTNIHPLLLRHINNFIKRPHTVPSYITRGVTYMLPKDKADTKNPAKYRPITCLQNIYKIITACITELIHKHIDTNNILTEQQKGCRRMSQGCKEQLTIDAVATKQALTRKRNIYTMYIDYKKAYDYMPHSWLIYILEHYKIHPQLVQFLKKVMTNWSTALKLNHIETAQINIRRGIFQGDSLSPLWFCLALNPLSTALNAINIGYKIKYNNISYALSHLLYMDDIKLYGSNLKEIHKLADITQTFSRDIKMEFGIDKCRIQSVHRGSLECNSYYTFAGEEVEPVDSETGYKYLGFQQSRQIHHKETKRLLTNKFKERVHRILNTALNSKNTIKAINTYAVPFLTYSFGLIRWSQTDLKKLQRIINTSMTKFRKHHPRSCTQRLTLPKLEGGRGLIDLQNLHNKQITTLRSFFYTRAHESLLHKAVTRADIKYTPLNLQDISTQKNQSIVEPQQKLNEWLQKSLHGRHRRDLINPHIDKQASNTWLKRGELFPETEGFMLAIQDQVIETRNYKKFVIRDKNLLSDQCRHCRGASETIQHITGACPSISQTDYKHRHDQVAAIIHQYLAFKYNLVTEKIAYYKYTPQPMIESDNFKLYWDRTILTDKTIHHNRPDITLHDKINKIVYLIDIAVPNTHNLSSTYTEKNTKYTDLSIEIKSQWRVKTVKTVPIIVSATGVVPRTLRDSFKELGIHYFTYIPLQKAAIINTCRVVRKFLSIDE

SEQ ID NO: 22549 - protein, 1362 aa, Helias cama
MIMEKPNVCCKYIKNKTLDNTEHKRMYNLRLLSGNRRRNAEYTAQSFSRNQFVGQDNQQQPTPVTITLSNPSSPISSIHSLFESPSSSPHSFENPTISRSSSTSPMSVDVVWEAIADNSTPATGTKCVRKKWTEEMNIFILRTYYRESKMGTDHSKYLMPLHQKFLERFPNMEVSRQRIGDQRRAILRNKLLRIEKINEIKQEVAEEFKQNTEVLSNIQQQPLNLNLNTEHNNTRMRWSCEINEFIVRTYYRITNLETNRSAYRQPLFQAVIAKYPNPAHLTEQRISDQCRAIIKNKMLSVEKFQRIKDEIILELNEIENNTNITGETQNSQTLIRVNTDTNTTNDIDHVTLRPMQNIHGVDNTTVQNTFITALHDFRSTKPTDRPYIPKQKSSKNLAIISHYINTNILPSYLTENSDFETVQLLLYCAAYTATTCNGIKIRLGHDDKLKINTPTIPKWQQRLQNRIENLRVKIGKLTEYTKGNTSRKLTKQIEEIKIHYKVHAQFEDDNTSLTQFLDTLKQKLNLLANRLRRYKQTTLRKSQNAQYTHNEKLFYRNLEHKQTALIDKNIPTSDGLHEFWSKIWGESKDHIEGEWCILEKELMKNVPEMEFENINLDLLKRIINKTHNWTAPGSDKLHNYWLKKFTNIHPHLLVHINNFIQKPSTLPSYVTQGITYMLPKDVTDTQNPAKYRPITCLQNIYKIITACISELIYTHTNTNNILTEQQKGCRRNSQGCKEQLIIDSVASKQALTKKRNIYTMYIDYQKAFDSVPHSWLVYILHNYKIHPILIDFLKQCMTKWSTVLKLKHLETTEISIRRGIFQGDSLSPLWFCLALNPLSNILNNSNRGFSIKHNNTSNTLSHLMYMDDIKLYGTSFNDIKILADLTQQFSTDIQMEFGIDKCRIQSIRRGKLEPNTYQTASREIIEPVDCDKGYKYLGYAQTTQLHHKEIKRTLTTRFQDRLRKILNTHLNSKNIIKSINTFAIPTLTYSFGVIKWSQNDLKKLQRIINTTMTKHRKHHPRSCVQRLTLPKSEGGRGIIDIRNLHNTQITALKKFFHSKVQHSTLHNATVQADLKYTPLNLQNNASQKNEEITTLQQKLNEWSQKSLHGRHRKDLLNPHVDKIASNEWLRKGELFPETEGFMLAIQDQVVETRNYRKFIIRDKKLVTDQCRHCHSNSETIQHITGACKSITQSDYKHRHDQVASIIHQYIAYKYKLIPHYTPYYKYKPETVIDTEDYKLYWDRTILTDKTVYHNRPDITFYDKAKKTVYLIDIAVPNTHNLTTTHTEKITKYSDLSIEIKSQWRVQNVKTVPIILSSTGMIPRTLHESLHTLNIHRFIYILLQKAVIINTCRIVRKFLAMED

SEQ ID NO: 22550 - protein, 1324 aa, Timochares trifasciata
MRTIGDGGLSRRAPLEQNTTADISHLSPSSSSTSLFPSLQSSPSSYSHSESSTSPIHSPFYLLSPQQFFEDNILRSATVTPTAVDVVQKATAERSVPATVTKRARKKWNDDMNIFILRTYFEITNIETDTSKYLSLLHNKFIEKIPEMQVSKQRLGDQRRAIVRNRLLPIETIDRIREEVKVQLRSIEPLGNIEIIDLNTDNSTQTSRMRWSNELNEFIIRSYLRITYLETNLSGYRQTLKQAVISKFPHLSHLTEQRISDQHRAIINNKMIDDNRIQEIKDEVVIELEKTELGNQHKQLFLPNCQQNINREVTLITQVPDVTQIDPEIENVFIRALNEFSTVDPTQRPHIPKQKPSKKLTSIVNYVNTTLIPKYLKDESDFTTFQTVLYCAAYAVCVSNGAKLYTTLEDTPKIKSLPKWQVRLQKRIEDLRVMIGRLTEHMKGNNSKKLCKHIEKIKLRYKIHSKYEDENITLEQFMDTLKQKLNLLSNRLRRYKKTTLRKSQNSQFINNEKVFYRKLNSLDYQKQTNTDMPTSEQLHTFWSNIWENTKDHTVGGWINADKHLTQNILEMHFESIDIDVLKKVISKTHNWKATGSDKIHNYWFKKFTHIHSHLLHYINNFIKNPDLLPSYITKGITYMLCKDTNDAKNPGKYRPITCLQNIYKIITACITEVIQKHTDFNNILAEEQKGCRRGSQGCKEQLTIDAVVSKQALAKKRNIYTMYIDFKKAYDSVPHSWLIYILEHYKIHPTLIHFLKNTMTRWSTTLKLKTTETQEISIRRGIFQGDSLSPLWFCLALNPLSTALNNSNSGYKIKFNNVLYTLSHLMYMDDIKLYGTNLVEINKLADITQQFSSNIHMEFGIEKCKIQSVRKGKLENNTYYTHLGEAIDPVDFESGYKYLGYQQSRQIHHRETKVMLRKKFKERLNKILNTCLNAKNTIKAINTFAISYLTYSFGIIKWSQTDLKQLQRIINTSMTKFRKHHPRSCTQRLTLPNAEGGRGLIDIQNLHNSQITTLRSFFHIREQQSSLHSAIAKSDCRYTPLNLQDHSTQKNEIITESQQKLENWLGKSLHGRHRRDLINPHVDKYASNIWLKRGELFPETEGFMLAIQDQVIETRNYKKFIIGDKNLVSDQCRHCHSASETIQHITGACRSISQTDYQHRHNQVAAIIHQYLALKYKLILEKTPYYKYKPQAVIESDKFKLYWDRTILTDKTVHSNRPDITFHDKISKTVYLIDIAVPNTHNLTTTYTEKITKYTDLSIELKSQWKVNIVKTIPIIVSATGVIPRSLQDSLQTLDIHKLTYISLQKAVIINTCRLVRKFLSIDN

SEQ ID NO: 22551 - protein, 1339 aa, Orses cynisca
MKPFKTQNKNSKNKSLPEPTLKTRSYNLRSQSRVQRGTPPADASCYSTQVGYSGETCYQDRATQQDQEADIIFLNSNPSSPVSSTFSLFQSPSSSPYSFENQTTSRSSTVTPVPVDVVQVANVIRTASATDIKRARRKWTIEMNIFILRTYYEVTKMETDTSTYLIPLHNKFIERFPDMDVSRQRVGDQRRAIERSKLIPIDTINRIKEEVKTQLALTETLISPSNQVISTQPVSSSSRMRWSNELNEFIVRSYLKITNIETNVSSYRLPLKQAVTSKYPHLSHLSEQRISDQYRTIIKNKRIGEDRLQQIRHEVILELNQTQEQHQPSNIVFENVEPNHTETDVGNCSTAEPTHSHDQLNETHTDSSIIEEIFLKALNDFNSIDPTLRPYLPKQKLSKNLTIATNFLNKTLLPKYINDANNFGTFETIIYCAAFTACKYNGAKIMLTQNYKSRTQYIPKWQRRLQNRIQDLRKMIGRLTEYMKGNRSNRLNRHIEKIRAYYTIHSRHEEDNKNVIQIMDTLKQKLNLLANRLRRYKQTTLRKTQNTQFANNEKLFYRTLDTQHHHNDTDTPTPEELHSYWSNIWTDAKTHIEGDWIEQSKEVVKNIPEMTFEEIDIHVLKAVIGRTHNWKATGSDKIHNYWFKKFTYIHPHLLTHINNFIRNPDTMPQYITKGITYMLPKDKTDIKNPAKYRPITCLQNIYKIITSCITEIIHNHVESNKILAEQQKGCRRRSQGCKEQLTIDAIATKQALTRKRNIYTMYIDYKKAYDSVPHSWLIYILEHYKIHPALIQFLKNTMSNWSTRLKLKQIETEEILIRRGIFQGDSLSPLWFCLALNPLSNMLINTNKGFKIKHNNTSHTLSHLMYMDDIKLYGSNLNDIHKLADITQTFSSDIHMELGIDKCKIQSIHRGHIENNTFVTDNGEEIEPVDNISGYKYLGYQQSRQIHHKQIKQTIITKFKQRLNKILNTALNSKNTIKGINTFAIPYLTYSFGIINWSQTDLQKLQRLINTSMTKHRKHHPRSCIQRLTLPKLEGGRGLIDIQNLHNKQITTLRNFFLQRAQHSTLHNAVTQADIKYTPLNLHDTDTQRNQNIVKPEQKLSDWIQKSLHGRHRHDLVSPNVDKQASNAWLKKGELFPETEGFMVAIQDQVIHTRNYKKYIIRDNTLVTDQCRHCHATSETIQHVTGACRSIAQTDYKHRHDQVAAIVHQYLAFKFNLITEKTSYYKYTPQAVLDSDNFKIYWDRTILTDKTVHHNRPDITLHDKANRIVYLIDVAIPNTHNLTSTHTEKLTKYTDLSIELKSQWKVNIVKTVPIVISTTGVVPRTLHDSLKILNIHPLT

SEQ ID NO: 22552 - protein, 1359 aa, Camptopleura auxo
MEKAHLRRYNLRPLPGGRRGALGAGAECHSLRTIGDGGLSRRAPLEQNTTADIANLSPSSSSISLFSSLQSSPPSYLHSESSSSSTHNSSNQSLRSSPLLVVEDNIPRSSSVTPMAVDVVQKATAERSVPATVTKRARKKWNDNMNIFILHTYFEITQIESDTSKYLSQLHNKFIEKFPEMQVSKQRLGDQRRAIVRNRLLPVETINRIREEVKAKLRVRESLGNTGRLDLNTDTGTQTSRMRWSNELNEFIIRSYFKITSLETNLSGYRQALKQAVISKFPHLSHLTEQRISDQHRAIINNRMIDDNRIQEIKDEIVIELDKIELENPHIQPLTPNSQQNIEPVVTLGTQVPDVTQIDPEIENVFIMALNEFSTIDPTQRLYIPRQKPSKKLTSIVNYVNTTLLPKYLKDGSDFTTFQTVLYCAAFTVCVSNGAKINITKEHTPKIQGVPKWQVRLQKRIEDLRVMIGRLTEHMKGNKSKKLCTHIDKIKLRYKIHSKYEDENTSLEQFMDTLKQKLNLLSNRLRRYKQTTLRKSQNSQFINNEKVFYRKLHSPDSYKQTDPDTNIPTPEQLHSFWSNIWANSKDHTVGGWMDADKNLTGGMKEMHFESINIDILKNVISKTHNWKATGSDKIHNYWFKKFTHIHSHLLHHINNFIKNPELLPSYITKGVTYMLCKDTNDTKNPAKYRPITCLQNTYKIITACITEVIQKHTEINNIIAEEQKGCRRGSQGCKEQLTIDAVVSKQALAKKRNIYTMYIDFKKAYDSVPHSWLIYVLQHYKIHPTLIHFLKNTMTRWSTTLKLKTTETQEINIRRGIFQGDSLSPLWFCLALNPLSTALNNSNAGYKIKLKNVLYTLSHLMYMDDIKLYGTNLAEINKLADITQNFSSNIHMEFGIEKCRIQSVRKGKLENNTYYTHLGEAIDPVDFESGYKYLGYQQSRQIHHREIKVALKKNFKERLHKILNTSLNAKNTIKAVNTFAISYLTYSFGTIKWSQTDLKQLQRIINTSMTKYRKHHPRSCTQRLTLPKLEGGRGLIDIPNLHNSQITTLRSFFYTREQQSSLHSAVIKSDNKYTPLNLQDHSTQKNEIITESQQKLENWLGKSLHGRHRRDLINPHVDKHASNTWLKRGELFPETEGFMLAIQDQVIETRNYKKFIIGDKNLVSDQCRHCHSASETIQHITGACRSISQTDYQHRHNQVAAIIHQYLALKYKLISEKLPYYKYKPQAVIDSDKFKLYWDRTILTDKTIHSNRPDITLHDKTTKTVYLIDIAVPNTHNLTTTYTDKITKYTDLSIELKSQWKVKIVKTVPIIVSATGVVPRTLQDSLQTLDIHKFTYISLQKAVIINTCRLVRKFLSIDS

SEQ ID NO: 22553 - protein, 1349 aa, Signeta flammeata
MKKTNTQENFRKTRSYNLRSLAGRRETPIGSYERAPSQDLAREYHQENTATNSNLSSPISSTYSLFQSPNSSPHSFENPTTSRSSTVTPMPVDVVQEANAIEPAPATAATKRARKKWSVEMNIFILRTYYEVTKMETEKSTYLMPLYNKFIEHFPNMQVGRQRVGDQRRAIERNKLLPIHKINEIKEEVTRQLNLTENSNITQIPEHTTHPGRNTSRIRWSKEINEFIVRSYFTISNLETNISAYRQPLKDAVITKYPHLSHLSEQRISDQYRAIIRNKMVQDNRLQQIKDEVLLELNRIQPEQLHIHSTCNTSQEIVQLNQTQRDIDIDLTLEPHTERFRQNQLNSIHENAAVIEDIFLKALNDFKNVDPTHRPYLPKQKPSKKLAIITNYVNTSLLPKYLIDANDFNTFELIVYCSAFTVCKYNGAKLFSTLTNNTTRIQNIPKWQRRLQNRITELRKMIGRLTEYMRGNTSKKLNMQVEKIKSQYKIHSHYEHDNTNLAQFMDTLKQKLNLLANRLRRYKQATLRKTQNMKFANNEKLFYRTLDSSQHQTEIDSPTSEQLHTFWSNIWTNSKSHTEGEWIKQDKEVVKDIPEMQFIEIDIDILKIVIGRTHGWKTPGSDKIHNYWYKKFTYIHPYLLSYINNFIRDAGTLPRYITKGITYMLPKDKTDTRNPAKYRPITCLQNIYKIITACITELIYKHVESNSILAEQQKGCRRRSQGCKEQLTIDAVATKQALARKRNIYTMYIDYKKAYDSVPHSWLIYILEHYKIHPMLIHFLRKTMENWCTSLKLKHVETEEIHINRGIFQGDSLSPLWFCLALNPLSTALNNSNNGYKIKQNNTSYTLSHLMYMDDIKLYGSNLKEIHKLADITQTFSTDIQMEFGVDKCKMQSVHRGKLELNSYFTGAGEEIEPVDSETGYKYLGYQQSRHIHHKDIKNTLINKFRERLNKILNTALNSKNILKAINTFAIPYLTYSFGIIRWSQTDLKRLQRIINTSMTKHRKHHPRSCTQRLTLPKLEGGRGLIDIQNLHNKQITTLRNYFFLQALNSSLHSAVIKSDIKYTPLNLHDSGTLKNQTIVEPQEKLDGWLQKPLHGRHRRDLINPHVDKQASNEWLKRGELFPETEGFMLGIQDQVIETRNYRKFIMRDNNLVTDQCRHCHTATETIQHITGACRSIAQTDYKHRHDQVAAIIHQYLAFKSKLITEKTAYYKYVPQVVLDSRNFKLYWDRTILTDKTVHHNRPDITFHDKINNIVYLIDVAVPNTHNLTSTHTDKMTKYTDLSIEIKSQWKVKAVKTVPIVISATGIIPRTLHESLRTLNIHPLTFVLLQKAVILNTCRIVRKFLSMDK

SEQ ID NO: 22554 - protein, 1354 aa, Heliopetes ericetorum
MKSITRNKNENINNNLDSTVRERVYNLRPLIKSRQVNIRGENSKNTQNLTSEEKNIYGNICDIIQSNPATPTSSISLFHSPISSPKSYEDPISCRSSIVSQISVDVVQEAIAVEPAPANDTKRVRKKWSDAMNVFILRTYYEITRMESDTSTYLIPLHSKFIEKFPDMDVSRQRVGDQRRAIERNRLLSSDTINKIKEEVRVQLHEADITDKTRIHSLNTQTASNTTRMRWSNNINEVIIYSYYKITALETNMTGYRPKLKETVIAKYPHLSHLSEQRISDQQRAIIRNKMINDARLQEIKDEVVIELNRLEQDTLQNSQKLLENIELDNSHQNYNLDIDTTNNNQNIVHSNITNSPEIESTFTEALNKFNTVDPTDRPYIPVQKPSKKLTILTNYVNTVLIPKYVKNAHDFKTVENILYCGAFTVCTYNGSKIDLSHRKTNKIKDIPHWQKRLQNRIKDLRCMIGRLTEYMRGNTSTKLKKHIKNIKLHYKIHSKYEKENTNLTQFMDTLKQKLNLLSNRLRRYKQTTLRKSQNSLFTNNEKQFYRNLQHSQVSRQSKQNFPTSEQLHTFWSNIWTNSKHHTEGDWMDADKKLVQNVSEMKFEDIDINILRHVIAKTHNWKATGSDKIHNYWFKYFSTLHPYLLTHINNFIKNPELLPAYITKGITYMLPKDENDASNPAKYRPITCLQNIYKIITSCIAELIYKHTDSNNILTEQQKGCRRGSQGCKEQLTIDAVVSKQAIARKRNIYTMYIDYKKAYDSVPHSWLIYILKHYKIHTTLIDFLKNIMNKWCTVLKLHNVETNEISIRRGIFQGDSLSPLWFCLALNPLSTALNDCKYGYNIKTVNTIYTLSHLMYMDDIKLYASNLKELHKLADITHSFSSHIHMEFGLDKCKMQSIRRGHLEHNSFLTETGEEIEPIDEYSGYKYLGYQQSKQIHHTQIKQTLTKNFKGRLHKILKSLLNSRNTIKAINTFAIPYLTYSFGIIKWSQTDLKTLQRMINTSMTKHRKHHPRSCVQRLTLTKLEGGRGLIDIQNLHNKQIKTLRQFFHTRAPCTPLHEAVTTSDLKYTPLNLHDHSTQKCENISEPQLKLDAWLQKPLHGRHRRDLTNPHVDKYASNTWLKRGELFPETEGFMLAIQDQVIETRNYKKFIIRDNSLVSDQCRHCHSASETIQHITSACRSISQTDYKHRHDQVAAIIHQYLGFKHKLITEKTAYYKYKPDPVIESDKFKLYWDRTILTDKTIHNNRPDITLHDKINKIVYLIDIAVPNTHNLTNTYTDKTTKYTDLSIELKSQWKVKTVKTVPIVISATGVVPKTLKDSLNTLNIHSFTYVQLQKAVIINTCRIVRKFLSLDQ

SEQ ID NO: 22555 - protein, 890 aa, Cycloglypha thrasibulus
MIGRLTEHMKGNKSKKLYTHIEKIKLRYKIHSKYEDENKSLEQFMDTLKQKLNLLSNRLRRYKQTTLRKSQNTQFINNEKVFYRKLHSLDTQTDTETNIPTSQQLHTFWSNIWANPKDHTVGDWIDVDKHLTENIIDMHFECIDIHILKKVISKTHNWKATGSDKIHNYWFKNFTYIHPHLLHHINNFIKNPDLLPPYVTKGVTYMLCKDTNDTKNPGKYRPITCLQNIYKIITACITEVVQKHTELNNILAEEQKGCRRGSQGCKEQLTIDAVVSKQALVRKRNIYTMYIDFKKAYDSPHSWLIYILEHYKIHPTLIHFLKNIMTKWTTTLKLKTTETQEISIRRGIFQGDSLSPLWFCLALNPLSTALNNSNVGYKIKSNNVLYTLSHLMYMDDIKLYGTNFAEINKLADITQHFSSNIHMEFGIEKCKVQSVRKGKLENNIYYTHSGEAIDPVDIEGGYKYLGYQQSRQIHHRDIKVILRKHFKERLHKILHTSLNSKNTVKAINTFAISYLTYSFGIIKWSQTDLKQLQRIINTSMTKYRKHHPRSCTQRLTLPKLEGGRGLIDIQNLHNSQITTLRNFFHTREQQSLLHSAIIKSDNKYTPLNLQDHSTQNNEIIIESKEKLQKWLGKSLHGRHRRDLINPHVDKHASNIWLKRGELFPETEGFMLAIQDQVIETRNYKKFIIGDKNQVSDQCRHCHSASETIQHITGACRSISQTDYQHRHNQVAAIIHQYLALKYKLISEKVPYYKYKPQAVIDSNKFKLYWDRTILTDKTIHSNRPDLTLHDKMNKTVYLIDIAVPNTHNLTTTYTDKITKYTDLSIELKSQWKVNVVKTVPIIISATGVVPRTLQDSLQTLDIHKLTYISLQKAAIINTCRLVRKFLSIDT

SEQ ID NO: 22556 - protein, 1364 aa, Pyrgus malvae
MKSSSNKYKNIKINCENVDYTVRKSVYNLRPRLIKSRQENLRGENCCTVQIDDSKKSRSRTPDKKKIQDNTCNISPKNPSSPTSSISLFESPRSSPKSYEDPISSRSSIISQISEDVVQEAEAVEPAPANDNKRARKKWSDAMNIFILRTYYEITRMETDTSTYLIPLHCKFIEKFPDMDVSRQRVGDQRRAIERNRLLPLTTIHQIKEKVRAQLHETEVTNNTPTHFSDTQTANSARMRWSNDINELIIHSYFKITALETNMTSFRPKLKEAIIEKYPQLAHLSEQRISDQQRAIIRNKMINDTRLQEIKDEVILELNTIEQRSLQISQTAHEILDNTQENLNYNISLETPNTNQIHLHTEIQNAAEIESTFIEALNQFNTLDPTDRPYIPVQKSSRKLAVIINYVNNTLLPKHLKDAKEFKVIENILYCAAFTVCTHNGAKIGISRTQRSKSKDTPKWQKRLENRIKDLRCMIGRLTEHMKGNKSTKLNKHIENIKLRYKIHSKYENENTNLTQFMDTLKQKLNLISNRLRRYKQTTLRKSQNILFTNNEKFFYRNLQSSQFSQQSNQILPTSEQLHTFWSNIWAIPKHHNEGDWMDADKKLVRNVPEMKFEGIDINILKHVIAKTHNWKATGSDKIHNYWFKHFTSLHPYLLTHINNFIKNPELLPSYITKGITYMLPKDKNDSNNPAKYRPITCLQNIYKIITACITELIYKHTNSNNILAEQQKGCCRGSQGCKEQLTIDAVVSKQARARKRNIYTMYIDYKKAYDSVPHSWLIFILEHYKIHTTLIHFLKETMNKWSTTLKLHNVETEEISIRRGIFQGDSLSPLWFCLALNPLSTALNNSKYGYNIRNVNTVYTLSHLMYMDDIKLYASNLNELHKLADITQIFSSHIHMEFGIDKCKMQSVRRGHLECNSFITKAGEEIEPLDAINGYKYLGYQQSRQIHHTQTKHTLKSNFRDRLHKILKTSLNSKNTIKAINTFAIPYLTYSFGIIRWSQTDLKCLQRTINTSMTKHRKHHPRSCVQRLTLTKLQGGRGLIDIQNLHNKQIKTLRQFFHTRAQHSPLHEAVTTSDLKYTPLNLHDHSIQKCEDITEPQLKLDEWLQKPLHGRHRRDLISPHVDMHASNTWLIRGELFPETEGFMLAIQDQVIETRNYKKFIIRDNSLISDQCRHCHSASETIQHITSACRSISQTDYKHRHDQVAAIIHQYLAYKHKLIAEKTAYYKYKPEPVIDSNKVKLYWDRTILTDKTIHNNRPDITLHDKINKIVYLIDIAVPNTHNLSSTYTDKNNKYTDLSIELKSQWKAKMVKTVPIVISATGVVPKTLKNSLNTLNIHNLTYVQLQKAVIINTCRIVRKFLSLDE

SEQ ID NO: 22557 - protein, 1300 aa, Camptopleura auxo
MSLFPSPQSSPSSYLHSQSPPSSIHSPFYEILRSSPQSVLEDNIPRSPTITPMAMDVVQKATAERSVPATVSKRARKKWNDDMNIFILHTYFEITKIETDTSTYLSQLHNKFIEKFPEMQVSRQRLGDQRRAIVRNRLLPVETIDRIREEVKAKLRLRESLGNTAAFDLDTDNRTQTPRMRWSNELNEFIIRSYFKITSLETNLSGYRQALKQAVISKFPHLSHLTEQRISDQHRAIINNRMIDDNKLQQIKDEIVIELEKMELENPHNLPFSPNRQQNINHEVILSTQVPDVTQIEHSNAEIENVFIRALNDFSTVDPTQRLHIPRQKPSRKLTSIVHYVNTILLPKYLKDGSDFTTFETMLYCAAFTVCVSNGTKINITSQYTPKIEGAPKWQVRLQKRIEDLRVMIGRLTEHMKGNKSRKLCTHIEKIKLRYKVHSKYEDENTSLEQFMDTLKQKLNLLSNRLRRYKQTTLRKSQNTQFINNEKVFYRKLHSPDHYKETDTDTNIPTSQQLYTFWSNIWGNSKDHTVGGWIDADKHLTENMIEMYFESIDINILKKVISKTHNWKATGSDKIHNYWFKKFTYLHSHLLYHINNFIKNPDLLPSYITKGITYMLSKDTNDTKNPAKYRPITCLQNIYKIITACITEVIQKHTEVNKILAEEQKGCRRGSQGCKEQLTIDAVVSKQALTRKRNIYTMYIDLKKAYDSVPHSWLIYILEHYKIHPTLIHFLKNTMTRWSTTLKLKTTETQEISIRRGIFQGDSLSPLWFCLALNPLSTALNNSNAGYKIKHNNVLYTLSHLMYMDDIKLYGTNSVEINKLADITQHFSSNIHMEFGIEKCKIQSVRKGKLENNTYYTHSREAIDPVDFENGYKYLGYQQSRQIHHRETKEILRNNFKERLRKILNTSLNAKNTIKAINTFAISYLTYSFGTIKWSQTDLTQLQRIINTSLTKYRKHHPRSCTQRLTLPKLEGGRGLIDIRNLHNSQINTLRNFFHTREQQSPLHCAISKSDIKYTPLNLHDHSTQKNEFITEPQQKLEKWLGKSLHGRHRRDLINPHVDKHASNTWLKRGELFPETEGFMLAIQDQVIETRNYKKYIIGDKNLVSDQCRHCHGASETIQHITGACRSISQTDYQHRHNQVAAIIHQYLALKYKLISEKSPYYKYKPQAVIDSDKFKLYWDRTILTDKTINCNRPDITLHDKIKKTVYLIDIAVPNTHNITTTYTDKITKYTDLSIELKSQWKVKIVKTVPIIVSTTGVVPRTLQDSLQTLDINKLTYILLQKAVIINTCRLVRKFLSIDT

SEQ ID NO: 22558 - protein, 1328 aa, Toxidia parvulus
MPKADDGVGCSMQIGNYEKLSSQGLARQNHWDNTTMKSNPSSPISSTYSLFQSPNSSPYSFENPTTSRSSTVTPMPVDVVQEANANEPAPATVTKRARKKWSLEMNIFILRTYYEVTKMETDINTYLTPLYNKFIEHFPNMQVGRQRVGDQRRAIERNKLLPIHKINEIKEEVSRQINLTENSNTEQATHSGLNTSRIRWSNDINEFILRSYFTITKLGTQFSAYRQPLKEAVIAKYPHLSHLSEQRISDQYRAIIRNNMVQENRLQQIKDEVLLELNRIQPELFNSNSPSSTSLEITRLNQTQSNVDNILTLETHTQHSRQNQLNSILENAADIEEIFLRALNYFKSVDPTQRPYLPKQKPSKNLVITTNFVNTSLLPKYLVDPNDFNSFETIVYCAAFTVCKYNGAKLFSTQSNNTSRIQNIPKWQLRLQNRITELRKMIGRLTEYMRGNVSNKLYMQVEKIKSQYRIHSNYEHENNNLTQFMDTLKQKLNLLANRLRRYKQATLRKAQNMKFTNNEKLFYRTLASSQHQIDADTPTSEQLYTYWSNIWTNSKNHTEGDWIKHDEEVVKDIPKMQFNEIDMGVLKTVIARTHGWKAPGSDKIHNYWYKKFTHIHPYLLTHINQFIKNADTLPQYITKGITYMLPKDKTDTRNPAKYRPITCLQNIYKIITACITELIYKHVESNNILAEQQKGCRRRSQGCKEQLTIDAVATKQALICKRNIYTMYIDYKKAYDSVPHSWLIYILDHYKIHPMITQFLRKTMENWCTRLKLKHEETGEIHINRGIFQGDSLSPLWFCLALNPLSTILNNSNKGYKIKQNNTSYTLSHLMYMDDIKLYGSNLKEIHKLADITQSFSTDIQMEFGIDKCKMQSVHRGKLENNSYVTQGGEEIEPVDSETGYKYLGYQQSRHIHHKHIKNTLMNKFRERLNKILNTGLNSKNILKAINTFAIPYLTYSFGIIRWSQTDLKSLQRIISTSMTKHRKHHPRSCIQRLTLPKLEGGRGLIDIQNLHNKQITTLRNFFFIKSLNSPLHEAVIRSDIKYTPLNLNNSGTLNNQTIVEPQEKLDGWLQKPLHGRHRRDLINPHVDKQASNEWLKRGELFPETEGFMLAIQDQVIETRNYRKFIIRDNNLVTDQCRHCHTAPETIQHITGACRSIAQTDYKHRHDQVAAIIHQYLAFKSKLVTEKTSYYKYVPQTVLDSRNFKLYWDRTILTDKTVHHNRPDITFHDKINNIVFLIDIAVPNTHNLTNTHTDKMTKYTDLSIEIKSQWKVKTVKTVPIVISTTGIIPQTLHDSLRTLNIHPLTFVLLQKAVILNTCRIVRKFLSIE

SEQ ID NO: 22559 - protein, 936 aa, Hesperia meskei
MIIYCAAFAVCKHNGAKIVVSQDQNLRTQNTPKWQRRLQNRIQDLRKMIGRLTEYNKGNTSQKLNTHVEKIKEQYKIHSKYEQDNTNVIQFMDTLKQKLNLLANRLRRYKQTTLRKTQNTQFTNNEKLFYRTLDTSQNQTDENIPTSEQLHSFWSNIWTTPKTHVERDWIKPDKEFVKNITSMDFKEIDISILKTVIGKTHSWKATGSDKIHNYWFKKFTYIHSHLLMHINNFIKNPNTLPKYITRRITYMLSKDKADAKNPAKYRPITCLQNIYKIITSCITEIIQTHIEANKILAEQQKGCRRKSQGCKEQLIIDAVATKQAITRKRNIYSMYIDYKKAYDSVPHSWLIYILQHYKIHSTLIQFLKSTMDQWSTRLKLNNIETEEILIRRGIFQGDSLSPLWFCLALNPLSTTLNSTNKGFKIKYSNTSYTLSHLMYMDDIKLYGGNLKEIETLAEITNTFSSDIHMEFGIEKCKIQSIHRGRTENNSFYTSNGEEIEPVDNVSGYKYLGYHQSRHIHHKQIKQTLTIKFKQRLNKILNTNLNSKNIVKAINTYAIPCLTYSFGIITWSQTDLQKLQRIINTSMTRHRKHHPRSCVQRLTLPKLEGGRGLIDIQNLHNKQVTILRNFFFKQAQNSPIHQAVTQSDIKYTPLNLHDTDTQKNENIIKPQEKLGIWLQKSLHGRHRRDLLSPHVDKQASNTWLKRGELFPETEGFMIAIQDQVIETRNYRKFSIHDKNLISDICRHCHTASETIQHITGACRSIAQSDYKHRHDQVAAIVHQYLAFKFKLIPDKLPYYKYSPQTVLDSDKFKLYWDRTILTDKTVHHNRPDITLHDKINKIVYLIDVAIPNTHNLTSTHTEKMKKYTDLSIELKSQWKVNSVRTVPIILSTTGVIPLTLQDSLTLLNIHPLTYALLQKATILNTCRIVRKFLSIDQ

SEQ ID NO: 22560 - protein, 905 aa, Anastrus sempiternus
MRLQKRIEDLRVMIGRLTEYMRGNNSEKLCTQIEKIKSRYKIHSKYEDENASLEQFMDTLKQKLNLLSNRLRRYKQTTLRKTQNNLFVKNEKVFYRTLQTPNSHNHTDNDTDTPTPQELHTFWSNIWANSRDHIVGEWIEPDKKLTENLCEMQFETIDMNLLKKVIAKTHNWKATGSDKIHNFWFKKFTYLHSHLLNHINNFIKNPDTLPSYITKGITYMIAKDKNDKSNPAKYRPITCLQNVYKIITSCIAELIHKHTEINNILAEEQKGCRKGSQGCKEQLTIDAVVSKQALARKRNIYTMYIDFKKAYDSVPHSWLIYILEHYKIHTTLIHFLKNIMTRWSTTLKLKSTETEEIIIRRGIFQGDSLSPLWFCLALNPLSINLNNSNIGYKIKLNNALYTLSHLMYMDDIKLYGTNLQEINKLGDITQQFSSDICMEFGIEKCKIQSIRKGKLENNNYFTAVGEEIEPVDRESGYKYLGFQQSRQIHHKEIKLTIKNKFKERLHKILNTNLNAKNTIKAINTFAVSYLTYSFGTIKWSQTDLKQLQRIINTSMTKHRKHHPRSCTQRLTLPKLEGGRGLIDIQNLHNRQITSLRNFFFTRERQSALHSAIVQCDKKYTPLNLHDHSTQKHETITESQQKLEIWLGKSLHGRHRRDLINPHIDKQASNAWLNRGELFPETEGFMLAIQDQVIETRNYKKFIIRDKNSGTDQCRHCHSASETIQHITGACRSISQTDYQHRHNQVAAIIHQYLALKYKLISVKSPYYKYKPQAVIDTDKYKIYWDRTILTDKTIYNNRPDITFHDKINKTVYLIDIAVPNTHNLASTYTDKITKYTDLSIELKSQWKVKTVKTVPIVISTTGVVPKSLQDSLQILNIHKLTYILLQKAAIINTCRLVRKFLSMDI

SEQ ID NO: 22561 - protein, 1363 aa, Perichares adela
MKPFKTQNKNSKNKFLPDPNVKVRSYNLRSQSGVQRGTSPADDSCYSTQVGYSEETCCQDRARQQDQETEIIIRNSNPSSPVSSTFSLFQSPSSSPHSFENQITSRSSTVTPMPVDVVQVANVIRTAPATDIKRARKKWTTEMNIFILRTYYEVTKMEIDTSTYLIPLHNKFIERFPDMDVSRQRVGDQRRAIERNKLIPIDTINRIKKEVKTQLDLTETVVTSPIQELSTQPASNSSRMRWSNELNEFIVRSYLTITNLETNISSYRLPLKQAVISKYPHLLHLSEQRISDQYRTIIKNKRIGEDRLQQIRHEVILELNQTQEQYQSSNIVCENVEPNYTEPDVHNCSTLESTHSHHELNETYTNIPSIEEIFLKALNDFNSIDPTLRPYLPKQKSSKNLTTATNFLNKTLLPKYMNEATNFSTFETLIYCAAFTACKYNGAKIMLTQTYTPRTQNIPKWQRRLQNRIQDLRKMIGRLTEYMKGNTSNRLNRHIEKIRAHYTIHSKHEEDNKNVIQIMDTLKQKLNLLANRLRRYKQTTLRKTQNTQFSNNEKLFYRTLDAQQYHTDTETPTSEELHSYWSNIWMNAKTHKEGGWIEQDKELVKNIPEMTFEEIDIHSLKAVIAKTHNWKATGSDKIHNYWFKKFTSIHSHLLIHINNFIKNPDTMPQYITKGVTYMLPKDKTDTKNPAKYRPITCLQNIYKIITSCITEIIHNHVESNKILAEQQKGCRRRSQGCKEQLTIDAIATKQALTRKRNIYTMYIDYKKAYDSVPHSWLIFILEHYKIHPALIEFLKITMKNWSTRLKLKQVETDEILIRRGIFQGDSLSPLWFCLALNPLSNILINTNKGFKIKHNNTSHTLSHLMYMDDIKLYGSNLKDIHKLADVTQTFSSDIHMELGIDKCKIQSIRRGRIENNTFVTENGEEIEPVDNISGYKYLGYQQSRQIHHKQIKQTIIIKFKQRLNKILNTALNSKNTVKAINTFAIPYLTYSFGIINWSQTDLQKLQRLINTSMTKHRKHHPRSCIQRLTLPKLEGGRGLIDIQNLHNKQITTLRNFFLQRAQHSTLHKAVTQADIKYTPLNLHDTDTQRNQNIVKPEQKLSDWIQKSLHGRHRHDLMSPHVDKQASNAWLKKGELFPETEGFMVAIQDQVIHTRNYKKFIIRDNTLITDQCRHCHATSETIQHVTGACRSIAQTDYKHRHDQVAAIIHQYLAFKCKLITEKTSYYKYTPQAVLDSDNFKIYWDRTILTDKTVHHNRPDITLHDKINKIVYLIDVAIPNTHNLTSTHTEKLSKYTDLSIELKSQWKVNTVKTVPIVISTTGVVPRTLHDSLKILNIHPMTYILLQKAAIINTCRIVRKFLSIDE

SEQ ID NO: 22562 - protein, 1362 aa, Potamanaxas melicertes
MDKVNSSRYNLRPLPGGRRGALGVGAGCHSMRTIDDGGLSRRAPLEQNTTADIIYLSPSSSSISLFPSLPSSSPSYLHTGSPSLSSVHSSCQSPRSSPQLLVEDIISRSSTVTPMAVDVVQKATAEKSVSAIVTKRARKKWNDDVNIFILRTYFEITKIETDTSTYLPILHNKFIEKFPEMQVSRQRLGDQRRAIVRNRLLPVETIDQIREEVKAQLTVRESLVNTETFDLNNSTQMYRMRWNNELNEFIIRSYFKITALETNLSGYRPALKQAVISKFPHLSHLTEQRISDQNRAIINNRMIDDNRMQEIKDEIAIELHRTEQENIDTQQFLQNTQDSINAEETLRTHISDNNHAHQQLQNIPEVEDAFIRALNEFSDVDPTRRPVMPRQKPSKKLTSIVNFVNTTLLPKYLEYENDFTTFQTVLYCAAFAVCVSNGAKINVTLEHTPKTKFIPKWQRRLQKRIEDLRVMIGRLTEYMRGNKSEKLCTQIEKIKLRYKIHSKYEDENASLEQFMDTLKQKLNLLSNRLRRYKQTTLRKTQNNLFVKNEKVFYRTLYSPNYHNQTNDDTDTPTSQQLHTFWSNIWANSRDHTVGGWIEPDKQVTQSILEMQFENVDMNLLKKVIAKTHNWKATGSDKIHNYWLKKFTFIHSHLLNHINNFIQNPEILPPYITKGVTYMIAKDKNDTSNPAKYRPITCLQNIYKIITSCIAEVIQKHTEINNILAEEQKGCRKGSQGCKEQLTIDAVVSKQALARKRNIYTMYIDFKKAYDSVPHSWLIYILEHYKIHPTLINFLKNTMTRWSTTLKLKSKETEEITIRRGIFQGDSLSPLWFCLALNPLSINLNNSNIGYKIKLNNVLYTLSHLMYMDDIKLYGTNLSEINKLANITQQFSSDICMEFGIEKCKIQSIRKGKLENNKYFTALGEEIEPVDCESGYKYLGYQQSRQIHHKEIKLVLRNKFKERLHKILNTNLNAKNTIKAINTFAISYLTYSFGTIKWSQTELKQLQRIINTSMTKHRKHHPRSCTERLTLPKLEGGRGLIDIKNLHNRQITSLRSFFYTREQSSLHSAIVQSDKKYTPLNLHDHSTQKHETITESRQKLEVWLGKSLHGRHRRDLINPHIDKHASNAWLKRGELFPETEGFMLAIQDQVIETRNYKKFIIRDKNSVSDQCRHCHSASETIQHITGACRSISQTDYQHRHNQVAAIIHQYLALKFKLISLKSPYYKYKPQAVIDTDKFKLYWDRTILTDKTIHSNRPDITFHDKINKTVYLIDIAVPNTHNLASTYTDKITKYTDLSIELKSQWKVKTVKTVPIIISTTGVIPRSLQDSLQTLNIHKLTYISLQKAAIINTCRLVRKFLSRDI

SEQ ID NO: 22563 - protein, 1417 aa, Potamanaxas melicertes
MESTTKARPQVPGGLGYLPDSDGSRAGAASRGAYNLRVRRPRQTTNACSKDSDFLNVKEKSSITSSARSPFESPVSSPPILDYPSCSRSNVKSKVPDSTVEMRRYNLRPLSGGRWRNNAAEPVMINTKRPVEQQPMNIMVSNSNPSSPMSSTHSLFQSPCTSPHSFENPSTSRSTTISPMSVDVVQEANAGKPASAAATINVRKKWSDEMNTFILQTFYEETKLETDLSTYLIPLHAKFIERFPTMQVSRQRVGDQRRAIIRNKLLPAHKINQIRLEIEERLLKNKENTNNIHTSQRDQVLITGNVNTARMRWSNEINECIVRNYYKLTNLETDRTAYRQPLYDAVTTQYPNLIHLSEQRISDQCRAVIYNKMISEERLLQIRDEVAVKLNTCEDNNIHSSTIIQNNSAQCPTVNDEISSENQTAIRNTFSRAISDFEFTEPTDRPFIPKQKSNKNLALITHFINKNLLPIYLTEESSFENTQLMLYCAAYTASIHNGVRIRTTTTNNTSNTHNSPKWQQRLERRIEDLRVKIGKLTEYIRGNTSYKLNKHVEQIKKHYKVHAKFENENCDLTQFLDTLKQKLNVLSNRLRRYKKTTLRKRQNTQFVNNEKLFYRTLENKHNSSVTNIPTSEQLQSFWSGIWGNVEDHEDTEKYIEDFVKEIPEMSFDKINIDFFRTIITKTHNWKAPGSDKLHNYWYKRYTNLHSHLLRHINDFIQKPDTLPAYITQGITYMLPKDDTDTGNPAKYRPITCLQNIYKIITACISELIYKHTESNNILAEQQKGCRRNSQGCKEQLVIDAVASKQALHRKRNIYTMYIDYKKAFDSIPHSWLIYILKNYKIHPTLITFLQNAMGSWSTVLKLKHLQTEAVAIRRGIFQGDSLSPLWFCLAMNPLSYLLNNSNKGFIIKYNNTSYTLSHLMYMDDIKLYGSNVKEINKLADITQQFSMDIKMEFGIDKCRIQSVNKGKIQLNTYETINGETIEPVDENGYKYLGYAQSRQIHHKVIKQNLTHKFRNRLKKILKTHLNARNTTKAINSFAIPILTYSFGVINWSQSDLKNLQRIINVTMTKFRKHHPRSCTQRLTLPKFEGGRGLVDIKNLHNNQITLLRNFFFAKAQQSSLHKVISQVDNKFTPLNLHDNTSQKNQVITDTKQKFDEWLQKSLHGRHRKDLINPHIDKKASNEWLKRGQLFPETEGFMLAIQDQVIETANYRKFIIRDKNITTDRCRHCHSTSETIQHITGACKSISQTDYKHRHDQVAAIVHQCLARKHKLITEYTPYYKYKPKAVYDTDNYKLYWDRTILTDKTIHHNRPDITFYDKKAKIVYLIDIAVPNTHNLVSTYTEKMKKYADLSIEIKSQWKVLKVKTVPIILSSTGIIPYTLQDSLRTLHINHTIYILLQKAVIINTCRIVRKFLAIEE

SEQ ID NO: 22564 - protein, 1366 aa, Cecropterus toxeus
MKSTTVRKKENYLHCDSAVETRTYNLRPRTRARREEIRTNYEVCQVLVTRKHQDIVNISSSSSSSISSNQSLFDSPASSPHSFENPLTSRSATVTPVSVDVVQEAYAKIPVPATVTKCPRKKWNLEMNIFILRTYYEVTKMETDTRAYLIPLHSKFIEQFPDMQVSRQRVGDQRRAIERNGLVPLNTIKQIKKEINAKLLYLTDPSTNTQTHDQVIFTSSNRSRMRWNNEINEFIIRTYFTITNLETNMTAYRQPLRQALITKYPHLSHLSEQRIADQYRAIINNKMIEDTKLQQIKDEVLIELNRIEQEKIHLPDIRHSPSNEIIATRTHSPLVNFTNNRINLENNTTIATDNPNDNQFNTNLLDGTAIEDIFIKAKNDFMNLGPTQRPYLPVLKPSKKSSIAVHYLNSTLLPKYLSNGDNFNELQAILYCAAFTVCTYSGAKICTTIENTHKNSSQNIPKWQVRIQNRIEDLRVNIGRLTEYMRGNTGKKLIRHIEKIKLQFRIHSKYENDNTNLAQFMDTLKQKLNLLSNRLRRYKQTTLRKFQNKQFSNNEKLFYRTLNKSHHNNQTGTDTPTPEQLHTYWSTIWTNSKEHTEGEWIKEDKEIVKNIAQMQFQEVDIDLLKNVIARTHSWKATGSDRIHNYWFKKLTYIHPHLLTHINSFIKEPKTLPSYITKGVTYMLPKDKDDTKNPAKYRPITCLQNFYKIITACISELIHKHIETNNILAEQQKGCRRRSQGCKEQLTIDAVATKQALTRKRNIYTMYIDYKKAYDSIPHSWLIYILRHYKVHPAIIQFLKHMMNNWSTALRLNQLETEQISIRRGIFQGDSLSPLWFCLALNPLSTVLNTSKIGYKIKCSNTSYTLSHLLFMDDIKLYGSNLKEINKLADITQSFSSDIQMEFGIDKCRMQSVYRGRLESNSYYTAIGEEIEPVDSENGYKYLGYQQSRQIHHKETKNLLSSKFKERLHRILNTTLNSKNTLKAINTYAVPLLTYSFGIIRWSQTDLKKLQRTINTTMTKHRKHHPRSCTQRLTLPKLEGGRGLIDLQNLHNKQIVTLRSFFRTRAQESSLHKVVTEADIKYTPLNLHDTAIQKNHTIIESQQKLNEWLQKSLHGRHRRDLINPHIDKQASNAWLKRGELFPETEGFMLAIQDQVIETRNYKKFIIRDTTLVTDQCRHCNGASETIQHITGACSAISQTDYKHRHDQVAAILHQYLAFKYKLVKEKIAYYKYTPQAVIESDNFKLYWDRTILTDKTIHHNRPDITLHDKINKIVYLIDVAVPNTHNLTSTYTDKITKYTDLAIELKSQWKVKTVKTIPIIISTTGVIPRTLQKSLNALDIHYFTYILLQKAVIINTCRIVRKFLALE

SEQ ID NO: 22565 - protein, 1272 aa, Cecropterus bathyllus
MSVDVVQEANASKPAPATGTKGVRKKWSLEMNIFILRTYYEVTKMETDTRAYLIPLYNKFIEQFPDMQVSRQRIGDQRRAIERNRLVPLNIINQIKEEINAQLHNSTDLSNNVPTHDQVILTNSNKSRMRWNNEINEFIIRSYFTVTSLETNMSAYRQPLRQALITKYPHLSYLSEQRISDQYRAIINNKMIEENKLQQIKDEVLIQLNRIEQEKTPRPNTQQSPPNDPTVTRTHSPIFSTTNNRIILQKKTTTETDNPNDNQFNTNMLDGTTIEDIFTKAINDFMNLGPTQRPYLPVLKPSKKSSTAIQFLNSTILQYLSKGDNFDELQTILYCAAFAVCTYSGARIQQHGTTIENTHKNYSQNLPKWQIRIQNRIEDLRANIGRLTEYMRGNTGKKLIRHIEKIKLQFRIHSKYENDNTNIAQFMDTLKQKLNLLSNRLRRYKQTTLRKYQNKQFNNNEKLFYRTLSKPNHNNQTGNGTPTPEQLHTYWSTIWTDSKNHTEGEWIKQDKEIVKNIAQMQFQEVNMDLLKNVIARTHSWKATGSDRIHNYWFKKLTYIHPHLLKHINNFIREPKTIPSYITKGVTYMLPKDIDDTKNPAKYRPITCLQNFYKIMTACISELIYKHIETNNILAEQQKGSRRRSHGCKEQLTIDAVATKQALTKKRNIYTMYIDYKKAYDSIPHSWLIYILGHYKIHPAIIQFLKHIMNNWSTALKLNQLETEQISIRRGIFQGDTLSPLWFCLALNPLSTVLNTSKIGYKLKSSNTSYTLSHLLFMDDIKLYGSNLKEINKLADITQSFSSDIQMEFGIDKCRIQSVHRGQLEYNSYYTVIGEEIEPVDSENGYKYLGYQQSRQIHHKEIKKLLTNKFKERLHKILNTTLNSKNTLKAINTYAVPLLTYSFGIIRWSQTDLKKLQRIINTTMTKHRKHHPRSCTQRLTVPKLEGGRGLIDLQNLHNKQILTLRSFFRSRGQESSLHKVVTEADIKYTPLNLHDTAIQKNHTIKELQQKLNEWIQKSLHGRHRRDLINPHIDKQASNSWLKRGELFPETEGFMLAIQDQVIETRNYKKFIIHDNTLVTDQCRHCNSASETIQHITGACSAISQTDYKHRHDQVAAILHQYLAFKYNLVKEKIAYYKYTPQAVIESDNFKLYWDRTILTDKTIHHNRPDITLHDKINKIVYLIDVAVPNTHNLTSTYTDKITKYTDLSIELKSQWKVKTVKTIPIIISTTGVIPLTLQKSLNALDIHYLTYILLQKAVIINTCRIVRKFLSLE

SEQ ID NO: 22566 - protein, 1378 aa, Cecropterus dorantes
MKSISINKKKNNLHRDSAVETRTYNLRPLTRARKGEIRTNVVSSIMQTDDNGDKVCRTLAPRKHQDFLNVSSSPSSSISPNHSLFDSPASSPHSYENPSTSRSTTVSPVSVDVVQEANARKPAPATGAKSVRKKWSTEMNIFILRTYYEVTKLETDTRAYLIPLHNKFIEQFPDMQVSRQRIGDQRRAIERNGLLPLNTINQIKEEINAQLSKLTDPSTNTPTHDQVIFNSSNNSRMRWNNEINEFIIRSYFTITNLETNMSAYRQPLRQAVITKYPHLSHLSEQRISDQYRAIINNKMIENTKLQQIKDEVLIELNRIDQEKTHRPNTQHSSPNEIIVTRAHSPIFTSTSNRINLENNSTIETDNPNDNQINTNLLDVTTIEDIFTRAKNDFMYLEPTQRPYLPVLKLSKKSSTAIHYLNSTLLPKYLSNGVNFNELQTILYCAAFTVCTYSGAKICTTIENAHKNRSQNIPKWQIRIQNRIEDLRVNIGRLTEYVRGNTGRKLITHIEKIKLQFKIHSKYDDDNTNLAQFMDTLKQKLNLLSNRLRRYKQTTLRKYQNKQFSNNEKLFYRTLNKSNHNNQTDNGTPTTEQLHAYWSTIWTNSKKHTEGEWIKQDREIVKNITQMQFREVDIDLLKNVIARTHSWKATGSDKIHNYWFKKFTYVHSHLLTHINSFIREPETLPSYITKGVTYMLPKDKDDTKNPAKYRPITCLQNFYKIVTACISELIYKHIETNNILGEEQKGCRKRSQGCKEQLTIDAVVTKQALTRKRNIYTMYIDYKKAYDSIPHSWLIYILGHYKIHPAIIQFLKHMMNSWSTTLKLNQLETEQISIRRGIFQGDSLSPLWFCLALNPLSTVLNSSKIGYKIKCSNTSYTLSHLLFMDDIKLYGSNFKEINKLADITQSFSSDIQMEFGIDKCRIQSIHRGKLEYNSYYTTIGEEIEPVDTEIGYKYLGYQQSRQIHHKEIKNLLSIKFKERLHKILNTALNSKNTLKAINTYAVPLLTYSFGIIRWSQTDLKKLQRTINTTMTKHRKHHPRSCTQRLTLPKLEGGRGLIDLQNLHNKQIITLRSFFRSRAQESSLHKVVTEADIKYTPLNLHDSATQQNHTIIESQQKLDEWLQKSLHGRHRRDLINPHIDKQASNTWLKRGELFPETEGFMLAIQDQVIETRNYKKFIIRDNTLVTDQCRHCNGASETIQHITGACSAISQTDYKHRHDQVAAILHQYLAFKYKLVKEKIAYYKYTPQKVIESDNFKLYWDRTILTDKTIHHNRPDITLHDKINKIVYLIDVAVPNTHNLTNTYTDKITKYTDLSIELKSQWKVKTVKTIPIVISTTGVIPRTLQKSLNALDIHYFTYILLQKAVIINTCRIVRKFLSLE

SEQ ID NO: 22567 - protein, 809 aa, Myrinia binoculus
MFYRKLEYQNCSTLVDSNIPTSDDLHKFWSNIWGNPQQHKESAWCQEELITDVPDMQFETVSLELLKTIITRTHNWKSPGSDNLHNYWYKRYTNIHPHLLRHINNFIQNPNTLPAYVTKGITYMLPKDNTDTINPAKYRPITCLQNIYKIITACISELIYKHTVTNNILAEQQKGCRKNSQGCKEQLIIDAVASKQALTKKRNIYTMYIDYKKAFDSIPHSWLIAVLKNYKIHPTLIHFLKNIMVKWSTVLKLKHLETKEIIIRRGIFQGDSLSPLWFCLALNPLSNLLNNCKKGFKINYNNTSYTLSHLMYMDDIKLYGSNLNEINKLADITQQFSADIHMEFGIDKCRIQSINKGKLETNTYHTMGGEIIQPVDSESGYKYLGYAQTRQIHHKEIKVTLINKFKNRLHKILNCYLNAKNTTKAINTFAVPILTYSFGIISWSQSDLKKLQRIINTSMTTHRKHHPRSCIQRMTLPKSEGGRGLIDVQNLHNTQITLLRSFFHEKAQHSILHKAITKADIKHTPLNLHNNTTQKNETTTPPQQKFDEWLQKSLHGRHRRDLINPNFDKAASNEWLKKGELFPETEGFMLAIQDQVIETANYRKFIIRDKNLITDKCRHCHSNSETIQHITGACKSITQTDYKHRHDQVASIIHQYIARKHKLITDYTPYYKYKPKTVLDTDDYKLYWDRTILTDKTIHHNRPDITFYDKKIKTVYLIDIAVPNTHNLLTTHTEKITKYTDLSREIKSQWKVQKVKTIPIIISSTGIIPHTLHVSLRNLNINRSVYILLQKAVILNTCRIVRKFLAIED

SEQ ID NO: 22568 - protein, 754 aa, Erynnis tages
MLFDEINIDLLKTIITKTHNWKAPGSDKLHNYWYKKYTSIHPYLLKYINDFIQHPDTLPAYITQGITYMLPKDNTDTSNPAKYRPITCLQNIYKIITACISHLIYKHTDSHNILAEEQKGCRKNSQGCKEQLVIDAAATKQALSRKRNIYTMYIDYKKAFDSVPHSWLLYILKNYKIHPTIVHFLKNTMGKWSTVLKLNQLETEQIAIRRGIFQGDSLSPLWFCLAMNPLSNLLNNSKKGFVLKCKNTTYRLSHLMYMDDIKLYGSNLKEINKLADITQQFSSDIKMEFGIDKCRIQSVNRGKVELNTYETIDGETIEPVDSENGYKYLGYAQSRQIHHKIIKQTLTHKFKDRLHKILNTHLNARNTIKAINTFAVPILTYSFGVISWSQTDLKKLQQIVNVTMTKFRKHHPRSCTQRLTLPKSEGGRGLIDIKNLHNNQITLLRTFFFTKAQQTTLHKVICQADTKYTPLNLHDNSLQKNQAVIDTQQKLDEWLQKSLHGRHRKDLISPHIDKQASNEWLKKGQLFPETEGFMVAIQDQVIETANYRKFIIRDHNTATDQCRHCHSSSETIQHITGACKSITQTDYKHRHDQIAAIVHQCLARKYNLITEYSPYYKYKPKAIIDTDNYKLYWDRGILTDKTVHHNRPDIIFHDKKAKTVYLIDIAVPNTHNLLSTYTEKMKKYTDLSIVIKTQWSALKVKTVPITLSSTGIIPYTLHDSLRTLNINHSVYILLQKAAIINTCRIVRKFLSIEE

SEQ ID NO: 22569 - protein, 1364 aa, Polyctor polyctor
MKMINILENQKNCNIEDSVATTRTYNLRSLTGSCREKSAAMCSFSTNKTKDHKKQTKSNENSFNSDTSSSDNIFLNTASPTSSNYRVTQSNMSSPQSSQEQTISRSTSVTSVSVDVVQKANAKKSPPATGTKSARKKWSDEMNIFILRTYYEVTEMENNMSDYLTPLHNKFIEKFPNMEVSRQRVGDQRRAIERKELLPLNTINKIKEEVKAVAKITEHIINKKQETDRKTRMKWSNEINECIISNYFKITSLEKNMSGYRHLLKQAVIMKFPHLSHLSEQRISDQQRAIIRNKMIKYNRIQEIKEEIEEELKVIGLQNLNTDQALHSIPETNQEVNKLPESTENDVDLETHIPDHNEVNSIIINNLDIENIFIKALNDFTTVDPTQRPYIPKQKSSKKLATITQYVNTILLPKYLTDAKEFTIVETLIYCAAFTVSKGNGAKIFATAKTRVETQHTPKWQKRLESRIENIRVMIGRLTEYIKGNKGKKLRVHIEKIMLRYKIHSKYEQENTKLEQFMDTLKQKLNLLSNRLRRYKQTTLRKSQNKNFNNNEKLFYRKLNDTNVSKETNNMYPTSEELHTFWSNIWENSKNHTEGPWIKHDQTLMENVSDMQFKSIDIDILKKVIAKTHSWKATGSDKLHNYWFKKFTCIHPHILKYINDFIKNPDSLPLYITKGVTYMLPKDQNDRRNPAKYRPITCLQNIYKIITACITELIHRHTETNKILAEQQKGCRRGSQGCKEQLTIDAVVSKQAVARKRNIYTMYIDYKKAYDSIPHSWLIYILKHYKIHPTIIHFLNHAMTNWCTVLTLNNFETETIKIRRGIFQGDSLSPLWFCLALNPLSTALNNSNAGYIIKHSNISYKLSHLMYMDDIKLYGGNLGEIHKLADITQSFSLDIHMEFGIDKCGIQSVRRGHLESHTYHTAEGENIEPIDSRDGYKYLGYQQSRQIHHRDIKQSLRKKFKERLHKILNTCLNAKNTIKAINTFAIPYLTYSFGIIKWSQTDLKNLKRVINTTMTKHRKHHPRSCTQRLTLPKHEGGRGLIDIQNLHNKQISTLRQFFHNRAQQSALHNAVIHSDTKYTPLNLCEDSIQKNETITESEEKLQEWLHKSLHGRHRRDLINPHIDKHASNAWLKRGELFPETEGFMLAIQDQVIETRNYKKYIIHDKTLLTDQCRHCYSASETIQHITGACRTISQTDYKHRHDQVAAIVHQYLALKYNLVSEKTAYYKYTPQSVIDTEKCRLYWDRTILTDKTIYNNRPDITLYDKINKVVYLIDIAVPNTHNLSSTYTDKIAKYTDLSIELKTQWKVKTVKTVPIVLSATGVIPQTLKTSLKILNIHHLTYMLLQKAAIINTCRIVRKFLSIDE

SEQ ID NO: 22570 - protein, 1370 aa, Celaenorrhinus opalinus
MMSKNNKSKNFNYQLDSTVKTRMYNLRPRPGSNRVNSTQDDNSSDIQIGTIRLNNMNMRNHSLVGQDQQNIDITINSYPSSPLSSNHSLFQSPNSSPLSFENLTLSRSSTVTPMSVDVVQEANATEPVPATATKRARKKWSSEMNIFILRTYYEITRMETDSNNYLIPLHNKFIEQFPDMNVGRQRVGDQRRAIERNKLLPVHTINQIKEEVNAQINLSETINTPKQDQVRSVGSNTTRMRWSNEINEFIMRSYFRVTTLETNLSAFRQTLKQAVVTKYPHLSHLSEQRIADQYRAIINNKMIKDSRLQQIKDEVVFELNRTENLQLRQIPNLSVEIVSKINDTYEHIDKHFTLNTLDPNHNMQSNSTPKNYTTIEGIFLKALSDFDSVDPTQRPYIPKQKPSKNLAVTTHFVNTTLLPKYLTDVSSFTKIQTILYCAAFTVCISNGTKISLTQHKTHRTQSIPNWQRRMQNRIQELRVMIGRITEYMRGNTSKKLRIHIEKIKNQYKIHSKYEHDNTTIAQFMDTLKQKLNLLSNRLRRYKQTTLRKSQNIQFTNNEKLFYRTLNTSHCNSQTQVDIPTSEQLHTFWSNIWTNSKKHTEGEWIQVDKKMVKDIPQMKFEEVDINLLRNVIARTHNWKATGSDKVHNYWYKKFTNIHPHLLTHINNFIRKPDSMPPYITKGITYMLPKDETDTKNPAKYRPITCLQNIYKIITACITELIHRHTDINNILTEQQKGCRKGSQGCKEQLTIDAIVSKQALTRKRNIYTMYIDYKKAYDSVPHSWLIYILQHYKIHPVLINFLNNAMTRWCTTLKLKDVETEEISIRRGIFQGDSLSPLWFCLALNPLSTALNNSKLGYKIKYKNPSCTLTHLMYMDDIKLYGSNLNEIHKLADITQSFSLDIQMEFGIDKCRIQSVHRGKLENNIMYTVAGEVIEPVDCVSGYKYLGYQQSRQIHHKEIKQTLINQFKARLNKILNTALNSRNTIKSINTYAIPYLTYSFGIITWSQTDLKKLQRIISTSMTTHRKHHPRSCTQRLTLDKMEGGRGIIDIQNLHNNQITTLRRYFHIKAEQSSLHKAVTQADLKYTPLNLHNNTTQKNQTITETKQKLEEWFQKSLHGRHRRDLINPQVDKQASNTWLKKGDLFPETEGFMLAIQDQVVETRNYRKFIIRDNTLLSDQCRHCHSASETIQHITGACRCISQTDYKHRHDQVAAIIHQYLAFKHKLIAEKTAYYKYKPQTVIDSGKFKLYWDRTILTDKTIHYNRPDITFHDKINKIVYLIDVAVPNTHNLTSTYTEKLTKYTDLSIELKSQWKVNTVKTVPIILSATGVIPRTLEKSLKDLDIHCLTYVLLQKAVIINTCRIVRKFLSINN

SEQ ID NO: 22571 - protein, 1376 aa, Telegonus anausis
MKSTNNSKKKNNCHQDSAVETRTYNLRPLTRARREEIRTNEANSTKQTNNSKDGVSEALNTHNHQNIINTFSNSSSPISSDHSLFESPRSSPHSFQNPSTSRSATVTPMSVDVVQEANASNPAPATGTKGARKKWSLEMNIFILRTYYELTKMETDTRAYLIPLHNKFIEKYPDMQVSRQRIGDQRRAIERNRLLPLHTIDQIKEDTKANLNLTEPSNNTLNRDQIIFTRANNSRMRWNNEINEFIVRSYFTITNLELNMSAYRQPLRQALITKYPHLSHLSEQRISDQYRAIINNKMIQDNRLQEIKDEVLIKLNRIEQENLRNSQTQQSPPIETSTTCPNSTTVISTNNSPNLRNDIATESDEPNDNQFNSKSVNATLIEDMFIEALNNFMNVDPTQRPYIPVQKPSKKLSSATHYMNSTLLPKYLTDMSEFNKLETILYCAAFTVCTYNGAKIYTTLVNRHNSQNIPKWQIRLQNRIQDLRAKIGRLTEYMRGNTGKKLSLHIEKIKLQYKIHSKYENDNTNLTQFMDTLKQKLNLLSNRLRRYKQTTFRKNQNKQFINNEKLFYRTLNASNHNSQTDTDIPTAEQLHTYWSSIWTNPRSHTEGEWMKQDNEIVRNIPEMQFEEIDIDLLKIVIARTNSWKATGSDRIHNYWFKKLTYIHPHLVTHINNFIKNPDSLPTYITKGITYMLPKDKDDTKNPAKYRPITCLQNFYKIISACITELIHKHIDINNILAEQQKGCRRRSQGCKEQLTIDAVAAKQALTRKRNIYTMYIDYKKAYDSIPHSWLIHILNHYKIHPTLVLFLETTMNNWSTALKLNQVETAQINIRRGIFQGDSLSPLWFCLALNPLSTILNTSNIGYKIRYNNTSYTLSHLLFMDDIKLYGSNLKEINKLADITQAFSSDIHMDFGIDKCRIQSVHRGRLEYNSYNTITGEVIQPVDSDTGYKYLGYQQSRQIHHKETKKVLTNKFKQRLYKILNTALNSKNTIKAINTYAVPLLTYSFGIIRWSQTDLKKLQRTINTSMTKYRKHHPRSCTQRLTLPKLEGGRGLIDLQNLHNKQITTLRSFFHTRAQESSLHKAVTKADIKYTPLNLHDKSTQKNQTITEPQQKLDEWLQKSLHGRHRRDLINPHIDKQASNTWLKRGELFPETEGFMLAIQDQVIETRNYKKFIIRDNTLITDQCRHCNGASETIQHITGACRAISQTDYKHRHDQVAAIIHQYLALKHKLVTEKIAYYRYMPQAVIESDKFKLYWDRTILTDKTIHHNRPDITLHDKINKIVYLIDVAVPNTHNLTSTYTDKITKYTDLSIELKSQWKVKTVRTVPIIISTTGVIPRTLQNSLNTLGIHSFTYILLQKAAIINTCRIVRKFLSLEE

SEQ ID NO: 22572 - protein, 1373 aa, Cecropterus bathyllus
MKSTSNIKEKNNWHRDSAVETRTYNLRPLTRARREEIRTNAASSAEQTDENVVGRSQTLATHKRSDIINISSNPPSPISSDHSLFESPISSPHSFENRSTPRSATVTPMSVDVVQGANARKPAPATGTKGVRKKWSLEMNIFILRTYYEVTKMETDNRAYLISLHNKFIEQFPDMQVSRQRVGDQRRAIERNKLIPLNIINQIKEEMRAQLHLTDSLTDTPTHNQVIFSNSGKSRMRWNNEINEFIIRSYLTITNLETNMSAYRQPLRQALITKYPHLSYLSEQRISDQYRAIVNNKMVRDNRLQEIKDEVVIELNRVDQENSQSSHTQQFPSIDTTVTCTHSDISTSPNNGIQNDITTESNKPDNNWYNPLIGTEIEKIFTKALHTFANVEPTQRPYVPVQKPSKKLATAIHYINSTLLPKYLTEVSEFNKLETIIYCAAFTVCTFNGARINETLCNTHKSQNIPKWQIRLQNRIQDLRAKIGRLTEYMRGNTGKKLSTHVEKIKVQYKIHSKHENDNNNLAQFMDTLKQKLNLLSNRLRRYKQTTLRKHQNKQFINNEKLFYRRLNTSNYSNNQTDMDIPTTEQLHTYWSSIWTNSKSHTEGNWIKEDKETVRNIPEMQFIKIDMDLLKSVIARTNSWKAAGSDRIHNYWFKKFTYIHPHLLTHINNFIRNPNTLPTYITKGVTYMLPKEKNDTKNPAKYRPITCLQNFYKIITACISELIYTHIDTNNILAEQQKGCRRRSQGCKEQLTIDAVAARQAFTRKRNIYTMYIDYKKAYDSIPHSWLIYILEHYKIHPSLIQFLKNTMNNWRTVLKINQIETPEINIRRGIFQGDSLSPLWFCLALNPLSTVLNSSDIGYKIRHNNTSYTLSHLLFMDDIKLYGTNRKEINTLADITQAFSADIHMNFGIDKCRIQSVHRGCLEYNSYYTITGEVIEPVDRDTGYKYLGYQQSRQIHHKETKKVITNKFKERLHKILNTALNAKNTSKAINTYAIPLLTYSFGIIRWSQTDLKKLQRTINTSMTKHRKHHPRSCSQRLTLPKLEGGRGLIDLQNLHNKQITTLRSFFHKRAEESPLHKAVTEADIKHTPLNLSDNTTQKNQSITEPQQKLDEWLKKSLHGRHRRDLINPHIDKQASNTWLKRGELFPETEGFMLAIQDQVIETRNYKKFIVRDNSLITDQCRHCNGASETIQHITGACRAISQTDYKHRHDQVAAIIHQYLALKHKLVTEKTAYYKYNPQAVIETNNFKLYWDRTILTDKTIHHNRPDITLHDKINKIVYLIDVAVPNTHNLTSTYTDKITRYTDLSIELKAQWKVKSVRTVPIIVSTTGVIPQTLQNSLNALGIHPYTYILLQKAAIINTCRIVRKFLSLDE

SEQ ID NO: 22573 - protein, 1371 aa, Cecropterus phalaecus
MKSTRKNIKKKNNCHRDFAVETRTYNLRPLTRARREEGRTNVASSVEQTDEDVVGRCQTLAMHKHSDIINISPNPSPISSDHSLFDSPISSPNSFENSSRSTTVTPMSVDVVQEANARKPAPATDTKSVRKKWSLEMNIFILRTYYEITKMETDIRAYLIPLHNKFIEKFPDMQVSRQRIGDQRRAIERNKLLPLNTIHQIKKDIKAQLDLTDSLKDTPKHNQVIFTSSSKSRMRWDNEINEFIVRNYFKITNLETNMSAYRQPLRQALITKYPHLSHLSEQRISDQCRAIVNNKMIKDNRLQEIKDEVVIALNRTEQENSQSSLTQQSSSIKTIVTCTHSDTIISTNNVIQNHVTTESSEPDSNRFHPLIGTEIERIFITALNTFTNVEPTQRPYIPVQKPSKKVATATDYINSILLPKYLAEAREFNKLETIIYCAAFTVCTFNGARINETLYNTHNSQNIPKWQIRLQNRIQDLRAKIGRLTEYIRGNTGKKLSMHVEKIKVQYKIHSKHENDNTNLSQFMDTLKQKLNLLSNRLRRYKQTTLRKHQNKQFINNEKLFYRKLNASNYNNNQTDIDIPTTEQLHTFWSSIWTNSKSHTEGDWIKEDKEIVRNIPEMQFIEIDIDLFKSVIARTNSWKATGSDKIHNYWFKKFTYIHPHLLTHINNFIRNPHTLPLYITKGVTYMLPKERHDTKNPAKYRPITCLQNFYKIITACITELIYKHIDTNNILAEQQKGCRRKSQGCKEQLTIDAVAAKQAFTKKRNIYTMYIDYKKAYDSIPHSWLIYILEHYKIHPSLIQFLKNTMSNWRTVLKINQIETPEIDIRRGIFQGDSLSPLWFCLALNPLSTILNNSNIGYKISHSNTSYTLSHLLYMDDIKLYGTNRKQINTLADITQAFSSDIHMNFGIDKCRIQSVHRGRLEYNSYYTIIGEEIEPVDRNNGYKYLGYQQSRQIHHKETKKELTNKFKERLHKVLNTALNSKNTFKAINTYAIPLLTYSFGVIRWSQTDLKKLQRTINTSMSKHRKHHPRSCTQRLTLPKLEGGRGLIDLQNLHNKQITTLRSFFHKRAEESFLHKAVTEADIKHTPLNLSDNTTQKNQSIKEPQQKLDEWLQKSLHGRHRRDLINPHIDKQASNTWLKRGELFPETEGFMLAIQDQVIETRNYKKYIIRDNTLITDQCRHCHGASETIQHITGACRAISQTDYKHRHDQVAAIIHQYLALKHKLITEKTAYYKYIPQAVIETDNFKLYWDRTILTDKTIHHNRPDITLHDKINKIVYLIDVAVPNTHNLTSTHTDKITRYTDLSIELKAQWKVKSVRTVPIIVSTTGVIPRTLQNSLNVLGIHSYTYILLQKAAIINTCRIVRKFLSLDE

SEQ ID NO: 22574 - protein, 1377 aa, Astraptes naxos
MKSTSNNKNKNKYHHDSAVETRTYNLRPLTRARREEIRTNAASSTKKTDNSEDEVCQVLETHNHQNIINKFSNPSSSISSDHSLFESPRSSPHSFENTFTSRSATVTPMSVDVVQEANATNPTPATGIKGARKKWTLEMNIFILRTYYEVTKMETDTRAYLIPLHDRFTQQYPDMQVSRQRIGDQRRAIERNRLLPLHTINGIKEEIRLQLNLAQASANTLTDDQVIFTSSNKSRMRWNNEINEFIIRNYFIITKLGTNMSAYRQPLRQALITKYPHLSHLSEQRISDQYRAIINNKMIEDNRLQEIKDEVSIELNRIEQDNSQNLLTQQSPSIETFVTNSQFDTVTSTNNTINLRNNITTESDEPNNNNQFNFDPLMGSAIEDIFIKTLNNFMNVEPIQRPYIPAQKPSKKLTNATHYINSTLLPKYLRDVSEFNKFETIVYCAAFTACTYNGAKICTTQLNTHNSQNIPKWQIRLQNRIQDLRVKIGRLTEYMRGNTGKKLIMHIEKIKGQYKIHSKYENDNTNLAQFMDTLKQKLNLLSNRLRRYKQTTLRKNQNKQFINNEKLFYRKLNTSNHNNQTYTDTPTAEQLHTYWSSIWSNPRSHTEGEWIKPDKELVRNIPEMQFEEIDIDILKIVIARTNSWKATGSDKIHNHWFKKFTYIHSHLVTHINNFIRNPDTLPTYITKGVTYMLPKDKDDTKNPAKYRPITCLQNFYKIITACITELIHRHIDINNILAEQQKGCRRRSQGCKEQLTIDAVVSNQALTRKRNIYTMYIDYKKAYDSIPHSWLIHILEHYKIHPTLVQFLKNTMNNWSTALKLNQVETAQINIRRGIFQGDSLSPLWFCLALNPLSTVLNTSNMGYKIRHNNTSTTLSHLLFMDDIKLYGSNLKEINKLADITQAFSSDIHMDFGIDKCRVQSVHRGRLEYNSYNTITGEVIEPVDSDTGYKYLGYQQSRQIHHKETKKALTNKFKQRLYKILNTTLNSKNTIKAINTYAVPLLTYSFGIIRWSQTDLKKLQRTINTSMTKYRKHHPRSCTQRLTLPKLEGGRSLIDLQNLHNKQITTLRSFFHTRAQESSLHKAVTEADIKYTPLNLHDKSTQKSQIIKEPQQKLDEWLQKSLHGRHRRDLINPHIDKNASNTWLKRGELFPETEGFMLAIQDQVIETRNYKKFIIRDNTLITDQCRHCNGASETIQHITGACRAISQTDYKHRHDQVAAIIHQYLALKYKLVTEKIAYYKYTPQAVIESDKFKLYWDRTILTDKTIHHNRPDITLHDKINKIVYLIDVAVPNTHNLTSTHTDKITKYKDLSIELKSQWKVKTVRTVPIIVSTTGVIPRTLQNSLNALGIHSYTYVLLQKAAIINTCRIVRKFLSLDE

SEQ ID NO: 22575 - protein, 1380 aa, Chioides albofasciatus
MKSLTKSKNENNCHRDSAVETRTYNLRPLTRGRREVIRTNDASSTVQTDESEDVGCRSPVSHKNQAVNNLSSNPSSPLSSNHSLFESPKSSPHSFENPSTSRSTTISPMSVDVVREANAGNPVPATGTKTGRKKWSVEMNIFILRTYYEVTNMETDTRSYLIPLYTKFTEQFPHMEVSRQRVGDQRRAIERNRLLPVHTIKQIKEEVKARLNLNESLSNTPRHEQIIFTNSNTTRMRWSNEINEFIIRSYFTITNLESNMSAYRQQLKQAVVTKYPHLSHLSEQRISDQYRAILNNKMVEDNRLQEIKDEVLIELNKIEQEKSQRSPIQRSTHSSIENILIHTHTPTAISINNNTNIRDEETSETDNRNNNDVNSNPVNGTAIEDIFIEALNNFVNVEPTHRPYLPAQKPSKKLTSTTNYINSSLLPKYLTDVNDFSKFETILYYAAFTVCTYMGAKIYTTLENTRKNNSQNIPKWQIRLQNRIEDLRIKIGRLTEYMRGNKGKKLIAHVENIKLHYKIHSKFENDNTNLAQFMDTLKQKLNLLSNRLRRYKQTTLRKYQNCQFSNNEKLFYRNLNASQYSNQPGTDNPTPEQLHSYWSNIWTNPREHTEGEWINKDKEIVKNISEMQFEEIDIELLKSVIAKTHSWKATGSDKIHNYWFKKFTYIHPQLLIYINNFIKNPHTLPSYITKGVTYMLPKDKNDSKNPGKYRPITCLQNFYKIITGCITELIHTHIDTNNILAEQQKGCRRKSQGCKEQLTIDAVAAKQALTRKRNIYTMYVDYKKAYDSVPHSWLIHILEHYKIHPALIQFLKNSMNNWSTVLKLNQVETAQINIRRGIFQGDSLSPLWFCLALNPLSTILNSSNNGYRIRHNDTSYTLSHLLFMDDIKLFGSNLKQIHKLADITQSFSSDIHMDFGIDKCRIQSIHRGHLEHNSYYMVTGEEIEPVDTNTGYKYLGYQQSKQIHHKETKKLLTNKFKERLYKILNTALNSRNTLKAINTYAVPLLTYSFGIIKWSQTDLKKLQRTINTTMTKYRKHHPRSCTQRLTLPKLEGGRGLIDLQNLHNGQITKLRSFFHTRAQDSSLHKAVTEADIRYTPLNLHDNSTQKNQTITESQQKLDEWLQKSLHGRHRRDLINPHIDKQASNTWLKRGELFPETEGFMLAIQDQVIETRNYKKFIIRDNNLITDQCRHCKGASETIQHITGACSAISQTDYKHRHDQVAAIIHQYLAFKYKLVKEKIAYYKYTPQAVIDSDKYKLYWDRTILTDKTIHHNRPDITLHDKFNKIVYLIDVAVPNTHNLTSTYADKITKYTDLSIEIKSQWKVKTVKTIPIILSTTGVIPRTLQSSLNALDIHYFTYILLQKAVIINTCRIVRKFLSLEE

SEQ ID NO: 22576 - protein, 1372 aa, Cecropterus confusis
MKSTNNIKEKNNLQHDSAVVTRTYNLRPLTRARREEIRTNASSSVELTDENVVRSCEVLATHKRPDIINISSNPPSPISSDHSLFDSPISSPHSFENPSTSRSATITPMSVDVVQEANARKPAPATGTKGVRKKWSLEMNIFILRTYYEVTKMETDNRAYLIPLHNKFIEQFPDMQVSRQRVGDQRRAIERNRLIPLNTINQIKEEIKAQLDLTDCLTDTPTHNGVIFPSSSKSRMRWNNEINEFIIRSYFTITNLETNVSAYRQPLRQALITKYPHLSYLSEQRIADQYRAIVNNKMVRDNRLQEIKDEVVIELNRVDQENSRNLHTQQLPSIDTIVTCSYSGTSTSLNNSIQNDVTTESNKLDNNRFNLLVGCEIENIFIKTLNTFTNVEPTQRPYIPVQKPSKKLATATHYINSTLLPKYLTEVNDFNKLETIIYCAAFTVCTFNGARINETLYTHNSQNTPKWQIRLQNRIQDLRVKIGRLTEYMKGNTGKKLRTHVEKIKIQYKIHSKHENDNNNLAQFMDTLKQKLNLLSNRLRRYKQTTLRKEQNKQFIKNEKLFYRKLNTSNHSNNQTDIDIPTTEQLHTYWSSIWSNSKSHTEGDWIKEDKELVRNIPEMQFIKIDIDLLKSVIARTKSWKATGSDRIHNYWFKKFTYTHPYLLTHINNFIRNPNTLPTYITKGVTYMLPKEKDDTKNPAKYRPITCLQNFYKIITACITELIYTHIDTNNILAEQQKGCRRRSQGCKELLTIDAVAAKQAFTRRRNIYTMYIDYKKAYDSIPHSWLMYILEHYKIHPSLIKFLKNTMNNWRTVLKINQIETPEINIRRGIFQGDSLSPLWFCLALNPLSTVLNNSNIGYKIRNNNTSYTLSHLLFMDDIKLYGSNRKEINTLADITQAFSSDIHMNFGIDKCRIQSVHRGRLEYNSYYTITGEVIEPVDRDTGYKYLGYQQSRQIHHKETKKVLTNKFKERLHKILNTALNAKNTSKAINTYAIPLLTYSFGIIRWSQTDLKKLQRTINTSMTKHRKHHPRSCTQRLTLPKLEGGRGFIDLQNLHNKQITTLRSYFHKRTEESSLHKAVTEADIKHTPLNLSDNTTQKNQSIVEPQHKLDEWLHKSLHGRHRRDLINPHIDKQASNTWLKKGELFPETEGFMLAIQDQVIETRNYKKFIIRDNTLITDQCRHCHGASETIQHITGACRAISQTDYKHRHDQVAAIIHQYLALKHKLVTEKTAYYKYIPQAVIETNNFKLYWDRTILTDKTIHHNRPDITLHDKINKIVYLVDVAIPNTHNLTSTYTDKITRYTDLSIELKAQWKLKSVRTVPIIVSTTGVIPQTLQNSLNALGIHSYTYILLQKAAIINICRIVRKFLSLDE

SEQ ID NO: 22577 - protein, 1373 aa, Autochton longipennis
MKCTNNFKKKNNCHHRDSAVETRTYNLRPLTRARREENRTKAAGSTENTVGNEGERSQALSTHKHSDIINLCLNPPSPISSEHSLFHSPTSSPHSFENQFTSRSSTVTPMSVDVVQEANARKPAPATDTKGVRKKWSLEMNIFILRSYYEVTKMETDNRAYLTPLHNKFIEQFPDMQVSRQRVGDQRRAIERNNLLPLNTINHIKEEIKAQLDLTESSTNTSTHNQVIFPSSSTSRMRWNNEINEFIIRSYYTITNLETNMSAYRQPLKQALINKYPHLSNLSEQRISDQYRAIVNNKMIKDSRLQEIKDEVVIELNKIEQENTRRLHIQQSPSIETLGTCTDSNIATDTNNGRNVQNNITIDKPDNNTFNPSIGTAIEDIFIKTLNTFINTEPTQRPYIPVQKPSKKLATATHYINSILLPKFLTDDIEFNKLETLIYCAAFTACTFNGARINETLNNSHNSQNIPKWQIRLQNRIEDLRAKIGRLTEYMRGNVGKKLSMHVEKIKLQYKIHSKYENDNTNLAQFMDTLKQKLNLLSNRLRRYKQTTLRKQQNKQFINNEKHFYRTLNSSNYNNQTDMELPTTEQLHSYWSSIWTNSRSHTEGKWIKEDKELVRNLPEMQFQEVDIDLLKIIIARTNSWKATGSDRIHNYWFKKLSYIHPYLLTHINNFITHPNTLPTYVTKGITYMLPKDKNDTKNPAKYRPITCLQNFYKIITACITELIHKHIDTNNILAEQQKGCRRRSQGCKEQLTIDAVAAKQAFTRKRNIYTMYIDYKKAYDSIPHSWLLYILEHYKIHPSLIQFLKNTMNNWRTVLKINQVETPEINICRGIFQGDSLSPLWFCLALNPLSTVLNASKIGYNIRHNKTSYTLSHLLFMDDIKLYGSNRKEINKLADITQAFSSDIHMSFGIDKCRIQSVHRGHLEHNSYYTFTGEVIEPVDMDTGYKYLGYQQSRQIHHKEIKKVLTNKFKERLHKILNTALNSRNTSKAINTYAIPLLTYSFGIIKWSQTDLKNLQRTINTSMTKHRKHHPRSCTQRLTLPKLEGGRGLIDLQNLHNKQITTLRSFFHTRAEESSLHKAVTEADIKHTPLNLYDNTTQKNQSIIEQKQKLDEWLQKSLHGRHRRDLINPHIDKHASNTWLKRGELFPETEGFMLAIQDQVIETRNYKKFIIRDNTLITDQCRHCKGASETIQHITGACRAISQTDYKHRHDQVAAIIHQYLALKYKLITEKTAYYKYIPQAVIEKDNFKLYWDRTILTDKTIYHNRPDITLHDKINKVVYLIDVAVPNTHNITSTYTDKITKYTDLSIELKAQWKVKSVRTIPIIISTTGVIPRTLQTSLNALGIHSFTYILLQKAAIINTCRIVRKFLSLDE

SEQ ID NO: 22578 - protein, 1372 aa, Cecropterus tehuacana
MKSTNNIKEKNNLQHDSAVVTRTYNLRPLTRARREEIRTNAASSVELTDENVVRSCEALATHKRPDIINISSNPPSPISSDHSLFNSPISSPHSFENPSTSRSATISPMSVDVVQEANARKPAPATGTKRVRKKWSLEMNIFILRTYYEVTKMETDNRAYLIPLHNKFIEQFPDMQVSRQRVGDQRRAIERNRLVPLNTINQIKEEIKAQLDFTDCLTDTPTHNGVIFSSSSKSRMRWNNEINEFIIRSYFTITNLETNVSAYRQPLRQALITKYPHLSYLSEQRIADQYRAIVNNKMVRDNRLQEIKDEVVIELNRVDQENSRNSHTQQLPSIDTIVTCSYSGTSTSLNNSIQNDVPTESNKLDNNRFNPLIGCEIENIFIKTLNTFTNVEPTQRPYIPVQKPSKKLATATHYINSTLLPKYLTEVNDFNKLETIIYCAAFTVCTFNGARINETLYTHNSQNTPKWQIRLQNRIQDLRAKIGRLTEYMKGNTGKKLRTHVEKIKVQYKIHSKHENDNNNLAQFMDTLKQKLNLLSNRLRRYKQTTLRKEQNKQFIKNEKLFYRKLITSNHSNNQTDIDIPTTEQLHTYWSSIWTNSKSHTEGDWIKEDKELVRNIPEMQFIKIDIDLLKSVIARTKSWKATGSDRIHNYWFKKFTYTHPYLLTHINNFIRNPNTLPTYITKGVTYMLPKEKDDTKNPAKYRPITCLQNFYKIITACITELIYTHIDTNNILAEQQKGCRRRSQGCKELLTIDAVAAKQAFTRTRNIYTMYIDYKKAYDSIPHSWLIYILEHYKIHPSLIKFLKNIMSNWRTVLKINQIETPEINIRRGIFQGDSLSPLWFCLALNPLSTVLNNSNIGYKIRNNNTSYTLSHLLFMDDIKLYGSNRKEINTLADITQAFSSDIHMNFGINKCRIQSVHRGRLEYNSYYTITGEVIEPVDRDTGYKYLGYQQSRQIHHKETKQVLTNKFKERLHKILNTALNAKNTSKAINTYAIPLLTYSFGIIRWSQTDLKKLQRTINTSMTKHRKHHPRSCTQRLTLPKLEGGRGFIDLQNLHNKQITTLRSYFHKRAEESSLHKAVTEADIKHTPLNLSDNTIQKNQSIVEPQHKLDEWLQKSLHGRHRRDLINPHIDKQASNTWLKKGELFPETEGFMLAIQDQVIETRNYKKFIIRDNTLVTDQCRHCHGASETIQHITGACRAISQTDYKHRHDQVAAIIHQYLALKHKLVTEKTAYYKYIPQAVIETNNFKLYWDRTILTDKTIHHNRPDITLHDKINKIVYLVDVAIPNTHNLTSTYTDKITRYTDLSIELKAQWKLKSVRTVPIIVSTTGVIPQTLQNSLNALGIHSYTYILLQKAAIINTCRIVRKFLSLDE

SEQ ID NO: 22579 - protein, 946 aa, Telegonus cellus
MHVEPTQRPYIPVQKPSKKLTSATHYVNSTVFPKYLTDVSEFNKFETIVYCAAFTVCTYNGAKICTTQLNTHNPQNIPKWQIRLQNRIQDLRAKIGRLTEYMKGNTGKKLIMHIEKIKVQYKIHSKYENDNTNLAQFMDTLKQKLNLLSNRLRRYKQTTLRKNQNKQFINNEKLFYRKLNTSNHNNQTYTDTPTAEQLHTYWSSIWSNPRSHTEGEWIKPDNEIVRNIPEMQFEEIDIDILKIVIARTNSWKATGSDKIHNHWFKKFTYIHSHLVTHINNFISKPDTLPTYITKGVTYMLPKDKDDTKNPAKYRPITCLQNFYKIITSCITELIHNHIDTNNILAEQQKGCRRRSQGCKEQLTIDAVVAKQALTRKRNIYTMYIDYKKAYDSIPHSWLIHILEHYKIHPALVQFLKNAMNNWSTALKLNQVETAPINIRRGIFQGDSLSPLWFCLALNPLSTVLNTSNIGYKIRHNNTKYTLSHLLFMDDIKLYGSNLKEINKLADITQAFSSDIHMDFGIDKCKIQSVHRGRLEYNSYNTITGEVIEPVDSDTGYKYLGYQQSREIHHKETKKVLTNKFKQRLYKILNTTLNSKNTIKAINSYAVPLLTYSFGIIRWSQTDLKKLQRTINTSMTKYRKHHPRSCTQRLTLPKLEGGRGLIDLQNLHNKQITTLRSFFNTRAQESSLHKAVTEADIKYTPLNLHDNSTQKNQTITEPQQKLNEWLQKSLHGRHRRDLINPHIDKQASNTWLKRGELFPETEGFMLAIQDQVIETRNYKKFIIRDNILITDQCRHCNGASETIQHITGACRAISQTDYKHRHDQIAAIIHQYLALKYKLVTEKSPYYKYTPQAVIESDKFKLYWDRTILTDKTIHHNRPDITLHDKINKIVYLIDVAVPNTHNLTRTYTDKITKYTDLSIELKSQWKVKTVRTVPIIISTTGVIPRT

SEQ ID NO: 22580 - protein, 1370 aa, Cecropterus evenus
MKSTINIKMKNNLHRDSAVETRTYNLRPLTRARREVSRTNSTSSAKQIDENVVRSCQALATPTLSDTIKTSSNIPSSVSSDHSLFESPISSPHSFENPSTSRSVTPMSVDVVQEASARKPAPATGCKSVRKKWSLEMNIFILRTYYEVTKMETDNRAYLITLHNKFIEQFPDMQVSRQRVGDQRRAIERNRLLPLNTINQIKGEVKAQLDLNDSLTNTPTYSHVIFTNSSESRMRWSNEINEFIIRSYYTITNLETNKSAYRQPLRQALISKYPHLSYLSEQRISDQYRAIVNNKMIKDNRLQEIKDEVGIEIHKIDQENSQNLHTQQPPSIETLVTCTQSNTVAATNNDMQNNVTISDKFDNNQFNPLIGTEIETIFMKALNTFMNVDPTQRPYIPVQKPSKKLATAIHYINSTLFPKYVTEAIEFNKLETIIYCAAFTVCTFNGARIYETRCNTHNSQNIPKWQIRLQNRIQDLRVKIGRLTEYMKGNTGKKLSMHVEKIKLQYKIHSKHEDDNTNLAQFMDTLKQKLNLLSNRLRRYKRTTLRKDQNKQFGNNEKLFYRKLNTSNYSNNQTDIDFPTTEQLHAYWSGIWTNAKCHTEGNWIKEDKKIVRNMPEMQFQEIDIDLLKSVIARTNSWKATGSDRIHNYWLKNFTYIHPHILTHINNFIRKPNTLPTYITKGVTYMLPKEKDDTKNPAKYRPITCLQNFYKIITACITELIYKHIDSNNILAEEQKGCRRGSQGCKEQLTIDAVVSKQALARKRNIYTMYIDYKKAYDSIPHSWLIYILEHYKIHPSLIQFLKNTINNWRTVLKLKHAETPEINIRRGIFQGDSLSPLWFCLALNPLSTILNSSNIGYKIRHNNTSYTLSHLLFMDDIKLYGSNRKQINTLADITQAFSSDIHMDFGIDKCRIQSVHRGRLVYNSYYTITGETIEPVDKDTGYKYLGYQQSRQIHHKETKDVLTNKFKERLHMILKTALNSKNTLKAINTYAIPLLTYSFGIIRWSETDLKKLQRTINTSMTKYRKHHPRSCTQRLTLPKIEGGRGLIDLQNLHNKQITTLRSFFHRRAEESPLHKAITETDTKHTPLNLSDHTTQKNQSIIEPQQKIDEWLQKSLHGRHRRDLINPHIDKLASNTWLKRGELFPETEGFMLAIQDQVIETRNYRKYIIHDNTLITDQCRHCNGASETIQHITGACRAISQTDYKHRHDQVAAVIHQYLALKHKLITEKTAYYKYIPQAVIETDNFKLYWDRTILTDKTIHHNRPDITLHDKINKIVYLIDVAVPNTHNLPSTYTDKITRYTDLSIELKAQWKVKAVRTVPIILSTTGVIPRTLQNSLNALGIHSYTYILLQKAVIINTCRIVRKFLSLDE

SEQ ID NO: 22581 - protein, 1378 aa, Codatractus imalena
MMSANKCKNKDNCNRDSAVETRSYNLRPLTRGRREAIRNNDACSTMQTDNSENVSRQVLAVHESRGIISLPSNPSSPISSSHSLFESPRSSPHSFENPSTSRSTTLTPMSIDVVQEANAKNSAPATGIKRARKKWTAEMNIFILRTYYEVTKMEMDTRTYLTPLYNKFIERFPDMEVSRQRVGDQRRAIERNRLLPLHTINQTKEEVKTRLSLNESLTTTPIQDQNIVTNSNATRMRWNNEINEFIIRSYFTITKLETNMTAYRQQLKKALITKYPHLLHLSEQRISDQYRAIINNNMIKENRLQEIKDEVVIELSREEQENAQRSHLEQSLHFSSKTTETYIHSPTKTCTNNTVNQQTNQVATEIGNNNNHFNSNLLNSTVIEDIFVKALNSFIDVEPTQRPYIPIQKQSKKLATITHYINSTLLPKYLTDVSEFNKLQTILYCAAFTVCIYNGAKISTTQGNTHNLQNIPKWQIRLQNRIQDLRANIGRLTEYMRGNRGKKLITHIEKIKLRYKIHSKYEDENTNLAQFMDTLKQKLNLISNRLRRYKQTTFRKYQNKQFTNNEKLFYRTLNTLHNNNQNDTGIPSSEQLHTYWSSIWTNSRNHKEGEWIEQDKEIVKYIQEMQFKEIDIDLLKTVIARTHSWKATGSDKIHNYWFKKFSHIHPHLLTHINNFIRKPDTLPGYITKGVTYMISKDKEDTKNPAKYRPITCLQNFYKIITACITELIYKHIETNNILAEQQKGCRRRSQGCKEQLTIDAVAAKQALTRKRNIYTMYIDYKKAYDSVPHSWLIYILEHYKIHPALINFLKNIMTNWNTVLKLNQVESAEIRIRKGIFQGDSLSPLWFCLALNPLSTVLNNSKIGYKIRHNNTSYTLSHLLFMDDIKLFGSNLKEIHKLADIIQSFSSDIQMEFGIDKCKTQSIHRGCLEHNSYYTTTQEEIEPVDSDTGYKYLGYQQSRQIHHREIKQLLTNRFKERLYKILNSALNSKNTLKAINTYAVPLLTYSFGIIRWSQTDLKKLQRIINTSMTKQRKHHPRSCTQRLTLPKLEGGRGVVDLQNLHNRQITTLRSFFHTRARQSHLHKAVIEADIKYTPLNLYDSTTQKNQNITVPQQKLDEWLKKSLHGRHRRDLINPHIDKQASNTWLKRGELFPETEGFMLAIQDQVIETRNYKKFIIRDNTLITDQCRHCSGASETIQHITGACRAISQTDYKHRHDQVAAIIHQYLALKYKLVKEKHPYYKYIPQAVLESDKFKLYWDRTILTDKTIHHNRPDITLHDKNNKIVYLIDVAVPNTHNLTSTYTDKVTKYTDLSIELKSQWKVKTVKTVPIIISTTGVVPKTLQNSLNTLDIHYYTYIMLQKAAIINTCRIVRKFLSLEE

SEQ ID NO: 22582 - protein, 882 aa, Autochton zarex
MRGNTGRKLTMHIEKIKSQFKIHSKYENDNTNLAQFMDTLKQKLNLLSNRLRRYKQTTLRKHQNQQFSNNEKLFYRTLNKSNHNNLYGTDTPTPEQLHTYWSAIWTNSKDHIEGEWIKKDKEIVKNISQMQFDEVDIDLLKTVITRTHNWKATGSDRIHNYWFKKFTYIHPHLLIHINNFIRKPETLPGYITKGVTYMLPKDKDDTKNPAKYRPITCLQNLYKIITACISELIYKHIDINNILAEQQKGCRRMSQGCKEQLTIDAVATKQALTKKRNIYTMYIDYKKAYDSIPHSWLIYILEHYKIHPGLIQFLKHTMKNWSTTLKLNQLQTEEINIRRGIFQGDSLSPLWFCLALNPLSTVLNTSNIGYKIRYSNTLYTLSHLLYMDDIKLYGSNLKEIYKLADITQSFSSDIQMEFGIDKCKMQSIHRGHLEHNSYYTVIGEEIDPVDSENGYKYLGYQQSRQIHRKDTKKLLIIKFKERLYKILNTALNSKNTLKAINTYAVPLLTYSFGIIRWSQTDLKKLQRTINTTMTKHRKHHPRSCTQRLTLPKLEGGRGLIDLQNLHNRQIITLRSFFNSRAQESSLHKAITAADIKYTPLNLHDNAIQKNHTITEPQHKLNEWLQKSLHGRHRRDLINPHIDKQASNTWLKRGELFPETEGFMLAIQDQVIETRNYKKFIIRDNTLVTDQCRHCSSASETIQHITGACSAISQTDYRHRHDQVAAIIHQYLAFKHKLVKEKMAYYKYTPQAVMESDNFKLYWDRTILTDKTVHHNRPDITLHDKINKIVYLIDVAVPNTHNLTNTYADKITKYTDLSIELKSQWKVKTVKTIPIIISTTGVIPRTLQKSLNALDIHYLTYILLQKAVIINTCRIVRNFLSLE

SEQ ID NO: 22583 - protein, 1378 aa, Codatractus cyledis
MMSSNKCKKKNNCHRDSAVETRSYNLRPLTRGRREAIRKNDACSTMQTDNSENVSYQALAVHESRNIIRIPSNPSSPISSSHSLFESPRSSPHSFENPSTSRSTTLTPMSIDVVQEANAKNSAPATGTKRVRKKWTAEMNIFILRTYYEVTRMEMDTRTYLTPLHNKFMERFPDMEVSRQRVGDQRRAIERNRLLPLHIINQIKEEVKTRLSLNESLTTTPIQDQTIVTNSNATRMRWNNEINEFIIRSYFTITNLETNLTGYRQQLKKALITKYPHLSHLSEQRISDQYRAIINNNIIKENRLQEIKDEVVIELSRKEQENTQRSHLEQSLYFSTKTTETHIHSPTKACTNNTVNQQENQVATEIGNNNNQFNLNLLNSTVIEDIFVKALNNFINVQPTQRPYIPIQKQSKKLATITHYINSTLLPKYLTDVREFNKFETILYCAAFTVCIYNGAKISTTKGNTHNLQNIPKWQIRLQNRIQDLRANIGRLTEYMRGNRGKKLITHIEKIKLQYKIHSKYEDENTNLAQFMDTLKQKLNLISNRLRRYKQTSFRKYQNKQFTNNEKLFYRTLNTSHHNNQNDTGTPSTEQLHTYWSSIWTNSRNHKEGEWIEQDKEIVKYIQEMQFKEVDIDLLKNVITRTHSWKATGSDKIHNYWFKKFTHIHSHLLTYINNFIRNPDTLPGYITKGVTYMISKDGEDTKNPAKYRPITCLQNFYKIITACITELIYKHIETNNILAEQQKGCRRRSQGCKEQLTIDAVAAKQALTRKRNIYTMYIDYKKAYDSVPHSWLIYILEHYKIHPALINFLKNIMINWSTVLKLNQVESAEISIRRGIFQGDSLSPLWFCLALNPLSTVLNNSNIGYKIRHNNTSYTLSHLLFMDDIKLYGSNLKEIHKLADITQSFSLDIQMEFGIDKCKTQSIHRGCLEHNSYYTLTQEEIQPVDSDTGYKYLGYQQSRQIHHREIKKLLTNRFKERLCKILNSALNSKNTLKAINTYAVPLLTYSFGIIRWSQTDLKKLQRIINTSMTKQRKHHPRSCTQRLTLPKLEGGRGLVDLQNLHNRQITTLRSFFHTRARQSSLHKAVIEADIKYTPLNLYDNTTQKNQNITIPQQKLDEWLQKSLHGRHRRDLINPHIDKQASNTWLKRGELFPETEGFMLAIQDQVIETRNYKKFIIRDNTLLTDQCRHCNGASETIQHITGACRAISQTDYKHRHDQVAAIIHQYLALKYKLVKEKHPYYKYIPQAVLESDKFKLYWDRTILTDKTIHHNRPDITLHDKNNKIVYLIDVAVPNTHNLTTTYKDKITKYTDLSIELKSQWKVKTVKTVPIIISTTGVIPKTLQNSLNTLDIHYFTYIILQKAAIINTCRIVRKFLSLEE

SEQ ID NO: 22584 - protein, 1379 aa, Telegonus cellus
MKSTKNCKNKNNHHRDSAVETRTYNLRPRTRGRIEEIRTNAAASNMQIDNSEDGDCQAVATRNHQEFINSPLNLLSPISSDHSLFESPGSSPHSFESPFTSRSTNVSPMSVNVVQAANARNPAPVTATKNARKKWSVEMNIFILRTYYEVTKMETDTRTYLIPLHNKFIEQFPDMQVSRQRVGDQRRAIERNRLLPLDTINQIKDEIKATLLTESTTNEQSHNQVIFTSTNKSRMRWNNEINEFIVRSYFAITHLETNMSAYRQPLRQALITKYPHLSHLSEQRVSDQYRAIINNKMIENNRLQEIKDEVLIELNRIEQEKSHRSHTQPPPTMETIGTCTHSPTLVSTNNSINLQNRITVERNNPNNNQFNSSVLNGTEIEDTFIDALNNFICIEPTKRPYIPVQKPSKKLEIAIDYINSTLLPKYLKNVTDFAKLESILYCAAFTACTYNGAKICTTLGNTYKTNSQNIPKWQMRLQSRIQDLRANIGRLTEYMRGNRGRKLITHIEKIKLHYKIHSKYENENTNLAQFMDTLKQKLNLLSNRLRRYKQTTLRKNQNKQFNNNEKLFYRTLNTSNHGNQTDTDTPTPEQLHTYWSSIWTNSINHTEGEWIKQDKEIVKNVPEMQFEEIDIDTLKNVIARTHNWKATGSDRMHNYWYKKFTYIHPHLLTHINNFIRKPNTLPSYITKGVTYMLPKDKNDTNNPAKYRPITCLQNFYKIITACITELIHKHIETNNILAEQQKGCRRRSQGCKEQLTIDAVVAKQALTKKRNIYTMYIDYKKAYDSIPHSWLIYIFEHYKIHPALIQFLKNTMDNWSTVLKLNHLETAQIKIRRGIFQGDSLSPLWFCLALNPLSTVLNTSNIGYKIRHNNSSYTLSHLLFMDDIKLYGSNLSEIHKLADITQSFSSDIRMDFGIDKCRIQSVHRGHLEYNSYYTVIGEEIEPVDSETGYKYLGYQQSRQIHNKDTKKILIDKFKQRLYKILNTALNSKNTLKAINTYAVPLLTYSFGVIRWSQTDLKKLQRIINTTMTKHRKHHPRSCIQRLTLPKLEGGRGLIDLQNLHNKQIITLRSFFHTRAQESSLHKAVAEADMKYTPLNLHDNATQTNQTITEPQQKLDEWLQKSLHGRHRRDLINPHIDKQASNTWLKRGELFPETEGFMLAIQDQVIETRNYKKFIIRDNTLLTDQCRHCNGASETIQHITGACSAISQTDYKHRHDQVAAIIHQYLALKYKLVNEKIAYYKYTPQAVIESDNFKIYWDRTILTDKTIHHNRPDITLHDKINKIVYLIDIAVPNTHNLRTTYTDKITKYTNLSIELKSQWKVKTVKTIPIIISTTGVIPRTLQTSLNALGIHYFTYILLQKAVIINTCRIVRKFLSLDEYN

SEQ ID NO: 22585 - protein, 950 aa, Telegonus anausis
MNVTDFRKLESILYCAAFTACAYNGAKISTTVGNTHKPNSQNIPKWQMRLQRRIQDLRANIGRLTEYMRGNRGRKLITHIEKIKLHYKIHSKYENDNTNLSQFMDTLKQKLNLLSNRLRRYKQTTLRKNQNKQFNNNEKLFYRTLNTSNHDNQTDTDTPTSEQLHTYWSSIWTNSKNHTEGEWIKQDKEIVKNIPEMQFEEIDIDTLKNVIARTHNWKATGSDRIHNYWYKKFTYIHSHLLTHINNFIRKPNTLPSYITKGVTYMLPKDKNDTNNPAKYRPITCLQNFYKIITACITELIHKHIETNNILAEQQKGCRRKSQGCKEQLTIDAVVAKQALTKKRNIYTMYIDYKKAYDSIPHSWLIFILEHYKIHPAIIQFLKNTMDNWNTVLKLNQLETAQINIRRGIFQGDSLSPLWFCLALNPLSTVLNTSNIGYKIRHNNTSYTLSHLLFMDDIKLYGSNLGEIHKLADITQSFSSDIHMDFGIDKCRIQSVHRGHLEYNSYYTVVGEEIEPVDSETGYKYLGYQQSRQIHHKDTKKLLTDKFKERLHRILNTALNSKNTLKAINTYAAPLLTYSFGVIRWSQTDLKKLQRIINTTMTKHRKHHPRSCIQRLTLPKLEGGRGLIDLQNLHNKQIITLRSFFHTRAQESSLHKAVTEADIKYTPLNLHDNATQPNQAITESQQKLNEWLQKSLHGRHRRDLINPHFDKQASNTWLKKGELFPETEGFMLAIQDQVIETRNYKKFIIRDNTLLTDHCRHCNGASETIQHITGACSAISQTDYKHRHDQVAAIIHQYLALKYKLVKEKIAYYKYTPQAVIESDNYKLYWDRTILTDKTIHHNRPDITLHDKINKIVYLIDVAVPNTHNLRSTYSDKITKYTNLSIELKSQWKVKTVKTIPIIISTTGVIPTTLQTSLNALGIHYFTYILLQKAVIINTCRIVRKFLSLDE

SEQ ID NO: 22586 - protein, 1223 aa, Urbanus proteus
METDTRTYLTQLHNRFIEKFPDMQVSRQRLGDQRRAIERNRLLPLDTINIIKDEIKTQLLTESTTNEQIHNQVLFTDTNKSRMRWSNEINEFIVRTYLTITHLETNMSAYRQPLRQALIRKYPHLSHLSEQRISDQYRAIVNNNMLGSNRLQEIKDEVLIELNRVEQENSQRSRTQQPPTLESIGTRSLSPTMMSSNNNINLQNCVSEETNNPNNNQFNSNLLNSNEIEQTFIEALNNFINVEPTQRPYIPVQKQSKKFVIAVDYINFTLLPKYLKYLDDFRKLESILYCAAFTACTYNGAKICSTSGNTHKSSSNNVPKWQVRLQSRIQDLRANIGRLTEYMRGNRGRKLVTHVEKIKLHYKIHSKYENDNTNLSQFMDTLKQKLNLLSNRLRRYKQTTLRKNQNKQFNINEKLFYRTLNTSNNQSNTETPTPEQLHTYWSSIWTNPKSHTEGEWIKKDKEIVKNISEMQFKEIDIDTLKNVIARTHNWKATGSDRLHNYWFKKFTYIHPHLLTHINNFIRNPNTLPSYITKGVTYMLPKDKNDTNNPAKYRPITCLQNLYKIITACIAELIHKHIETNNILAEQQKGCRRRSQGCKEQLTIDAVVAKQALTKKRNIYTMYIDYKKAYDSIPHSWLIYILEHYKIHPALIHFLKNTMNNWNTILKLNHLETAQINIRRGIFQGDSLSPLWFCLALNPLSTVLNTNNIGYKIRHHNASYTLSHLLFMDDIKLYGSNLTEIHKLADITQSFSSDIHMDFGIDKCRIQSVHRGHLECNSYYTVVGEEIEPVDSVTGYKYLGYQQSRQIHHKHTKKILTDKFKERLYKILNTSLNSKNTLKAINTYAVPLLTYSFGIIKWSQTDLKKLQRTINTSMTKHRKHHPRSCTQRLTLPKLEGGRGLIDLQNLHNKQITTLRSFFHTRAQDSSLHKAITEADIKYTPLNLHDIATQTNQTITEPQQKLDEWLQKSLHGRHRRDLINPYIDKQASNTWLKRGELFPETEGFMLAIQDQVIETRNYKKFIIRDNNLLTDQCRHCNAASETIQHITGACSAISQTDYKHRHDQVAAIIHQYIALKYKLVKEKIAYYKYTPQAVIESDSFKLYWDRTILTDKTIHHNRPDITVHDKINKIVYLIDVAVPNTHNLRSTYTDKITKYTNLSIELKAQWKVKTVKTIPIIISTTGIIPRTLQTSLNALGIHYFTYILLQKAVIINTCRIVRKFLSLDE

SEQ ID NO: 22587 - protein, 1372 aa, Urbanus sp.
MKSTKNRQNKNNYHRDSAVETRTYNLRPLNRRRKEEIRAGAAGSQLESSEDVSQTFAMQKHEDFSKTSPNPSSPISSDHSLFESPRSSPHSFEISSTSRSTTVSPMSVNVVQTANAENPAPATGNKGIRKKWSDEMNIFILRTYYEVTKMDTDTRTYLAQLHNRFIEKFPDMQVSRQRVGDQRRAIERNRLLPLDTINIIKDEIKTQLLTESTTNQQIHNQVLFTNTNKSRMRWNNEINEFIVRTYLTITHLETNMSAYRQPLRQALIRKYPHLSHLSEQRISDQYRAIVNNKMLGSNRLQELKDEVLIELNRLEQEKSQRSHTQHPPTIESIGTRSLSPTLISSNNNINLQNCVTEETNNPSNNQFNSNLLNSNEIEQTFIEALNTFINVEPTQRPYIPVQKQSKKIVIAVHYINSTLLPKYLKYLDDFKKLESILYCAAFTACTYNGAKICTTSGNTRKSSSINVPKWQVRLQSRIQDLRTNIGRLTEYMRGNRGRKLITHIEKIKLHYKIHSKYENDNTNLAQFMDTLKQKLNLLSNRLRRYKQTTLRKNQNKQFNHNEKLFYRTLNTSNNQADSETPSPEQLHTYWSSIWTNSKNHTEGEWIKKDKEIVKNIPEMQFKEIDIDTLKNVIARTHNWKATGSDRLHNYWFKKFTYIHPHLITHINNFIRKPNTLPSYITKGVTHMLPKDKNDTNNPAKYRPITCLQNLYKIITACIAELIHKHIETNNILAEQQKGCRRRSQGCKEQLTIDAVVSKQALTKKRNIYTMYIDYKKAYDSIPHSWLIYILEHYKIHPALIQFLKNTMDNWSTILKLNHLETAPINIRRGIFQGDSLSPLWFCLALNPLSTVLNTNNIGYKIRHHNALYTLSHLLFMDDIKLYGSNLTEIHKLADITQSFSSDIHMDFGIDKCRIQSVHRGHLENNSYYTVVGEEIEPVDSDTGYKYLGYQQSRQIHHKHTKKILTDKFKERLYKILNTSLNSKNTLKAINTYAVPLLTYSFGIIKWSQTDLKKLQRTINTSMTKHRKHHPRSCTQRLTLPKLEGGRGLIDLQNLHNKQITTLRSFFHTRAQESSLHKAITKADIKYTPLNLHDNAAQTNQTITEPQQKLDEWLQKSLHGRHRRDLINPYIDKQASNTWLKRGELFPETEGFMLAIQDQVIETRNYKKYIIRDNNLLTDQCRHCNAASETIQHITGACSAISQTDYKHRHDQVAAIIHQYIALKYKLVKEKIAYYKYTPQAVIESDSFKLYWDRTILTDKTIHHNRPDITVHDKINKIVYLIDVAVPNTHNLRSTYTDKITKYTNLSIELKSQWKVKTVKTIPIIISTTGIIPRTLQTSLNALGIHYFTYILLQKAVIINTCRIVRKFLSLDE

SEQ ID NO: 22588 - protein, 1380 aa, Epargyreus spanna
MKSTNNRKNKNIFHQDSDMERRTYNLRSLTRARREALTTNAVSSTVQTVDSEDVGYHGLLSHKRQDTNNIPSNPSSPLSSNYSLFESPKSSHHSFENPSTSRSTTVSPMSVDVVQEANAGNPVPATGTKHGRKKWSVEMNIFILRTYYEVTKMETDTRSYLIPLYNKFTAQFPNMEVSRQRVGDQRRAIERNRLLPVHTINQIKEEVKSRLNVNESLTNTPTQDQIIFTNSNTSRMRWNNEINEFIIRSYFTITNLESNKSAYRSQLKQALVAKYPHLSHLSEQRISDQYRAIVNNKMIEDNRLQEIKDEVIIELNSMEREKSQRSPIQHNTQFLNEKTLLHTHTPIDISINSNTNVRNEEITETNNRNVNDVNSNLVNGTAIEDIFTKALTNFTNVEPKHRPYIPVQKQSKKLTTITHYINSNLLPKYLTDVSDFSKFETVLYCAAVTACTYNGAKIYTTLGNTYKNKSQNLPRWQIRLQNRIQDLRVKIGRLTEYMSGNRGKKLIIHIEKIKIQYKIHSKHENDNTHLAQFMDTLKQKLNLLSNRLRRYKQTTLRKHQNIQFANNEKLFYRNLTTSQYNNQTNTETPTLEQLHTYWSNIWTNSKKHTEGEWINKDKEIVKNIPEMQFDEINIELLKIVIGRTHSWKATGSDKLHNYWFKKFTYVHPHLLTYINNFIKNPHTLPSYITKGVTYMLPKDKNDSKNPAKYRPITCLQNVYKIITACITELIYTHIDKNNILAEQQKGCRRRSQGCKEQLTIDAVAAKQALTRKRNIYTMYVDYKKAYDSIPHSWLIYILEHYKIHPALIEFLKNTMNNWSTALKLNQIETAQINIRRGIFQGDSLSPLWFCLALNPLSTILNSINSGYKIRHNHTSYTLSHLLFMDDIKLYGSNLKEIHKLADITQSFSSDIHMDFGIDKCRIQSVHRGRLEYNSYYTLTNEEIEPVDTDTGYKYLGFQQSRQIHHKETKKLLTNKFKERLYKILNTALNSKNTIKAINSYAVPLLTYSFGIIKWSQTDLKKLQRTINTTMTKHRKHHPRSCTQRLTLPKLEGGRGLIDLQNLHNNQITKLRSFFHTSSHDSPLHKAVTEADIKYTPLNLHDNSIQKNQTITEPQQKLDEWLQKSLHGRHRRDLINSHIDKQASNTWLKRGELFPETEGFMLAIQDQVIETRNYKKFIVHDNKLVTDQCRHCKGASETIQHITGACSTISQTDYKHRHDQVAAIIHQYLAFKYKLIKEKLAYYKYTPQTVIDSNNYKLYWDRTILTDKTIHYNRPDITFHDKINKIVYLIDVAVPNTHNLTSTYTDKITKYTDLSIEIKSQWKVKTVKTIPIVISTTGVIPRTLQTSLNALGIHYFTYILLQKAVIINTCRIVRKFLSLEE

SEQ ID NO: 22589 - protein, 1374 aa, Autochton potrillo
MKTTKNCKNKNKYYCDSAVETRTYNLRPLTRRHKEERTDAAASTIHIDNSEDIGCQAFALHNHQDNINTYSNPSSPISSDHSLFESPRSSSHPFESLSTSRSTTATPMSVDVVQEAYAKNPTPATGTKRTRKKWSDEMNIFILRTYYEVTKMGTDTRTYLIPLHNKFIQKFPDMQVSRQRVGDQRRAIERNRLLPLHIINQIKEEIKAQLNLIEPSTQGHDQVTFTSSNKSRMRWNNEINEFIMRTYFTITNLETNMTAYRQPLRQALITKYPHLSHLSEQRISDQYRAIVNNKMIQENRLQEIKDEVVLEINRIEQERPHSSYIAQSLHTSIENTRVHTHSSTLTFTNSTINLDNDTITETATPNNNQFNSSTLIGTTVENIFGEALNNFINIEPTQRPYIPAQKSSKKLATATHYVNSTLLPKYLKDVGEFHRLETVIYCAAFAICTYNGAKISTTLGNIHNSQNIPKWQIRLQNRIQDLRAKIGRVTEYMRGNTGKKLTMHIEKIRLQYKIHSKYDNENTKLAQFMDTLKQKLNLLSNRLRRYKQATLRKNQNKQFTNNEKLFYRTLHTSHHNKRSDHDTPTSEQLYTYWSSIWTNSRNHTEGEWIKHDKEVVKNIPDMQFEELDIDLLKTVIGRTHSWKATGSDKIHNYWFKKFTYIHPHLLTYINNFIRTPDTLPPYITKGVTYMLPKDKNDTKNPAKYRPITCLQNFYKIITACITELIHRHIETNNILAEQQKGCRRGSQGCKEQLTIDAVAAKQALTRKRNIYTMYIDYKKAYDSIPHSWLIYILGHYKIHPTLIQFLKNTMNNWSTALKLNQIQTAEINIRRGIFQGDSLSPLWFCLALNPLSTLLNTSNIGYKIRHNNTSYNLSHLLFMDDIKLYGSNLKEIKKLADITQTFSSDIYMDFGIDKCRIQSVHRGRLEYNNYYTVTGEKIEPVDSDNGYKYLGYQQSRQIHHKETKKSLTDKFRERLYKILNSALNSKNTLKAINTYAVPLLTYSFGIIRWSQTDLNKLQRIINTSMTKHRKHHPRSCIQRLTLPKLEGGRGLIDLQNLHNKQITTLRSFFHIRAKQSSLHKAIIESDIKYTPLNLQDYSTQKNQIITEPQQKIDEWLQKSLHGRHRRDLINPQVDKQASNAWLKRGELFPETEGFMLAIQDQVIETRNYKKFIIRDNTLITDLCRHCNSASETIQHITGACRAISQTDYKHRHDQVAAIIHQYIAFKYKLVKEKTAYYKYTPQTVIESDKFKLYWDRTILTDKTIHHNRPDITLHDKINKIVYLIDIAVPNTHNLTSTYADKITKYTDLSIELKSQWKVKIVKTVPIIISTTGVIPRTLHTSLSTLDIHYFTYILLQKAVIINTCRIVRKFLSLD

SEQ ID NO: 22590 - protein, 1353 aa, Spathilepia clonius
MKGTNTNTNINTNENKNKNKNKNINNNNCHRDSAVETRTYNLRSSTKWRREEVKMNAACCTVQHDDNENTSCQVPVMYKSEDNNKIPSNPSSPISSSHSLFQSPRSSPRSFENPSTSRSTTVSPMSVDVVQEANADNPAPAIGTKRVRKKWSVEMNIFILRTYYEVTKIETDTRAYLTPLYNKFIEQFPDMEVTRQRLGDQRRAIERNRLLPLHSINQIKEEVRAQQNLNKYLTNTPRHDQLICTSSSTPRMRWNNEINEFIIRSYFTITNLESNMSAYRQPLKKALITKYPHLSHLSEQRISDQYRAIVNNKMIENSRLQEIKDEVLIELNRIEKEKSPIQQFTQPSIRTLVTSTHSPTVISSNQDVNVQNGVILEADNRSNSYLKSKLINGSIIEDIFLKALNNFINVEPTHRPYIPVQKTSKKLETITHYINSNLLPKYLADVDDFNKIETTLYCAAYTVCTYNGATICTTLGNARNNYFQNIPKWQIRLQNRIQDLRIKIGRLTEYMRGNKGKKLIKHIDKIKIQYKIHSKYENDNTNLAHFMDTLKQKLNLLSNRLRRYKQTTLRKNQNKQFNNNEKLFYRNLHTSHYNNQINADTPTPEQLHTYWSNIWSNSKNHTEGEWINKDKEVVKNVPEMHFEEIDIELLRIVIARTHSWKATGSDKIHNYWFKKFTNIHPHLLIHINNFIKNPHTLPNYITKGVTYMLPKDKNDSKNPAKYRPITCLQNIYKIVTACLTELIHKHIETNNILAEQQKGCRRRSQGCKEQLTIDAVATKQALTKKRNIYTMYIDYKKAYDSIPHSWLIYILEHYKIHSALIKFLKITMNNWSTIIKFNQEETAQINIRRGIFQGDSLSPLWFCLALNPLSTVLNSSNVGYKIRNNNIQYTLSHLLFMDDIKLYGSNLGEIHKLADITQLFSSDIHMDFGIDKCRIQSVHRGRLEYNSYYTVKGEEIEPVDSDTGYKYLGYQQSRQIHHKETKKLLTNKFKERLYKILNTALNSKNTLKAINTFTIPLLTYSFGIIKWSQTDLKKLQRTINTTMTKYRKHHPRSCIQRLTLPKFEGGRGLIDLQNLHNKQIRNLRTFFHTRIQDSPLHKAVTEADIKYTPLNLHDNCTQKNETITEPQQKLDVWLQKSLHGRHRRDLINPHVNKQASNIWLKRGELFPETEGFMLAIQDQVIETRNYKKFIIRDNTLVTDLCRHCKGASETIQHITGACSAISQTDYKHRHDQVAAIIHQYLALKYKLVKEKTAYYKYNPQAVIDSDKFKLYWDRTILTDKTIYHNRPDITLHDKINKIVYLIDVAVPNTHNLTSTYTDKITKYTDLSVELKSQWKVKTVKTIPIIISTTGVIP

SEQ ID NO: 22591 - protein, 1360 aa, Astraptes brevicauda
MKSKKNCKSKNYHHRDSAVETRTYNLRARTRGRKEDISTNTAASTMQIDNSENGDCQAVEAPNHQKLINASSNHQSPSISSDHSLFESPRSSLHSFESPFPSRSTSISPMSVNVVQAADARNPAPATGTKGTRKKWSSEMNIFILRTYYEITKMETDTRTYLTPLHNKFIEQFPDMQVSRQRVGDQRRAIERNKLLPIDTINRIKDEIKATLLTESTTNEQNHNQIIFTSTNKPRMRWNNEINEFILRSYFTITQFETNKSAYRQPLRQALITKYPHLSHLSEQRVSDQYRAIINNKMIGNIRVQEIKDEVLIELNRQEQEKSQGSHTQQPLTIETTGTHPHSTLTSTNNSLNLQNRISVERNNTNNNQLNSSVLNGSEIEGTFIEVLNNFIYVDPTKRPYIPVQKPTKKLLIAVNYINSTLLPKYLTNVADFRKLESILYCAAFTASTYNGAKICTTMGNTYKTNSQNIPKWQMRLQNRIQDLRANIGRLTEYIRGNRGRKLIIQIEKIKLYYKIHSKHENDNTNLAQFMDTLKQKLNLLSNRLRRYKQTTLRKNQNKQFNNNEKLFYRKLSTSNHNNKTTPTPEQLHTYWSSIWTNSRNHTEGEWIKHDKDLVKNIPEMIFEEIDIDTLKNVIARTHNWKATGSDRIHNFWYKKFTYIHPHLLTHINNFIRKPQTLPSYITKGVTYMLSKDKSDTNNPAKYRPITCLQNFYKIITACITEIILKHIEINNILAEQQKGCRRRSQGCKEQLTIDAVVAKQALTKKRNIYTMYIDYKKAYDSIPHSWLIYILKHYKIHPTLIQFLKNTMDNWSTVLKLNHLETAQINIRSGIFQGDSLSPLWFCLALNPLSTVLNNSNIGYKIKHNNRSHTLSHLLFMDDIKLYGSNLSDIHKLADITQSFSSDIRMDFGIDKCKIQSVHRGNLEYNSYYTVIGEEIEPVDSETGYKYLGYQQSRQIHHKDIKKILTDKFKERLYKILNTALNSKNTLKAINSYAIPLLTYSFGIIRWSQTDLKKLQRTINTTMTKHRKHHPRSCVQRLTLPKLEGGRGLIDIQNLHNKQIVTLRSFFHVRAQESSLHKAVTEADIKYTPLNLHDNATQTIHTITESQQKLNEWLQKSLHGRHCRDLMNPYIDKQASNTWLQRGELFPETEGFMLAIQDQVIESRNYKKFIIRDNTLLTDQCRHCNGASETIQHITGACSAISQTDYKHRHDQVAAIIHQYLARKYGLVKEKIAYYKYTPQAVIETDNFKLYWDRTILTDKTVHHNRPDITFHDKINKIVYLIDVAVPNTHNLRSTYTDKITKYTNLSIELKSQWKVKTVKTIPIIISTTGVIPQTLQTSLNALGIHYFTYILLQKAVII

SEQ ID NO: 22592 - protein, 1371 aa, Astraptes enotrus
MEATKYKNKNNCHRDSAVETRTYNLRPLTVRRREETRTKTACSTMQVDNDENVTCQALAMHKHQNIIHTSLNVSSPLSSDHSLFESPRSSPHSFESPSTSRSSTITPMSVDVVEAANAKKPSPATGTKGARKKWTVEMNIFILRTYYEVTKMETDTKTYLITLHNKFTQQFPNMQVSRQRIGDQRRAIERNRLLPLDTINQIKEEIKAQLNLTESLTNTLGNDQIIFTSSNKSRMRWSNEINEFIIRSYFKITNVETNMSAYRHPLKQALITKYPHLSHLSEQRISDQYRAIVNNKMIEDSRVQEIKDEVLIELNRIEQEKTRNSHHSPSVETIFTRTHSTKLNSTNNSINLSNVITTETQNPNSNQYKCDPVNSKEIENIFIETLNSFINVEPTQRPYIPVQKPSKKLATATHFINSALLPKYLADMNQFNKLETIVYCAAFTACTYNGAKISTTIGNTHNSQNIPKWQIRLENRIQDLRAKIGRLTEYMRGNTSTKLTTHVEKIKLQYKIHSKYEDDNTNLTQFMDTLKQKLNLLSNRLRRYKQTTLRKYQNKQFISNERLFYRNLNISTHNNKTDIPTAEQLHSYWSSIWTNSTNHTEGEWIKQDKEIVKNIPVMQFEEIDIDLLKLVIARTHSWKATGSDRIHNYWFKKFTCIHPHLLIHINNFIKNPDSLPRHITRGVTYMLSKDKNDTENPAKYRPITCLQNFYKIITACITELIHNHVYTNNILAEQQKGCRRKSQGCKEQLTIDAVATKQALMKKRNIYTMYIDYKKAYDSIPHSWLIHVLEHYKIHPALTYFLKNTMNNWTTALKLNQVETAEINIRRGIFQGDSLSPLWFCLALNPLSTVLNNSNSGYKIRHKNTSYTLSHLLFMDDIKLYGSNLKEIHKLADITQSFSADIHMDFGIDKCKIQSIHRGRLEYNGYYTTTGEEIEPVDSETGYKYLGYQQSRQIHHKETKKLLTDKFKQRLHKILNTALNSKNTLKAINTYAVPLLTYSFGIITWSKTDLIKFQRIINTSMTKNRKHHPRSCTQRLTLPKLEGGRGLIDVQNLHNKQITTLRYFFHTRAQESSLHKAVTEADIKYTPLNLHDNSTQKNQNITEPQQKLDEWLQKSLHGRHRRDLINIHIDKEASNTWLKRGELFPETEGFMLAIQDQVIETRNYKKFIIRDNTLTTDQCRHCNSASETIQHITGACRAISQTDYKHRHDQVAAIIHQYLAVKHKLIKEKTAYYKYTPQAVIESDNFKLYWDRTILTDKTIHHNRPDITLHDKINRIVYLIDVAVPNTHNLTSTFTDKITKYTDLSIELKSQWKVKTVKTIPIVISTTGVIPRTLQNSLSNLGIHYFTYILLQKAVIINTCRIVRKFLSLDA

SEQ ID NO: 22593 - protein, 1374 aa, Urbanus sp.
MKSTNNRQNKNNYHRDSAVETRTYNLRPLKGRRIEEKRADAAASIMQTESSEDVSCQVFAMRKHRDFIKSSSNLSSPISSDHSLFETPRSSPHSFEIPSTSRSTTVSPMSVNVVQTANAENPAPATGNKGTRKKWSDEMNIFILRTYYEITKMETDTRTYLAQLHNKFIEKFPDMQVSRQRVGDQRRAIERNRILPLDIINQIKKEIKAQLLTEPTTNTQRNDQIIFSSSINSRMRWNNEINEFIIRSYFTITHLETNKSAYRQPLRNALITKYPHLSHLSEQRVSDQYRAIVNNKMIKDNRLQEIKDEVLIEMNRIEQEKSQSAHTHLPSSINDNRTHTPTLKSTNSINLQNSNTIETDSPNNNQFNLNPLNGTEIEDIFVKALNNFINVEPTQRPFIPSQKPSKKLATATHYINSILLPKYLTMGSDFTKLESILYCAAFTACTYNDAKICTTLENTHNKSFQNIPKWQMRLENRIKELRVNIGRLTEYERGNTGRKLLIHIEKIKLHYKIHSKYENDNSNLAQFMDTLKQKLNLLSNRLRRYKQTTLRKNQNKQFSKNEKLFYRTLNTTNHNNQTDTNIPTPEQLHTYWSSIWTNPKNHTDGGWIKHDKEIVNKIPEMQFEEIDIDLLKNVIARTHNWKATGSDRIHNYWFKKFTYIHPHLLSHINNFIRKPDTLPSYITKGVTYMLPKDKNDTSNPAKYRPITCLQNFYKIITACIAELIHKHIDTNNILAEQQKGCRRRSQGCKEQLTIDAVVAKQALTRKRNIFTMYIDYKKAYDSIPHSWLIFILKHYKIHPALIQFLKNTMDNWSTVLKLNQLETTQINIRRGIFQGDSLSPIWFCLALNPLSTVLNTSNIGYKIKHNNISYTLSHLLFMDDIKLYASNLKEIHKLADITQSFSSDIHMDFGIDKCRIQSVHRGHLEYNSYYTGIGEEIEPVDSDTGYKYLGFQQSRQIHHNETKKQLTDKFKQRLHKVLNTNLNAKNILKAINSYAIPLLTYSFGIIRWSQTDLKKLQRIINTTMTKHRKHHPRSCIQRLTLPKLEGGRGLIDLQNLHNKQIITLRSFFRTRAQESYLHKVVTEADIKYTPLNLHDPSTQKNHTTTEPQQKLDEWLQKSLHGRHRRDLINPHVDKQASNTWLKKGELFPETEGFMIAIQDQVIETRNYKKFIIRDNNLITDQCRHCNSASETIQHITGACRAISHTDYKHRHDQVAAIIHQFLVLKYNLVKEKIAYYKYTPQAVIESNNFKLYWDRTILTDKTIHHNRPDITLHDKINKIVYLIDIAVPNTHNLTTTHTEKITKYTDLSIELKSQWKVKTVKTVPIIISTTGVIPKTLQNSLNVLDIHYFTYILLQKAVIINTCRIVRKFLSLEE

SEQ ID NO: 22594 - protein, 1376 aa, Aguna metophis
MKSSKNSKNSKNINNCYRDSAVDTRTYNLRPLTRRRGEEITNATASTVQNNNSEDYQVLAIHRYKDVTNSFSNPSSPISSDHSLFESPRSSSHSFESPSTSRSTTVSPMSMDVVQAANAVNPAPATGSKSVRKKWSVEMNIFILRTYYIVTKMETDTRAYLISLHNKFTEQFPHMQVSRQRVGDQRRAIERNRLLPVHVINQIKEEIQAQLLTESSTDTQRHDQIITTTNRSRMRWNNEINEFIMRSYFIITHLETNTSAYRQPLRQAIITKYPHLSHLSEQRISDQYRAIVKNRMIEDNRLQEIKDEVILELNRRQEKSFRSHTQQSPSIESTATHINYPTLIATNNCTDFQNDVISEVDNCNNNHSNSNSLNGTLIEDIFIKALKTFMNADPTQRPYIPVQKSSKKLASATKYINSTLLPKYLTNTSDFSKFDTILYCAAFTACTYNGAKICTTLDNNPHKKTSQNIPRWQIRLQNRIHNLRVNIGRLTEYMRGNTGRKLINHIEKIKLRFRIHSKYENENTNLAQFMDTLKQKLNLLSNRLRRYKQTTLRKYQNKQFSNNEKLFYRTLNTPNHTYQKTDSNTPTPEQMHTYWSNIWTNSTNHTEGEWIKKDKEIVENIPEMHFEEIDIDLLKNVIGRTHSWKATGSDRIHNYWFKKLTYIHPHLLTYINNFIKKPETLPNYITKGVTYMLPKDNDDTKNPAKYRPITCLQNFYKIITACISELIHKHIEKNNVIAEQQKGCRRRSQGCKEQLTIDAVATKQAMRRKRNIYTMYIDYKKAYDSIPHSWLIYILQHYKIHPALIHFLKNTMNNWSTTIKFNHLETAQINIRRGIFQGDSLSPLWFCLALNPLSTVLNTSNNGFKIKCNSTSHTLSHLLFMDDIKLYGSNLKEIHKLADITQSFSSDINMEFGIDKCKIQSVQRGCLKYNSYYTITGEEIEPVDSYTGYKYLGYQQSRQIHHKETKKLLTSKFKERLHKILNTALNSKYTIKAINTYAIPLLTYSFGIIRWSQTDLKKLQRTINTTMTKHRKHHPRSCTQRLTLPKLEGGRGLIDLQNLHNKQITTLKAFFHTRAQLSSLHKAVTDADLMYTPLNLHDNATNKNQTITEPQQKLDEWLHKSLHGRHRRDLINPQIDKEASNAWLKRGELFPETEGFMVAIQDQVIETRNYKKFIIRDPTLITDQCRHCNGASETIQHITGACRAITQTDYKHRHDQVAAIIHQYLALKYKLVKEKISYYKYTPQAVIESDKFKLYWDRTILTDKTIHHNRPDITLHDKINKIVYLIDVAVPNTHNLTSTYTDKITKYTDLSIELKSQWKAKIVKTVPIIISTTGVVPRTLQNSLNVLDIHYYTYILLQKAVIINTCRLVRKFLSLN

SEQ ID NO: 22595 - protein, 1372 aa, Narcosius parisi
MKTRNYYKNKNNCHHDSAVETRTYNLRSLAKARREEIRTKTSSSTMQVEHGEDVACQALAMHKHQNIIYTSLNSLSPISSDHSLFESPRSSPHSFENPATSRSSTVTAVSVDVVQAAKANKPVPAAGIKCVRKKWSEEMNIFILRTYYEVTKMETDTRTYLMTLYNKFIEQFPDIQVSRQRIGDQRRAIERNRLLPLHTINKIKEEIKARLNFTESSSNTLNHDQIIFTSPNKSRMRWNNEINEFIIRSYFTITNLETNMSAYRQSLRHALITKYPHLSHLSEQRISDQYRAIVNNKMIKANRLQEIKDEVLLELNRIEKEKSRNSQKSPSVKTNVTRTHSATLNSANNNIILPNDITTEAENPNHNQIISHPLNSNEIEDIFVKALNNFTDVEPTQRPYIPVQKPSKKLATATHYINSILLPKYLTGVREFNKLETIIYCAAFTVCTYNGAKIFTTLKNTHNSRNIPTWQIRLQNRVQDLRVKIGRLTEYMRGNTGKKLTRHIEKIKLQYKIHSKYDNDNNNLMQFMDTLKQKLNLLSNRLRRYKQTTLRKHQNKQFINNEKLFYRSLNTSNHNNKTDIPTSEQLHTYWSSIWTNSRNHTEGEWMKQDKEIVKNITEMQFQEVDIELLKKVIARTHSWKATGSDRIHNYWFKKFTYIHPHLLTHINKFIKHPDTLPSYITRGVTYMLPKDRDDTKNPAKYRPITCLQNFYKIITACITELILKHIDSNNILAEQQKGCRRKSQGCKEQLTIDAVATKQALTKKKNIYTMYIDYKKAYDSIPHSWLIHILEHYKIHPALTQFLKNSMNSWSTVLKLNQVETPEINIRRGIFQGDSLSPLWFCLALNPLSTVLNASNVGYKIKHKNTSYTLSHLLFMDDIKLYGSNLKEIHKLADITQSFSADIHMDFGIDKCRMQSINRGRLEYNSYYTITGEEIEPVDTETGYKYLGYQQSRQIHHKESKKVLTNKFKERLYKILNTALNSKNTIKAINTYAIPLLTYSFGIIKWSQTDLKKLQRTINTSMTKHRKHHPRSCTQRLTLPKLEGGRGLIDLQNLHNKQITTLRHFFHTRSQESSLHEAVTEADIKYTPLNLHDSGTQKNQIITEPNQKLDEWLQKSLHGRHRRDLVNPHIDKQASNTWLKRGELFPETEGFMLAIQDQVVETRNYKKFIIRDNTLTTDQCRHCNGASETIQHITGACRAISQTDYKHRHDQVAAIIHQYLAFKHKLVKEKVAYYKYTPQAVLESNNFKLYWDRTILTDKTIHHNRPDITLHDKINKIVYLIDVAVPNTHNLNSTFTDKITKYTDLSIELKSQWKVKTVKTIPIIISTTGVIPRSLKNSLNNLDIHYFTYILLQKAVIINTCRLVRKFLSLDE

SEQ ID NO: 22596 - protein, 1368 aa, Autochton oryx
MKSTNNYKNKNNCHRDSAVETRTYNLRPLTRRRKEEIRTDSAASTIHIDSSEDVECQAFALHSHQDIINIPNSSSPISSDHSLFESPRSSSQSFESPSTSRSTTVTPMSVDVVQAANAKYPAPATGTKGVRKKWSFEMNIFILRTYYEVTKMETDNRTYLIPLHNKFIQQFPDMQVSRQRVGDQRRAIERNRLLPLHIINQIKDEIKTQLNLTEPSTNTQRHDQVICSNKSRMRWNNEVNEFIIRSYFRVTNLETNMTAYRQQLRQALITKYPHLSYLTEQRISDQCRAIINNKMIEDNRLQEIKDEVLLELNRIEQEKSKNSHSIENTNSIFPPTLLSTNSIHLQNDITPETGNAVNKQVNFNFLNGTTIEDIFVKALNNYTNVEPTQRPYIPIQKPCKKLVTATHYVNSTLLPKYLANADDFSKLETILYCAAFTVCTYNGAKICATLGNTRKNSSQNIPKWQIRLQNRIQDLRAHIGRLTEYMRGNTGKKLLTHIEKIKLQYKIHSKYENDNTDLAQFMDTLKQKLNLLSNRLRRYKQTMLRKYQNKQFSNNEKLFYRTLNTSDHSHPTDTGTPTLEQLHTYWSTIWTNSKTHIEGEWIKKDKEIVKNIPEMQFEEIDIDLFKSVIARTHNWKATGSDKIHNYWLKKFTYIHPHLLTHINNFIRKPNTLPSYLTKGLTYMLPKDKDDTKNPAKYRPITCLQNFYKIITACITELILKHIETNNILAEQQKGCRRRSQGCKEQLTIDAVAAKQALTKKRNIYTMFIDYKKAYDSIPHSWLIYILKHYKIHPAIIHFLQNTMKNWSTALKLNQLETAEINIRTGIFQGDSLSPLWFCLALNPLSTVLNASSIGYKIRHNNTSYTLSHLLFMDDIKLYGSNLKEIHILADITQSFSSDIHMNFGIDKCRIQSVRRGCLEYNSYYTVRGEEIEPVDSETGYKYLGYQQSRQIHHKETKILLTNKFKERLYKILNTALNSKNILKAINTYAVSLLTYSFGIIRWSQTDLKKLQRIINTTMTKHRKHHPRSCTQRLTLPKLEGGRGLIDLQNLHNKQITALRHFFHTRALQSTLHKAVTEADLKYTPLNLHDDATQKNQTITEPQQKLDEWLQKSLHGRHRRDLINPQIDKQASNAWLQRGELFPETEGFMLAIQDQVVETRNYKKFIIRDNTLATDQCRHCNSASETIQHITSACRAISQTDYKHRHNQVAAIIHQYLALKHKLVKEKIAYYKYIPQAVIESDKFKLYWDRTILTDKTIHHNRPDITLHDKINKIVYLIDVAVPNTHNLSSTYTDKVTKYTDLSIELKSQWKVKTVKTVPIIISTTGVVPRTLQNSLNALDIHQYTYILLQKAAIINTCRIVRKFLSLNE

SEQ ID NO: 22597 - protein, 1369 aa, Telegonus anausis
MKSTYNYKNKYNNHRDSAVETRAYNLRPLTRGRREEIRRNVAATTMKSDNSEDVVCEAFAINKHQNFINASSNPSSPISSDHSLFESPRSSPHSFEISSTTRSVTTSPMSVNVVQVANARNPTPATGTKGARKKWSVEMNIFILRTYYEVTKMETDTRAYLIPLHDKFIEQFPDMQVSRQRVGDQRRAIERNKLLPLHTINQIKEEIKTKLSTEHITNAQKQDQIIFTNSNKSRMRWNNELNEFILRSYFTITHLETNKTAYRQPLRQALITKYPHLSYLSEQRVSDQYRAIVNNKMIENNRLQEIKDEVLIELNKIESEKSQSPHIQQTRSIETNGTHIQTPTPIFTNNRLNLRNGNIIETHVPNSLNGSEIEDIFITALNNFTNVEPTQRPYLPIQKPSKKLTIATHYINTALLPKYLTNVVDFTKFESILYCAAFTACTYNDTKINTTLGNTHKNSSQNIPKWQIRLQNRILDLRANIGRLTEYMRGNRSRKLTTHVEKIKLQYKIHSKYENDNTNLTQFMDTLKQKLNLLSNRLRRYKQTTLRKNQNKQFNNNEKVFYRTLSTSNHNNQSNTAPTPEQLHTYWSSIWTNSKNHTEGDWIQQDKKIVSNIPEMQFEEIDMDLLKLVIGRTHSWKATGSDRIHNYWFKKFTFIHPHLLTHINYFIRNPDTLPSYITTGVTYMLPKDTNDTNNPAKYRPITCLQNLYKIITACITELIHNHIETNSILAEQQKGCRRRSQGCKEQLTIDAVVANQALKRKRNIYTMYIDYKKAYDSIPHSWLIYILGHYKINPALIQFLKTMMNNWSTTLKLNQLETAQINIRRGIFQGDSLSPLWFCLALNPLSTVLNTCNIGYKIKHNSTSHTLSHLLFMDDIKLYGSNLKEIHKLADITQSFSSDINMEFGIDKCRIQSVRRGHLEHNSYYTIKGEEIEPVDNETGYKYLGYQQSRQIHHNETKKQLINKFKQRLYKVLNTALNSKNTLKAINTYAVPLLTYSFGIIRWSQSDLKKLQRIINTTMTKHRKHHPRSCTQRLTLPKLEGGRGLIDLQNLHNKQVIKLRSFFQTRAQQSSLHKAITEADIKYTPLNLHDTGIQKKLITIEPQQKLDEWLQKSLHGRHRRDLINPQIDKQASNTWLKRGELFPETEGFMIAIQDQVIETRNYKKFIIRDNSLITDQCRHCNGASETIQHITGACRAISQTDYKHRHDQVAGIIHQYIALKYKLVTEKNAYYKYTPQAVIESDNFKLYWDRTILTDKTIHHNRPDITLHDKLNKIVYLIDVAVPNTHNMSSTYTDKITKYTDLSIELKSQWKVNTVKTVPIIISTTGVIPKTLKNSLNALDIHYYTYILLQKAAIINTCRIVRKFLSLEE

SEQ ID NO: 22598 - protein, 1380 aa, Astraptes talus
MKSTKNNKNKNYHHRDSAVETRTYNLRARTRGRREEVRTNAVATIMHMHIDSNEDGDYQAVETHNHQDFINSSSNHQSSSISSGHSLFESPRSSLHSFESPLTSRSTTVSPMSVNVVEAAKAKNPAPATGPKRARKKWSTEMNIFILRTYYEVTKMETDTRTYLIPLHNKFIEQYPDMQVSRQRVGDQRRAIERNKLLPIDTINEIKDEIRATILTESTTNEQNHNQVVFTGTNKSRMRWNSEINEFIVRSYFKITHLETNMTAYRQPLRQAVITKYPHLSHLSEQRVSDQYRAIVNNKMIENNRLQEIKDEILIELNRTEQEKSQEPHTQQPSTIEIISTHTHSSTLISTNNNVNLQNNITVETSSPHNNEFNSSVLNSSEIEDIFIEALNKFICVEPTKRPYLPVQKPSKKLFIAVDYINSTLLPKYITNVADFRKLESILYCAAFTTCTYNGAKICTELGNTHKTNSQNIPKWQVRLQSRIQDLRANIGRLTEYMRGNRGRKLIIHIEKIKLHYKIHSKYENDNTNIAQFMDTLKQKLNLLSNRLRRYKQTTLRKNQNKQFNNNEKLFYRTLTTSNDNNQTDADTPTPEQLHTYWSSIWSNSKKHTEGEWIKLDKEVVKNIPEMQFEQIDIDTLKNVIAKTHNWKATGSDRIHNFWYKKFTYIHPYLLTHINNFIKQPKTLPSYITKGVTYLLPKDKDDPNNPGKYRPITCLQNFYKIITACITELIHKHIETNNMLAEQQKGCRRGSQGCKEQLTIDAVVAKQALTKKRNIYTMYIDYKKAYDSIPHSWLIYILKHYKIHSTLIQFLKNTMDNWCTVLKLKHLETAQINIRRGIFQGDSLSPLWFCLALNPLSTVLNNSNIGYKIKHNNTSFTLSHLLFMDDIKLYGSNLSEIHKLADITQAFSSDIHMDFGIDKCRIQSVHRGHLEYNSFYTVIGEEIEPVDNETGYKYLGYQQSRQIHHKDTKKILTDKFKERLYKILNTALNSKNTLKAINTYAIPLLTYSFGIIRWSQTDLKKLQRTINTTMTKHRKHHPRSCVQRLTLPKLEGGRGLIDLQNLHNKQIITLRSFFHTRAQESPLHKAVTEADIRYTPLSLHDNATQTNQTITQSQQKLTEWLQKSLHGRHRRDLINPYIDKQASNAWLKRGELFPETEGFMLAIQDQVIETRNYKKFIIRDNTLLTDQCRHCNSASETIQHITGACSAISQTDYKHRHDQVAAIIHQYLARKYRLVKEKIAYYKYTPQAVIETDNFKLYWDRTILTDKTIHHNRPDITLHDKINKIVYLIDVAVPNTHNLRSTYTDKITKYTNLSIELKSQWKVKTVKTIPIIISTTGVIPRTLQTSLNALGIHYFTYILLQKAVIINTCRIVRKFLSLVE

SEQ ID NO: 22599 - protein, 1219 aa, Urbanus evona
METDTRTYLIPLYNKFIEHFPDMQVSRQRIGDQRRAIERNRLLPLDTINKIKEEIKTQLLTESTTNEHNQVIFTNTNNPRMRWNNEINEFIVRSYFTITNLETNMAAYRQLLRKTLITKYPHLSHLTEQRISDQYRAIINNNMLESNRLQEIKDEVLIELNRLEQEKSQRSHTQQPPTTDTICTRSLSPTLISSNNCMNLQNCITIETNNRNNNQFNSNLLNSTEIEKTFNEALNKFINVDPTQRPYIPVQKPSKKFVIAVDYINSTLLPKYLTNVTDFRTLESTLYCAAYTACIYNGAKIYATSEYTHKTHNVPKWQRRLQSRIQDLRANIGRLTEYMRGNRGRKLIIYIEKIKLHYKIHSKYENDNTNLAQFMDTLKQKLNLLSNRLRRYKQTTLRKNQNKQFNNNEKLFYRTLNTSNNLSDTDTPTTEQLHTYWSSIWTNSKNHTEGEWIKKDKEIVENISEMQFEEIDIDTLKNIIARTHNWKATGSDRIHNYWFKKFTYIHPHLLTHINNFIKNPNSLPSYLTKGVTFMLPKDKNDPSNPAKYRPITCLQNLYKIITACIAELIHKHIETNNILAEQQKGCRRRSQGCKEQLTIDAVVAKQALTRKRNIYTMYIDYKKAYDSIPHSWLIYILEHYRIHPALIQFLKNTMENWSTILKLNHIETAQINIRRGIFQGDSLSPLWFCLALNPLSTFLNRNNIGYKIRHHNTSYTLSHLLFMDDIKLYGSNLTEIHKLADITQSFSSDIHMDFGIDKCRIQSVRRGRLEHNSYYTVVGEEIEPVDRHTGYKYLGYQQSRQIHHKHTKKILTDKFKERLYKILNTSLNSKNTLKAINTYAVPLLTYSFGIIKWSQTDLKKLQRTINTTMTKHRKHHPRSCTQRLTLPKLEGGRGLIDLQNLHNKQITTLRSFFHARARETSLHKAVTEADVRYTPLNLHDITTQTNQTITEPQQKLDEWLQKSLHGRHRRDLINPYIDKQASNTWLKRGELFPETEGFMLAIQDQVIETRNYKKFIIRDNNLLTDQCRHCNAASETIQHITGACSAISQTDYKHRHDQVTAIIHQYLALKYKLVKEKIAYYKYTPQAVIESDNFKLYWDRTILTDKTIHHNRPDITFHDKINKIVYLIDIAVPNTHNLRSTYTDKITKYTNLSIELKSQWKVKTVKTIPIIISTTGIIPRTLQTSLNALGIHYFTYILLQKAVIINTCRIVRKFLSLDE

SEQ ID NO: 22600 - protein, 1388 aa, Urbanus sp.
MKATKNSQNKNNYHNDSAVETRTYNLRPLTKGRREERRKNTAISTMQIANSEDGDSQFLATRNHQVFINSSSKSSSPISSNHSLFESPRSSPHSFENPSSSRSTTVSPMSVNVVQVASARNPASVTGTKRSRKKWSDEMNIFILRTYYEVTKMETDTRTYLIPLHNRFTEQFPDMQVSRQRVGDQRRAIERNLLLPLDTINQIKEETRAQLLTYPTTHTQRHNQDICTSSNNSRMRWNNEVNEFIIRSYFTITHLETNKSAYRQPLRQALITKYPHLSHLSEQRISDQYRAIVNNKMIETTRLQEIKDEVLIELNRIEQEKTQSSHTQQLPPTETNVTCTHSSTPIPLTTTNTSTTHTSNCINVQNCINIEINNPENNNQSNLNTLNGTAIEDIFIKALNNFINVEPTQRPYMPVQKPSKNLTSVIHYINSTLLPKYLTNMDDFKKFESILYCAAYTACTYNGAKISTTLGNAHKTNFQNVPKWQIRLQNRIEDLRANIGRLTEYMRGNRGKKLITHIEKIKLHYRIHSKHEDNNTKLAQFMDTLKQKLNLLSNRLRRYKQTTRRKNQNKQFNNNEKLFYRTLNTPNHTNQTDTITLTSEELHTYWSSIWTNAKNHTEGEWIKHDKEIVKNISDMQFEEIDINLLKNVIARTHNWKATGSDRIHNYWIKKFTFIHPHLLTYINNFIKKPETFPSYITTGITYMLPKDKNDANNPAKYRPITCLQNIYKIITSCITELIHKHIETNNILAEQQKGCRRRSQGCKEQLTVDAVAAKQALTRKRNIYTMYIDYKKAYDSVPHSWLIYILEHYKIHPALIQFLKNAMNSWSTVLKLNQLETAEINIRRGIFQGDSLSPLWFCLALNPLSTILNTSNSGYKIKHNNTFYTLSHLLFMDDIKLYGSNLKDIHKLADITQSFSSDIHMDFGIDKCRTQSVHRGQLECNSYYTAMGEEIEPVDSDTGYKYLGYQQSRQIHHKYTKKLLTGKFKERLYKILNTALNSRNTLKAINSYAVPLLTYSFGIIKWSQSDLKKLQRIINTTMTKHRKHHPRSCTQRLTLPKLEGGRGLIDLQNLHNKQITTLRSFFHTRAQESSLHKAVTEADIKYTPLNLHDNTTQKNQNITEPQQKLDEWLQKSLHGRHRRDLINPHMDKQASNTWLKRGELFPETEGFMLAIQDQVIETRNYKKFIIRDNTLVTDQCRHCNGASETIQHITGACSAISQTDYKHRHDQVAAIIHQHLALKYKLVKEKLAYYKYTPQAVIETDNFKLYWDRTILTDKTIHHNRPDITLHDKINKIVYLIDISVPNTHNLTSTYTDKITKYTNLSIELKQQWKVKTVKTIPIIISTTGVIPRSLQVSLKALDIHYFTYILLQKAVIINTCRIVRKFLSLEE

SEQ ID NO: 22601 - protein, 1186 aa, Ephestia elutella
MRWSNKLNESIIRGYFIVTELEQNVTGYRPRLHQYVIAENPEIAHVSEQRIADQRRVILNNRMITDTRMHQIREEASQQLNIQNNDINHLTEEEEEQRQSFLDIINIDTHTHSNTVFEPTQISIDSTQQTSYHTHQFTIHSPPDTQLPNLQDSRLDEPTITQLNDLENCFITTIEKYKDTDPITKPYIPKQKASKKFTRIVYLINSYILPKYLKQEDSFSTLHNIIYCAAFTAAICNGSKIHESNNTRNNEKREPLWQKRLKAKIEDLRRKIALLTEHINGNNSVTIQREVELIRNSYKTHSRHEEDNNDLTQFLDTLKQKLSALASRLRRYKLTTLRKSQNKQFNSNEKAFYRTLNNNIANTDSQASNIQPTLDVSSTATQSNSQTTSTRSHPPTPTPAELHDFWSNIFSKPVEHNAGQWIEKDRERLATIQEMNFEMISLDLLQTVIGKTHNWKATGSDKIHNFWFKRFNSIHKFLLTHINTFIQSPDTMPHFITQGTTYMLLKNPNDTHNPANYRPITCLQNIYKIITSCLSHLIYNHTETNKILAEQQKGCRKFSQGCKEQLTIDAIVSKHAIRNRKNINTMFIDYKKAFDSVPHSWLLYILHHYKINPTIIQFLQHTMHNWTTKLHLNKTETEFISIRRGIFQGDSLSPLWFCLALNPLSQLLNDSNHGYKIPFENTQFTLSHLLYMDDIKLYGSNLTEIHNLASITEEFSNDIKMSFGIDKCGIQSIQKGKIVNNTYQLNTGELIEPIDETVGYKYLGFYQTRQIKEKTTKLTLINKFKARLHKILNSHLNSKNTIKAINSFAIPTLSYSFGIVHWSQTDLKKHQRIINTHMTTYRKHHPKSCVQRLTLPRQEGGRGIIDIQNFHNKQITTLRSFFHNQQSPLHRAIVQTDAKYTPLNLSNPSKQPNENLTTPQQKIEAWQQKSLHGRHRTDLANPNVDKTASNAWLKRGELFPETEGFMVAIQDQIINTKNYQKHIIRDLNIQSDLCRHCHSASETIQHITGACRSISQTDYKHRHDQIAAIIHQYIAFRHKLIPEKTAYYKYSPPTVIDNPQFKIYWDRTIITDKTIHHNRPDITFHDKNNRTVYLIDIAVPNTHNLATTHTEKLGKYTDLAIEIKTQWRVDKVITVPIIISSTGVIPKTLHKSLQTLNIHPLTYLQLQKAAILNTCRIVRKFLSLDT

SEQ ID NO: 22602 - protein, 1415 aa, Spialia spio
MDGWGVPSLERSTSAAGNTGDYVCLTLACEALLGRTTISYASRGIDMKKSLGRSKKINKTQSLDYTVETRRYNLRPLSGGHRRQEAAAGNNEQLTDSDCRQRSTTETIISNSNPPSPMSSTHSLFESPISSPHSFENPSRSTTISPMSVDVVQEADADNPVPATANRCVRKKWSEEMNIFILRTYYEVTQMETDISTYLTPLHTKFKEKFPYMDVSRQRVGDQRRAIIRNKLLTTSKINDIRHEVQLKLQNNNSTPPPTLIPTQTLSLAPTPTLTFTPTLLHQQQISPVLNTNGVAPRMRWKPEINEFIVRTYYKITKLETNKSAYRQPLHQAVIAKYPNLSNLSEQRISDQCRAVIHNKMICEEKLQQIKDEVILEQNAEETYIIDTTNTPNLPEENLSILQNDSTQHNTTQNIEATDETAISNTFTSALHEFKLIKPSERNFIPKQKSSRNLAIITNFINTKLLPSFLTEDSDFETTQLVLYCAAYTATVHNGTKINTNNDKTVSIQKVPKWQLRLQRRVQDLRAKIGKLTEFIKGNTSQKLKRQIEDIKQQYKLHAQFENNNNDLPEFLDTLKQKLNVVANRLRRYKKTTLRKRQNTQFINNEKLFYRNLDTQHNSNSTDNNTPTAEQLHTFWSNIWGNTQQHNENEWCNTAFVKDISDMQFEKLSLDLLKSVITRTHNWKSPGSDKLHNYWYKRFTYLHPNLLKHINNFIENPDSLPDYITEGVTYMLPKDNTDTINPSKYRPITCLQNIYKIITSCISELIYKHTESNNILAEEQKGCRKNSQGCKEQLIIDTVASKQALSKKRNIYTMYIDYRKAFDSIPHTWLIHVLQAYKIHPKIIHFLKNSMLKWSTILKLKQLETEKIMIRRGIFQGDSLSPLWFCLALNPLSVLLNSSQAGFKIKHNNTFHTLSHLIYMDDIKLYGSNLSEINKLASITEQFSEDIKMEFGIDKCRIQSIKRGKLEFNSYETNKGGIIEPVEPDEGYKYLGYAQTRQIHYKEIKQNLINKFKNRLHKILYTYLNSKNTIKAINTYAIPILTYSFGVIHWSQTDLQKLQRIVNTTMTKHRKHHPRSCTQRLTLPRHEGGRGLIDIKNLHNTQITLLKTFFRDKALHSTLHHTVVNTDVKYTPLNLHNSSPQKNQNITQPQQKIDEWLQKSLHGRHRRDLINPCIDKEASNEWLKKGELFPETEGFMVAIQDQVIETANYRKFIIRDTNLKTDQCRHCHSCSETIQHITGACKSITQTDYKHRHDQVASIIHQYIALKHKLIADYTPYYKYNPKAVIDTNEYKLYWDRTILTDKTIHHNRPDITLHDKKNQTVYLIDIAVPNTHNLINTHTEKMRKYVDLSIEIKSQWNVKKVQTVPIILSSTGVIPHTLHEGLRVLNIKRFAYILLQKAVIMNTCRLVRKFLSLE

SEQ ID NO: 22603 - protein, 1365 aa, Muschampia tessellum
MRGSAGADYLFPTLIVGIIMKTFVTNKNIKITQSLDHIVETRRYNLRPLSGVHRRQEAVTESREELVDSECIPQSTTETKILNSNPSSPISSTHSLFHSPSSSPHSFENPSRSTTISPMSVDVVQEAGADNPVPATANRCVRKKWSEEMNIFILRTYYEVTKMETDQSAYLIPLHTKFIERFPHMDVSRQRVGDQRRAIIRNKLLSTSKINEIRHQVTVQLQNNNSSPTHIHQQQINPILNTESATTRMRWKPEINEFILRTYYIITNLETDKSAYRQPLHQAVIAKYPNLSHLTEQRISDQCRAIINNKMISEEKVQQIKDETFTELNTRETYNTDTVNTTTSEENITRSQNYFTQHNNIQNIEVTDETAIRNTFTNALRDFKSIKPTERHFIPKQKTSRKLAIITNFINNKLLPLFLTDESDFETIQLTLYCAAYTASVHTGVKIYTNTDKTVNVCKIPKWQQRLQRRVQDLRAKIGKLTEYIRGNTSQKLKKQIENIKKQFKSHAQFENDNCDLSEFLDTLKQKLNVVTNRLRRYKKTTLRKRQNTQFTNNEKLFYRCLESQQNNSPLDNSIPTQEQLHTFWSNVWGNAREHKEGDWCNTAFVKDVTDMKFEKVSLNLLKTVISRTHNWKAPGSDKLHNYWYKRFTYTHSHLLKHINNFIEKPDSLPDYITKGITYMLPKDNTDTKNPAKYRPITCLQNIYKIITSCISELIYEHTESNNILAEEQKGCRKNSQGCKEQLIIDAIASKQALSNKRNIYTMYIDYKKAFDSIPHTWLIYVLRAYKIHPKIIHFLENSMLKWSTVLKLKHLETEKIMIRRGIFQGDSLSPLWFCLALNPLSVLLNNCKAGFKIKQNDTFHILSHLIYMDDIKLYGSNLSEINKLAVITEQFSKDIQMEFGIDKCRIQSIKRGKLELNTYQTNNGEIIEHVEPDDGYKYLGYVQTRQIHHKEIKQTLINKFKNRLHKILHTYLNSKNTIKAINTYAIPILTYSFGVINWSQTDLQKLQRIINTIMTKHRKHHPRSCIQRLTLPKHEGGRGLIDIKNLHNTQITLLKTFFQNKALHSTLHHTVVQADRKHTPLNLHNNLSQKNQTIIHPQQKIDEWLQKSLHGRHRRDLTNSHIDKIASNEWLKKGELFPETEGFMLAIQDQVIETANYRKFIIRDKNLKTDQCRHCHSSSETIQHITGACKSITQTDYKHRHDQVASIIHQYIALKHKLIADYTPYYKYTPKAVIDTNEHKLYWDRTILTDKTIHHNRPDITFHDKKNQTVYLIDVAVPNTHNLINTHTEKITKYTDLSIEIKSQWKVKKVQTVPIILSSTGIIPHTLHDGLRTLNINRSAYILLQKAVIINTCRLVRKFLSLEE

SEQ ID NO: 22604 - protein, 1364 aa, Heliopetes ericetorum
MIKAEESKNLKKRQILDSTVETRKYNLRPLPGGRRRKPEDITHNNEQEINHDVEIQQTTIEINSQNSNPSSPLSSTHNLFQSPSSSPHSYENPSTSRSTTTSPMSVDVVQEADANNTAPATGAIGVRKKWSEEMNSFILRTYYEESKMETDHSIYLINLHKKFIQRFPHMQVSRQRVGDQRRAIVRNKLLTRNKIEQIRQEVSAQLHKNTEIPQTLSNTQQLEPDQPLITQTNTTRMRWSNEINEFIIRNYYTITNLESNRSAYRQPLFRAVIAKYPNLAHLSEQRISDQCRAVIHNKMISEERLQQIRDEVIIDLNTRELYNVHKESAFLGSTGTENICQLSSTPQSDMQHSEHNSHRTIQDEIKIKNTFTKALNDYRLINPTERPYIPKQRCSKNLAIITNFINKNILPLHLTDDSNFETVQLILYCAAYTASTCCGVKINKEIDNIPSNRSNIPKWQQRLQRKIEDLRSKIGKVTEFTRGNTSYKLSKQVEKIRDLYKIHAQFENENSDLTLILDTLKQKLNVFSNRLRRYKQTTLRKKQNTQFVTNEKLFYRTLEQKNCNSQTDTNIPTPEQLHSFWTNIWGNTKNHKDSDWCKKVFVEDIAEMQYEKVSLDLLKAVITKTHNWKAPGSDKLHNYWYKRCTTIHPHLLRHINSFIQDPNFLPSYVTKGITYMLPKDSSDTTNPAKYRPITCLQNIYKIITACIGELIYKHTESNNILAEQQKGCRKNSRGCKEQLVIDAVVLKQALIKKRNIYTMFIDYKKAFDSIPHSWLIYVLKCYNIHPTLINFLEKTMVNWSTILKLKNIETEEITIRRGIFQGDSLSPLWFCLALNPLSHLLNNSKKGFKVRYNNSTYTLSHLMYMDDIKLYGTNLGEINKLADITQQFSIDINMDFGIDKCKIQSIKKGKLEFNRYKTVNEEIIEPVDSKNGYKYLGYAQTQQIHHKEIKQVLHDTFRNRLRNILNTYLNSGHIIKAINTFAIPILTYSFGIIRWSQTDLKNLQRVINTTMTKYRKHHPRSCTQRLTLPKYEGGRGIIDVRNLHNTQIVSLRKFFHIKSVDSTLHKAITCADINHTPLNLSNNSPQDNETIIQPKQKLDEWLQKSLHGRHRRDLISPHVDKLASNEWLKRGELFPETEGFMLAIQDQVIETANYRKFIIRDKNLATDLCRHCHSNSETIQHITGACKTITQTDYKHRHDQVASIIHQYLARKYKVITDNSPYYKYKPKPVIDTDQYKIYWDRTILTDKTVHHNRPDITFHDKKAKIVYLIDIAVPNTNNLITTHTEKITKYIDLSIEIKSQWKVNKVHTVPIIISSTGIIPHTLHDSLRTININPLAYILLQKAVIINTCRIVRKFLAIEEQTH

SEQ ID NO: 22605 - protein, 1373 aa, Erynnis tages
MRGSVEADLLVPLLFVGIKMEKPILNCISDNKSKVLDYTAETRKYNLRPLAGGRRKNVTAVVTEMFNKKQLEDQQSTTDITAPNSNPSSPISSTHSLFQSPCSSPHSFLNPPSSRSPTASPMPVDAVQEANADKPASATVTMNVRKKWSDEMNIFILQTYYEETKLGTDHSTYLIPLHAKFIERFPNMQVSRQRVGDQRRAIIRNELLPTHKINLIRKEVEEKLKNCEITSSLHTLQRDQTTGNMNSVRMRWSNEINECIVRNYFKITNLETDRSAYRQPLFEAVITQYPSLSHVSEQRISDQCRAVINNKMISEERLQQIRDEILMVRNESVANNTHTETIISDNTETYDINKNSSITTQNKPTERCNLVDKILIDNQTAIGTTFTKALRDFEFTEPTNRPYIPKQKSNKNLASLTHFINKNLLPTYLTEESSFERIQLLLYCAAYTASIHNGVRIHTITNNTTRIHNKPKWQQRLERRIEDLRVKIGKLTEYIRGNTSYKVKKHVEEIIKHYKVHTQYEKENSEPTEFLDTLKQKLNVLSSRLRRYKKTTLRKRQNTQFNNNEKLFYRTLENKHSNTVTNIPTSEQLQTFWSGIWGNVEDHTETGRYKEDFVKDIPEMLFDEINIDLLKTIITKTHNWKAPGSDKLHNYWYKKYTSIHPYLLKYINDFIQHPDTLPAYITQGITYMLPKDNTDTSNPAKYRPITCLQNIYKIITACISHLIYKHTDSHNILAEEQKGCRKNSQGCKEQLVIDAAATKQALSRKRNIYTMYIDYNKAFDSVPHSWLLYILKNYKIHPTIVHFLKNTMGKWSTVLKLNQLETEQIAIRRGIFQGDSLSPLWFCLAMNPLSNLLNNSKKGFVLKCKNTTYRLSHLMYIDDIKLYGSNLKEINKLADITQQFSSDIKMEFGIDKCRIQSVNRGKVELNTYETIDGETIEPVDSENGYKYLGYAQSRQIHHKIIKQTLTHKFKDRLHKILNTHLNARNTIKAINTFAVPILTYSFGVISWSQTDLKKLQQIVNVTMTKFRKHHPRSCTQRLTLPKSEGGRGLIDIKNLHNNQITLLRTFFFTKAQQTTLHKVICQADTKYTPLNLHDNSLQKNQAVIDTQQKLDEWLQKSLHGRHRKDLISPHIDKQASNEWLKKGQLFPETEGFMVAIQDQVIETANYRKFIIRDHNTATDQCRHCHSSSETIQHITGACKSITQTDYKHRHDQIAAIVHQCLARKYNLITEYSPYYKYKPKAIIDTDNYKLYWDRGILTDKTVHHNRPDIIFHDKKAKTVYLIDIAVPNTHNLLSTYTEKMKKYTDLSIVIKTQWSALKVKTVPITLSSTGIIPYTLHDSLRTLNINHSVYILLQKAAIINTCRIVRKFLSIEE

SEQ ID NO: 22606 - protein, 1352 aa, Pyrgus malvae
MKQTKQKENLNKYYNLDSTVEIRKYNLRPLSGGRRRPERNLRNNEQVNIGIEQQQSVAETIVSTPSSPLSSTHSLFQSPSSSPHSFENPSISRSTTISPMSVDVVQEAQADNTAPATVTMGVRKKWSDEMNTFILRTYYEETNMETDQSNYLAPLHKKFIEQFPHMQVSRQRIGDQRRAITRNYLLPKHKIEQIRQEVATRLQKYTNTSETLSTVQERQSGQDLYTETNSNRMRWSNDINEFIVRNYYKITCLENNRSAYRPPLFKAVIEKYPNLAHLSEQRISDQCRAVIRNKMICEERLQQIKDEVAIELHSKENYNANIESHNSESTYYENTNIINSTQDHNIQHPVENTHYSIKNENKIRNTFIKALKDFKQIKPTERPYIPRQKTSRNLAILTHFINNTLLPIYLKEDSDYERVQLILYCAAYTATTCNGVRIRTDTNNTPNSLNNPKWQQRLQRRIEDLRSKIGKLTEYSRGNTSYKLSKQVEEIKKHYKIHAQFEKENSDLAQFLDTLKQKLNLLANRLRRYKQTTLRKRQNAQFIRNEKLFYRTLAQQNTDTPDNSIPTPQQLHSFWSNVWGKAQDHIDSGWCKEAFAKDIPQMQFEKISLDLLKSVILKTHNWKTPGSDRLHNYWYKRYTNIHPHLHRHINIFIQDPKTLPSYITKGVTYMLPKDSSDTLNPAKYRPITCLQTIYKIITACISKLIYKHSEINNIMTEQQKGCRKSSQGCKEQLVIDAVILKEALVKKRNIYTMFIDYKKAFDSIPHSWLIHVLKCYNIHPILIQFLETTMVNWSTVLKLKDLQSEEILIRRGIFQGDSLSPLWFCLALNPLSHLLNNSNIGYKVKCNNTSQFITHLMYMDDIKLYGSNLNEINKLAFITEQFSADIKMEFGIDKCRIQSINRGKLQFNSYQTINKEIIEPVDSNNGYKYLGYAQTQQIHHKEIKETLFSKFRDRLLNILNTQLNSRNITKAINTFAVPTLTYSFGIIKWSQSDLKRLQRIINTMLTKYRKHHPRSCTQRLTLPNSEGGRGLIDIQNLHNTQISSLRKFFYTKSLNSTLHKAITYSDKKHTPLNLSDSSPQKNQVITHSQQKLDEWLQKSLHGRHRRDLISPHVDKLASNEWLKRGELFPETEGFMIAIQDQVIETANYRKFIIRDKNTISDLCRHCHSNSETIQHITGACKTITQTDYKHRHDQVASIIHQYLARNHNLITDYTPYYKYRPKPVIDTDEYKLCWDRTILTDKTVHYNRPDITFHDKKNKIVYLIDIAVPNTHNLLTTHTEKMTKYVDLSVEIKSQWKVEKVKTVPIVLSSTGVIPHSLHNSLHTLNISSSAYILLQKAVIINTCRIVRKFLE

SEQ ID NO: 22607 - protein, 754 aa, Helias cama
MSFEKISIDILRTIITKTHNWKAPGSDKLHNYWYKKYTSLHPHLLRQINDFIQKPDRLPVYVTQGITYMLPKDNNDTRNPAKYRPITCLQNIYKIITACISSLIYKHTESNSILAEQQKGCRRNSQGCKEQLIIDAVASKQAINKKRNIYTMYIDYKKAFDTIPHSWLIYVLKNYKIHPTLVNFLETTMGKWSTVLKLKHLETESINIRRGIFQGDSLSPLWFCLAMNPLSNLLDNSKKGFILKHNNTSFRLSHLMFMDDIKLYGGNIKEINKLADITQQFSSDIKMDFGIDKCRMQSVKRGKLEFNSYETINGETIEPVDPEDGYKYLGYAQSKQIHHKIIKQSLTHKFRSRLHKILNTHLNARNTIKAINTFAIPILTYSFGVISWSQSDLKKLQRIINVTMTKFRKHHPRTCTQRLTLPKLEGGRGLIDLKNLHNNQITLFRTFFFTKAEQSPLHKAVSQIDTKYTPLNLSNRSLQKNQEITDTQQKFDEWLHKSLHGRHRKDLISPHVDKQASNMWLKKGQLFPETEGFMIAIQDQVIETANYRKFIIRDKHITTDQCRHCHSSSETIQHITGACKSITQTDYKHRHDQVAAIVHQCLAYKHKLITEYSPYYKYTPKAVIDTDNYKLYWDRTILTDKTIHHNRPDITFYDKKAKIVYLIDIAVPNTHNLVSTYTEKIKKYTDLSIEIKSQWKVLKVKTVPITLSSTGIIPYTLFDSLRTLNINYTLYVLLQKAAIINTCRIVRKFLAIEE

SEQ ID NO: 22608 - protein, 1356 aa, Quadrus cerialis
MKAVNSKNNKKTTLFECDTEKRRYNLRPLSGNRRNLDITEKVTKLGGLNNEKQNSKAEVIISDLSPSSPISSTHSYFRSPSTSPQSFAIPPPSRSTSISPMSVDVVQEADVDKPAPATGNTIVRKKWNKDMNIFIMRTYYEETNLETDTHNYLMPLHTKFTNKFPNMKVSRQRLGDQRRAIVRNKLLSDYQLNEIRQEVTAQINCHMKTLTSTSPRHNQTMNTGSTTRMRWSQELNEFIIRNYYKITKLGTDLSAYRQLLFQSVIAQYPNLAHLSEQRISDQCRAIIHNKMISEDKLQEIRDEIVIELNEQYTHNIHSETHTSDLVGEDLGEVMNINITNNTQQNLTQQTQTQDILHTNITETTVRNIFSKALNDFKTIEPTQRPYIPRQKSNKKLAILTHFINMNLIPSYLTDHSNYDMTQLILYCAAYTATTCNGAKIRTVTNNIQHTYNLPKWQKRLENRIKQLRVKIGKLTEYIRGNTSFKLTKYVEEIKKHFKIHAQYEAENHDIEQFLDTLKQKLNLLSNRLRRYKKTTLRKKQNAQFSNNEKGFYRSLEGQHNNSQADIPTSNSLHTFWSGIWENTQQHTENKWCREEFVDQVQEMHYNNISLDLLKLVINRTHNWKAPGSDKIHNYWYKRFTNIHPHLVRHINTFIQEPDTLPVYVTKGVTYMLSKDDTDLENPGKYRPITCLQNIYKIITACISELIYTHTESNNILSEQQKGCRRNSQGCKEQLIVDAVVSKQAFKRKRNIYTMFIDYKKAFDSVPHSWLIKVLQYYKIHPTVIQFLQNTMEKWSTVLKLQHVETEEIFIRRGIFQGDSLSPLWFCLALNPLSDALNNSKSGFKIKYHNSQYTLSHLMYMDDIKLYGSSHSQINKLTDITQAFSADIKMEFGIDKCRMQSVKRGILEYNTYITRNGETIEPVDNNNGYKYLGYAQSRNIHHKEIKQSLTEKFKGRLHKILNTFLNSRNTTKAINSFAVPILTYSFGIINWSQSDLQKLQRILNTTLTKHRKHHPRSCSQRLTLSKAEGGRGLIDIRNMHNSQITLLKTFFHDKALHSTLHKAITHSDIKYTPLNLNDSSTQKNQNITKPTEKINEWLLKSLHGRHRRDLISPHVDKLASNQWLKNGEIYPETEGFMLAIQDQVIETANYRKFIIRDKNLITDQCRHCHSSPETIQHITGACKSITQTDYKHRHDQVASIIHQYIARKHKLITDYTPYYKYIPKAVIDTDEYKLYWDRTILTDKTVHNNRPDITFYDKKSKTVYLIDVAVPNSHNLITTHTQKMTKYADLSIEIKSQWKVQKVRTVPIILSSTGIIPHTLHDSLRILNINPTLFILLQKAVIINTCRIVRKFLTLEE

SEQ ID NO: 22609 - protein, 1363 aa, Oechydrus chersis
MKSTYNYNKESNCQLDVTVKTRVYNLRSLPGGRRETHGIDASCSAIRNMSSEGVGTVIMQDSKPPSPISSTLSYFESPRSTPNIFQNPTTSQSAAISSMTVDVVQEVNAKKPAPATVSKSARKKWSVDMNIFILRTYYVITKMETDNSSYLTQLHSKFVDKFPDMQNVSKQRVGDQRRAIERNRLLPTHTIIKIKQDVNTQLNLIESATTVPNTLDHTIHTQSTSSRMKWSNEINEFIIRSYFRITNLETNLSAYRQQLKQVIATKYPQLAHLSEQRISDQYRAIINNKMIKEDRLQQIRHEVAIELNRNVIEEETLSERQPLYTSTETIQINITQEYINNDSIVGADNCKNYSESTLCTKYLNHSEIEKTFLKALNNFINVENTHRPYIPKQKSTKKLATITHFLNTTLLPKYLIDANDFMKFETILYCAAFTVCIHNGAKIFSTEQNGPKSPTIAQWQKRLQTRIQELRVKIGRLTEYIRGNRSKKLNRHVENIKMQHKIHSKYDDENTQLEQFMDTLKQKLNLLANRLRRYRNTALRKLQNKQFTNNEKIFYRTLGSSYNNNQSEKVTPTSDELHEYWSNIWTNAKSHKEGEWMIQDKALAENIPEMQFQEIEINLLKTIIARTHNWKATGSDKLHNYWFKKFTYIHPYLLSHINNFIKNPSTLPNYITKGVTYMLPKDKDDSLNPAKYRPITCLQNIYKIITSCITELIHTHIDTNNILAEQQKGCRRGSQGCKEQLTIDAVTSKQALLRKRNIYTMYIDYKKAYDSIPHSWLVFVLEHYKIHPALIQFLKNTMTKWSTVLKMKHIETTEINIRRGIFQGDSLSPLWFCLALNPLSTVLNNSNIGYKIRYKNTSYTLSHLLYMDDIKLYGSNLKEIHKLAEITESFSADIQMEFGIDKCKIQSVHRGRLEFNSYLTHRGEIVEPVDRDTGYKYLGYQQSKQIHHKEIKATITEKFKQRLHKILNTNLNSKNTVKAINTYGIPLLTFSFGILRWSQTDLKKLQRIINTSMTKHRKHHPRSCTQRLTLPKLEGGRGLIDVQNLHNKQITTLRSFFHMRAQQSPLHKATIHADIKYTPLNLHDNSVQKNETIIENQQKLDKWLQKSLHGRHRRDLISPHVDKQASNSWLKRGELFPETEGFMLAIQDQVIETRNYKKHIIRDNTFVSDHCRHCHSAPETIQHITGACRSISQTDYKHRHDQVAAIIHQYLALKYKLVKEKIAYYKYKPLAVIDSDKFKLYWDRTILTDKTIHHNRPDITLHDKVNKIVYLIDVAVPNTHNISSTYTEKMTKYTELSIEIKSQWKVKSVKTVPIILSSTGIIPQSLRNSLTILNINYFTYILLQKAVLINTCRIVRKFLSIDQ

SEQ ID NO: 22610 - protein, 1382 aa, Grais stigmaticus
MRGSVEADFLNPPLLVGKEMKSTNCNNNKTNNASTTILDSAVETRKYNLRPLSGGRRRNHEAAVEYSSSIVSSNSSKQLEEVNVELHQLTKEINIASPKPSSLSSSTHSLFVSLSSSPHSFENPSTSRSTTASPISVDVVQEATADNLAPATVTKCVRKKWSEDMNIFILRTYYEESKMGIDNTYLTPLHTKFINQFPNMQVSRQRVGDQRRAIERNRLLPVSTINQIRQEVATQLQNNTQSRHQTQVISNNVSSTTRMRWSNEINEFIVRNYYKITNLETNRSAYRQPLFQAVIEKYPHLAHLSEQRISDQCRAVIHNKMITDERLQKIKDDIIIELNSKETYNSSIQRQTLDTIDTAYGNTYTINNTQNNTVEQNTNTNIRDDSVIRNTFTQALEEFKSVDPTERPHIPRQRSSKKLAIVTNFINSNLIPMYLTDDSDFNTVQLILYCAAYTASICNGVKIKKKADGTPKNQNMPKWQQRLQRRIDDLRAKIGKLTEYIRGNTSYRLTKQVEDIKKQYKIHAQFDNENSDLTQFLDTLKQKLNLLSNRLRRYKQTTLRKSQNVQFSNNEKLFYRNLNHQSTTLTDSNIPTTSQLHTFWSSIWAETKYHTENEWCNVEKEAVKKVKDMQFNKVSLDLLKAIITKTHNWTSPGSDSLHNYWYKKFTNIHLQLLKHINSFIQEPESLPVYVTRGVTYMLPKDKSDTINPAKYRPITCLQNIYKIITGCISELIYEHTKSNNILAEQQKGCRKNSQGCKEQLIIDSVASKQALNKKRNIYTMYIDYKKAFDSVPHSWLLYVLTNYKIHPTLIHFLKTCMVNWSTKLKLQHLETEEIAIRRGIFQGDSLSPLWFCLALNPLSNLLNNSKKGFKIKHSNTSYTLSHLLYMDDIKLYGSNLKEINKLADITQQFSADIQMEFGLDKCRIQSIKRGKLELNNYHTINGEVVEPVDCDSGYKYLGYEQTRQIHHKEIKQTLVKKFKDRLRKVLNTHLNARNSIKAINSFAIPILTYSFGVISWSQSDLKKLQRIINTTMTKYRKHHPRSCVQRLTLPKSEGGRGLIDIQNLHNAQISTLRAYFHSKATQTSLHDAVTKADLKLTPLNLHSSATQKNQSITHPQQKIDEWVQKSLHGRHRKDLISPHVDKVASNEWLVKGELFPETEGFMLAIQDQVIETSNYRKYIIRDKDLVTDQCRHCHSNSETIQHITGACKSIAQTDYKHRHDQVASIIHQYLARKYNLINEYTPYYKYKPKAVIDTEQYRLYWDRTILTDKTVHHNRPDITFYDKPNKTVYLIDIAVPNTHNLISTHTEKITKYTDLSIELKSQWKVQKVKTVPIIISSTGIIPYTLHDSLRHLNINRLTYILLQKAVIINTCRIVRKFLALDK

SEQ ID NO: 22611 - protein, 1341 aa, Pyrgus malvae
MKQTKQKENLNKYYNLDSTVEIRKYNLRPLSGGRRRPERNLRNNEQVNIGIEQQQSVAETIVSTPSSPLSSTHSLFQSPSSSPHSFENPSISRSTTISPMSVDVVQEAQADNTAPATVTMGVRKKWSDEMNTFILRTYYEETNMETNQSNYLAPLHKKFIEQFPHMQVSRQRIGDQRRAITRNYLLPKHKIEQIRQEVATRLQKYTNTSETLSTVQERQSGQVLYTETNSNRMRWSNDINEFIVRNYYKITCLENNRSAYRPPLFKAVIEKYPNLAHLSEQRISDQCRAVIRNKMICEERLQQIKDEVAIELHSKENYNANIESHNSESTYYENTNIINSTQDHNIQHPVENTHYSIKNENKIRNTFIKALKDFKQIKPTERPYIPRQKTSRNLAILTHFINNTLLPIYLKEDSNYERVQLILYCAAYTATTCNGVRIRTDTNNTPNSLNTPKWQQRLQRRIEDLRSKIGKLTEYSRGNTSYKLSKQVEEIKKHYKIHAQFEKENSDLAQFLDTLKQKLNLLANRLRRYKQTTLRKRQNAQFIRNEKLFYRTLAQQNTDTPDSSIPTPQQLHSFWSNVWGKAQDHIDSGWCKEAFAKDIPQMQFEKISLDLLKSVILKTHNWKTPGSDRLHNYWYKRYTNIHPHLHRHINIFIQDPKTLPSYITKGVTYMLPKDSSDTLNPAKYRPITCLQTIYKIITACISKLIYKHSEINNIMTEQQKGCRKSSQGCKEQLVIDAVILKEALVKKRNIYTMFIDYKKAFDSIPHSWLIHVLKCYNIHPILIQFLETTMVNWSTVLKLKDLQTEEILIRRGIFQGDSLSPLWFCLALNPLSHLLNNSNIGYKVKCNNTSQFITHLMYMDDIKLYGSNLNEINKLAFITEQFSADIKMEFGIDKCRIQSINRGKLQFNSYQTINKEIIEPVDSNNGYKYLGYAQTQQIHHKEIKETLFSKFRDRLRNILNTQLNSRNITKAINTFAVPTLTYSFGIIKWSQSDLKRLQRIINTMLTKYRKHHPRSCTQRLTLPNSEGGRGLIDIQNLHNTQISSLRKFFYTKSLNSTLHKAITYSDKKHTPLNLSDSSPQKNQVITHSQQKLDEWLQKSLHGRHRRDLISPHVDKLASNEWLKRGELFPETEGFMIAIQDQVIETANYRKFIIRDKNTISDLCRHCHSNSETIQHITGACKTITQTDYKHRHDQVASIIHQYLARNHNLITDYTPYYKYRPKPVIDTDEYKLYWDRTILTDKTVHYNRPDITFHDKKNKIVYLIDIAVPNTHNLLTTHTEKMTKYVDLSVEIKSQWKVEKVKTVPIVLSSTGVIPHSLWGRRVYTVCMFALLALGVRVVGS

SEQ ID NO: 22612 - protein, 1351 aa, Timochares trifasciata
MKKYNNNFNLNNFLDNSEETRRYNLRSLSGVRRKDADIFSSKKVGLHNNLENTQIEINNHSNTSSPFSSIHSLFPSPHSSPHSFEMSSTSRSTTNSPVSVDVVQEAIAENPAPAAGTKYVRKKWSDDMNIFILRTYYEETRIGTDHSTYLIPLHRKFIEKFPEMKVSRQRVGDQRRAIERNKLLPTHKIEQIRQEVKNKLQSNVIQHSNQTETINQNLYTRESGTRMRWSTEINEFIVRNYYKITNLENDRSAYREPLFKVVVTQYPHLAHLSEQRISDQCRAIIHNKMLPEEKLQQIKDEIITERNLLNSHIEVEVPHTVIENTYTDTMVETEPIITEKLTHNTHDTIINNDMLQDTFAKALANFKSIKPSDRPFIPKQKSSKNLAVITSFINTNLIPLYLTENSDFDTVQLTLYSAAYTASTCNGVKIHTNNENNHNSNTRSIPKWQQRLQNRVENLRVKIGKLTEFIRGNNSYRLRQQVEDIKNQYKTHTQFDSENSNFPQLLDTLKQKLNLLANRLRRYKETTLRKSQNAQFLNNEKFFYRTLEHQQAKLTETNIPTADQLHAFWSKIWNGTKEHTVGDWVKTEAELTKDIPDMQFERVEIGLLKNVINKTRNWTAPGSDKLHNYWYKKYTNVHKHLLRHINNFITNPDVLPNYVTKGVTYMLPKDPSDTKNPAKYRPITCLQNIYKIITSCINELIYRHTNTNKILAEQQKGCRRNSQGCKEQLIIDTVVSKQALCKKRNIYTMYIDYKKAFDSVPHSWLIYTLQNYKIHPLLVNFLEKSMSKWSTVLKLRHLETNEIEIRRGIFQGDSLSPLWFCLALNPLSNLLNQSKKGFKIKYQNTYYSLSHLMYMDDIKLYATNLKDLYKLADITEKFSTDIQMEFGIDKCRIQSVYRGKLQRNTFQTERGDIIEPVDSSEGYKYLGYVQTRQIHHKEIKQALINKFRYRLRKILQTHLNSKNTIKSINSFAIPILTYSFGIILWSQSDLKKLQRIINTTMTKYRKHHPRSCIQRLTLPKSEGGRGLIDIRNLHNSQITSLRIFFHSKGPESLLHNAVVEADNRYTPLNLKNNATQNNEYITPSQQKLNDWIQKSLHGRHRKDLLNANIDKEASNYWLQKGELFPETEGFMLAIQDQVIETRNYRKFIIRDKNMTTDLCRHCHNSSETIQHITGACKLITQTDYKHRHDQVASIIHQSIARKYNLITDYTPYYKYKPQAVIDTDKYKLYWDRTILTDKTVHHNRPDITLHDKINKIVYLIDIAVPNTHNLDSTRTDKLTKYTDLSIEVKSQWRVQRVKTVPILISSTGVIPHTLHESLRTLDLPRTTYMLLQKAVILNTCRIVRKFLSIEE

SEQ ID NO: 22613 - protein, 1356 aa, Cycloglypha thrasibulus
MRGSVEADLLVPSLFVGIKMEKSNFNSMANSKVLDYTVKARKYNLRPLSGGRRRNLSVATEMFNTKRPVNQQPTTDIMILNSNPPSPISSTHSLFQSPCSSPHSFENSCSSRSTTISPRSVDALRETNDDKTATAAATISVRKKWTDEMNTFILRTYYEETKLETDHSTYLFPLHAKFIDRFPNMQVSRQRVGDQRRAIIRNKLLSTHKINLIRQEVKELLQKYDENTNTIEISQNDQVLKKVDTNSLRMRWSNEINECIVRNYFKITNLEKDRTAFRQPLFQAVTIQYPNLINLSEQRISDQCRVVINNKMISEERLQQIKDEIIMEQNKSETYNRNSSPVTQNNSIQYNTLTDKISIDSETAIRNTFRRALSDFESLEPTNRPHIPKQKSNRNLASITHFINKNVLPTHLTEESTFKDTQLLLYCAAYTASIQNGVKIHTMTNNTSNIPSTPKWQQRLEGRVEDLRIKIGRLTEYIRGNTSNRLKRHVEEIKKHYKVHAQFESENCDITQFLDTLKQKLNVLSNRLRRYKKTTQRKKQNAQFVNNEKSFYRTLENQHVNTATNIPTSDQLKTFWSGIWENAENHYENHKYKEDFVKDISEMSFDEINIDLLRTIISKTHNWKAPGSDKLHNYWYKRYTSLHPHLLRHINDFIQKPDTLPVYVTQGITYMLPKDNTDTINPAKYRPITCLQNIYKIITACISNLIYKHAESNNILAEQQKGCRKNSQGCKEQLIIDAVASKQALNRKRNIYTMYIDYKKAFDTIPHSWLMYVLKNYKIHPTLIKFLENTMGKWSTVLKLKHLETEVINIRRGIFQGDSLSPLWFCLAMNPLSTLLNNSKNGFILKHNDTSYRLTHLLYMDDIKLYGSNLKEINKLADITQQFSSDIKMAFGIDKCRIQSIKRGKLEFNTYETTNGETVEPIDPENGYKYLGYAQSRQIHHKTIKQTLTHKFRHRLQKILNTFLNARNTIKAINTFAIPILTYSFGVISWSQSDLKKLQRIINVTMTKFRKHHPRSCTQRLTLPKSEGGRGLIDIKNLHNNQITQFRAFFFTKAEQSLLHKVVTQVDIKYTPLHLSDRSLQKNQIVTVTQQKLDEWLHKSLHGRHRKDLISPHIDKQASNVWLQKGQLFPETEGFMLAIQDQVIETANYRKFIIRDKNITTDQCRHCHSNSETIQHITGACKSITQTDYKHRHDQVAAIVHQCLAYKHKLITEYSPYYKYKPKAVIDTDNYKLYWDRTILTDKTIHHNRPDITFHDKKTKTVYLIDIAVPNTHNLVSTYTEKIKKYTDLSIELKSQWKVSKVQTVPITLSSTGIIPYTLHDSLRTLNICSSIYILLQKAAIINTCRIVRKFLSIEE

SEQ ID NO: 22614 - protein, 1186 aa, Pyrgus malvae
MQVSRQRVGDQRRAIIRNRLLPASKIKQIQQEVAAKLKTLTHISTIIETQQPQNDQPTCDGTKSTRMRWSNEINEFIVRNYYILTNLENNRSAYRQLLFQAVINKFPNLGKLSEQRISDQCRAVINNKMISEVRLQEIKDEVLLELNARETQNILTTEIHTSDCNTDTIHNTENNSLQSEHNIQNTIINETKIRNTFVQAMNDFKLIKPTERPFIPKQRSNKNLAIITNFINSKILPSYLIEDNDFETTQLILYSAAFTASVYNGVKIHTETNNTLGISKVPKWQQRLQNRIVDLRAKIGKLTEYSRGNTSQRLRKQVDDIKRQYRTHAQFENENSDLEQFLDTLKQKLNLLANRLRRYKKTTLRKRQNTQYSTNEKLFYRTLEHSNCSRPTDANIPTAEQLHTFWSNIWENTQNHNNSEWCKEAFSEEIPQMQFENVSLELLKSVLTKSHNWKAPGSDKLHNYWYKKYTNTHPYLLRHINDFIHNPNSLPSYITKGVTYMIYKDEADTTNPAKYRPITCLQNFYKIITACISELIYKHSEKNNILAEQQKGCRKKSQGCKEQLIIDAVVLKQALNKKRNIYTMFIDYKKAFDSIPHSWLIYVLQSYNIHPTIIHFLENTMDKWSTTLKLKDLETEEIAIRRGIFQGDSLSPLWFCLALNPLSTLLNNSNRGFKIKYNKTSHTLSHLMYMDDIKLYGSNLNEINKLADITQQFSADIKMEFGIDKCRIQSIKRGKLEFNSYETTNKEIIEPVDCDKGYKYLGYAQTTQIHHKEVKQTLINKFRNRLHKILNTHLNSRNIIKAINSYAVPILTYSFGIISWSQSDLKKFQRVISTTMTKYRKHHPRSCSQRLTLPKPEGGRGLIDIRNLHNTQISSLRTFFHTRSEHSILHNAITHADNKHTPLNLCSSSGQKNETIIQTQQKLDEWLHKSLHGRHRRDLISPHVDKLASNEWLRRGELFPETEGFMLAIQDQVVETANYRKFIIQDKNLVTDTCRHCHSNSETIQHITGACRSITQTDYKHRHDQVAAIIHQHLALKHNLITEYTPYYKYKPKAVIDNKDHKLYWDRTILTDKTVHCNRPDITFHDKKSRTVYLIDIAVPNTHNLITTHTEKITKYVDLSIEIKAQWNVQNVKTIPIIISTTGVVPHTLHDSLRSLHINRSTYVTLQKAVIINTCRIVRKFLALEE

SEQ ID NO: 22615 - protein, 1345 aa, Heliopetes ericetorum
MKQSKNKEKYNNYYSLDSTVETRKYNLRPLSGGRRRPERNLGNNEQVYLDTEQQKSAAEINVSNSNPPSPLSSTHSLFQSPSSSPHSFQNPSISRSTTISPVSVDVVQEAQAENTASATAAIGVRKKWSDEMNIFILRTYYEETNLEKDHSTYLIPLHTKFIKQFPHMDVSRQRVGDQRRAIIRNKLLPTSKIEQIRQEVAKHLQKYTAETLSIAQEQQCGQVFNTIGTNISRMRWSNDINEFIVRNYYIITNFENNKSTYRPLLFKAVIDKYPNLAHLSEQRISDQCRAVIRNKMICDERLEQIKDEVGIELHSRQNHIADTEPQNIEVLNYQNIEVPSNTIESSIQQPIGSMNHAIKDENKIRNTFFNALDVFKQISPTKRPHIPRQRTNRNLAILTQFINKNLIPLYLQEDSDYETVQLTLYCAAYTASICNGIRIYTDTNSTHNSRNIPKWQQRLQRRIDDLRSKIGKLTEYIRGNNSYRLAKQVEEIKKQYKIHAQFDQENCDLAQFLDTLKQKLNLLSNRLRRYKQTTLRKKQNTQFIKNEKLFYRTLMRENTNMSDNNIPTSQQLHTFWSNIWGKVQNHTDSGWCEKAFEKDIPQMKFDRISLDLLKSVILKTHNWKSPGSDKLHNYWYKRYTNIHQHLHRHINMFIQDPKTLPSYITKGITYMLPKDSIDTLNPEKYRPITCLQTIYKIITACISELIYKHSETCNIISEQQKGCCKNSQGCKEQLVIDAVISKEAFRKKRNIYTMFIDYKKAFDSIPHSWLIYVLKTYNIHPTLIQFLENTMANWSTILKIKDLETEEIMIRRGIFQGDSLSPLWFCLALNPLSHLLNNSKNGFRIKYNNTSHTISHLMYMDDIKLFGSNLNEINRLAHITEQFSADIKMEFGIDKCRIQCINRGKIQLNSYQTINHEIIEPVDCNSGYKYLGYAQTQQIHDKKIKETLFSKFKDRLRNILNTHLNSRNIMKAINTFAVPILTYSFGIIKWSQSDLKKLQRLINTMMTKYRKHHPRSCTQRLTLPKSEGGRGLIDIQNLHNKQITSIRKFFHTQSSHSTLHQAITYTDTKHTPLNLSDSSHQKNEVIKHSQQKLEEWLQKSLHGRHRRDLISPHVDKLASNEWLKRGELFPETEGFMLAIQDQVIETANYRKFIIRDKNLASDTCRHCHSNSETIQHITGACKTITQTDYKHRHDQVASIIHQYLARKHNLITDYTPYYKYKPKPVIDTDKYKLYWDRTILTDKTVHYNRPDITFYDKRKQTVYLIEIAVPNTHNLLTTHTEKMNKYVDLSIEIKSQWKVHKVKTVPIVLSSTGVIPHTLHNSLRTLRALLVSRGFAHARGIGPHA

SEQ ID NO: 22616 - protein, 925 aa, Zopyrion sandace
MSNGVRIHTETSNITSVAKVPKWQKRLQYRIEDLRAKIGKLTEYIRGNTSQKLRKHVEEIKKHYKIHAQFENENCDLPQFLDTLKQKLNLLSNRLRRYKKTTLRKTQNTQFATNEKIFYRTLQDQNCNRLTDTDIPTPEQLHTFWSGIWENRQNHNDSEWCKTAFIENIPQMQFENISMELLKCVITRSHNWKAPGSDKLHNYWYKKYTNIHPHLLRHINHFIQNPNTLPSYITKGITYMITKDEDDTKNPAKYRPITCLQNFYKIMTACISELIYKHSESNNILAEQQKGCRKKSQGCKEQLIIDAVVLKQALNKKRNIYTMFIDYKKAFDSVPHSWLIYVLKSYNIHPTIVHFLEATMVKWSTVLKLKHVESEEIMIRRGIFQGDSLSPLWFCLALNPLSHLLNNSKTGFKVKYHKTSHTLSHLMYMDDIKLYGSNLNEINKLAKITEQFSADIKMEFGIDKCKIQSVKRGKLEFNSFETISNETIEPVDCNNGYKYLGYAQTTQIHHKEVKQTLHKKFRNRLHKVFNTHLNSRNIIKAVNSFAIPILTYSFGIITWSQSDLKKLQRIINTTMTKHRKHHPRSCTQRLTLPKSEGGRGLIDIRNLHNTQVSSLRTFFHTRCEDSILHKAITHADIKQTPLNLSSSSLQKTQTIVNEQQKLNEWLHKSLHGRHRRDLISPHVDKLASNEWLRRGELFPETEGFMLAIQDQVVETANYRKFIIRDKNLITDTCRHCHSNSETIQHITGACRSITQTDYKHRHDQVASIVHQYLARKYKLITDYTPYYKYKPKAVIDTSEFKLYWDRTILTDKTVYCNRPDITLHDKKSKTVYLIDIAVPNTHNLITTHTEKMTKYVDLSIEIKAQWKVQNVKTVPIIISSTGVIPYTLHDSLRLLNINRSTYYLLQKAVIINTCRIARKFLAIEE

SEQ ID NO: 22617 - protein, 1352 aa, Pyrgus malvae
MKQTKQKENLNKYYNLDSTVEIRKYNLRPLSGGRRRPELNLRNNEQVNIGIEQQQSVAETIVSTPSSPLSSTHSLFQSPSSSPHSFENPSISRSTTISPMSVDVVQEAQADNTAPATVTMGVRKKWSDEMNTFILRTYYEETNMETDQSNYLAPLHKKFIEQFPHMQVSRQRIGDQRRAITRNYLLPKHKIEQIRQEVATRLQKYTNTSETLSTVQERQSGQDLYTETNSNRMRWSNDINEFIVRNYYKITCLENNRSAYRPPLFKAVIEKYPNLAHLSEQRISDQCRAVIRNKMICEERLQQIKDEVAIELHSKENYNANIESHNSESTYYENANIINSTQDHNIQHPVENTHYSIKNENKIRNTFIKALKDFKQIKPTERPYIPRQKTSRNLAILTHFINNTLLPIYLKEDSDYERVQLILYCAAYTATTCNGVRIRTDTNNTPNSLNTPKWQQRLQRRIEDLRSKIGKLTEYSRGNTSYKLSKQVEEIKKHYKIHAQFEKENSDLAQFLDTLKQKLNLLANRLRRYKQTTLRKRQNAQFIRNEKLFYRTLAQQNTDTPDSSIPTPQQLHSFWSNVWGKAQDHIDSGWCKEAFAKDIPQMQFEKISLDLLKSVILKTHNWKTPGSDRLHNYWYKRYTNIHPHLHRHINIFIQDPKTLPSYITKGVTYMLPKDSSDTLNPAKYRPITCLQTIYKIITACISKLIYKHSEINNIMTEQQKGCRKSSQGCKEQLVIDAVILKEALVKKRNIYTMFIDYKKAFDSIPHSWLIHVLKCYNIHPILIQFLETTMVNWSTVLKPKDLQTEEILIRRGIFQGDSLSPLWFCLALNPLSHLLNNSNIGYKVKCNNTSQFITHLMYMDDIKLYGSNLNEINKLAFITEQFSADIKMEFGIDKCRIQSINRGKLQFNSYQTINKETIEPVDSNNGYKYLGYAQTQQIHHKEIKETLFSKFRDRLRNILNTQLNSRNITKAINTFAVPTLTYSFGIIKWSQSDLKRLQRIINTMLTKYRKHHPRSCTQRLTLPNSEGGRGLIDIQNLHNTQISSLRKFFYTKSLNSTLHKAITYSDKKHTPLNLSDSSPQKNQVITHSQQKLDEWLQKSLHGRHRRDLISPHVDKLASNEWLKRGELFPETEGFMIAIQDQVIETANYRKFIIRDKNTISDLCRHCHSNSETIQHITGACKTITQTDYKHRHDQVASIIHQYLACNHNLITDYTPYYKYRPKPVIDTDEYKLYWDRTILTDKTVHYNRPDITFHDKKNKIVYLIDIAVPNTHNLLTTHTEKMTKYVDLSVEIKSQWKVEKVKTVPIVLSSTGVIPHSLHNSLHTLNISSSAYILLQKAVIINTCRIVRKFLE

SEQ ID NO: 22618 - protein, 1212 aa, Perichares adela
MNIFILRTYYEETKMETDLRTYLIPLHTKFTENFPHMQVSKQRLGDQRRAIERNKLLPIHIVNEIRQNVTEKLRACKASSTNSQQEGSSQILFTTGTNRRMRWSSEINEFIIRAYYKITNLETNKSAYRQPLLEAVIKQYPHLSHLSEQRVSDQCRTIIHNKMISDENLQKIRDEVLIELNSIDALDSQSLQIEDSENITVDTVVNLNDNIIPTNNTNRCNFIEKHKNQIKDTFSKSIDTFKLFEPTTRPYIPKQKSSKKLGLIIHFINISILPNYLSEESDFASIELILYCAAYTAATCNGARILVTTEKAPERTHNIPRWQKRLQDRINDLRAKIGKITEFIRGNPSQKLKKHVDEIKKRFKVHAQHENENVEITQFLDTLKQKLNVLSNRLRRYKQTTQRKKQNSQFTHNEKQFYRNIQNQQSGILTTNSDIPTNTELHSFWSNIWGNQKDHTEGSWCDGEKQLTKDIPHMQFDNISLDLLKSVISKTHNWKATGTDKMHNYWYKKLTNIHPHLLRHINTFIHTPHSLPHYITKGVTYMLPKDSKETKDPSKYRPITCLQNIYKIITGCLSELIYRHSELNNILAEQQKGCRKKSQGCKEQLTIDAVASRQALSKKRNIYSMFIDYKKAFDSVPHSWLIYVLENYKIHPTLIHFLKNCMINWSTVLKLRNLQTDEIAIRRGIFQGDSLSPLWFCLALNPLSNLLNNSKKGFKIKHDNTFYKLSHLMYMDDIKLYGSDIKEIHKLADLTQAFSTDIQMEFGIDKCGIQSYHRGKLELNTYHTNKGEVIEPVDINNGYKYLGYVQTSHIHQKEVKQTLIKKFKDRLHRILSTHLNAGNTIKAINSFAVPILTYSFGVISWSQTDLKSLQRMISTCMTKYRKHHPRSCTQRLTLTKLEGGRGLIDIQNLHNSQITTLRSFFHSKAQQSHLHKAIAQADTKHTPLNLHDHSTQKNENITQTREKLDKWLQKSLHGRHRRDLISPHVDKNASNEWLRRGQLFPETEGFMLAIQDQIIETANYRKYIIRDETSVTDQCRQCHSSPETIQHITGACKKLTQTDYKHRHDQIASIIHQYLAIKHKLITESQSYYKYKPKAVIETPQFKLYWDRTILTDKTVHYNRPDITLHDKMNKIVYLVDIAVPNTHNLITTHTEKMTKYTDLSIEIKSQWKVHTVKTIPIIISSTGVIPKTLHDSLHTLNIHPLTYILKYLQNR

SEQ ID NO: 22619 - protein, 1357 aa, Heliopetes sublinea
MKPAKVKQNSKNLRSLDSSVVTRKYNLRPLSGGRRRKFKGESEHTEASQQLEDEFQQIPSVIISPNSSTSSPISSIYSLYQTPSSSPHSFDNLATSQPTEVSPMLVDVVQKAHADNSAPATGTIIARKKWSEEMNTFILRTYYEETKMDTDHSTYLIPLHAKFIRQFPDMQVSRQRVGDQRRAIIRNKLLPNHIITQIQKEIAVKLQRLNTNIDSVSDTRQVQDDLPDCAIVKNTRMRWSNEINEFIVRNYYILTNLENNRSAYRQPLFQAVIAKFPKLSHLSEQRISDQCRAVINNKMISDEKLQEIKDQALIELNTRETESTATETYTSNTIENCNIDMTNNTQNSSRQFEQYVQNGIINETLIRSTFAKALIDFKLIEPTDRPFIPKQRSNKKLAVISNFINDKVLPSYLKENNDFEITHLILYCAAFTATTCNGVKIHTATNNTPTVSNVPKWQQRLQNRIADLRAKIGKLTEFIKGNTSYKLRKHVDNIKRQYKIHAQFESENSDLTQFLDTLKQKLNLLSSRLRRYKKTTLRKTQNSQYTNNEKLFYRKMEHRNCFRSTDTNIPTAEQLHTFWSGIWEDKQHHNDSEWSKEAFIEGIPQMPFENISLELLKSVITRSHNWKAPGSDKLHNYWYKKYTTIHPHLLSHINDFIHNPNSLPSYITKGITYMISKDETDTNNPCKYRPITCLQNFYKLITACISELIYKHSECNNILAEQQKGCRKKSQGCKEQLIVDSVVLKQALSKKRNIYTLFIDYKKAFDSIPHSWLIYVLKSYNIHPKIIHFLENTMVKWSTTLKLNNLETEEIVIRRGIFQGDSLSPLWFCLALNPLSSLLNNSKAGFKVKYQKTSHTLSHLMYMDDIKLYGSNLNEINKLADITQQFSADIKMEFGIDKCRIQSIKRGKLEFNSYETTNKEVIEPVDCDKGYKYLGYAQTRQIHHKEIKQTLSGKFRNRLQKILNTHLNSSNIIKAINSFAVPILTFGVISLSQSDLKRLQRIINTTMTKYRKHHPRSCSQRLTLPKAEGGRGLIDLRNLHNTQITALRTFFHTKSENSYLHKAITLADNKHTPLNLSSSLTQKNEAIVQTQQKIDEWLHKSLHGRHRRDLISPHVDKTASNEWLKRGKLFPETEGFMLAIQDQVVETANYRKFIIQDKNLGVDTCRHCHSNSETIQHITGACRAITNTDYKHRHDQVASIIHQYLALKQNLITEYTPYYKYKPKAVIDTKDYKLYWDRTILTDKTVYCNRPDITLHDKKNRTVYLIDIAVPNTHNLITTHTEKMTKYVDLSIEIKAQWNVQCVKTIPIVISSTGVVPYTLHDSLRTLNINRATYVLLQKAVIINTCRIVRKFLAIDE

SEQ ID NO: 22620 - protein, 1358 aa, Heliopetes ericetorum
MKPEKVKQNSKNPQSLDSTVVTRKYNLRPLSGGRRRKFGGESEHKEASLQLKDEFQQIPSEIISSNSNPSSPVSSNYSLYQTPSSSPHSFENLFTSRSTTVSPMSVDVVQKADADNSAPATGTIIARKKWSEEMNTFILRTYYEETKMDTDHSTYLIPLHEKFIRQYPDMQVSRQRVGDQRRAIIRNKLLPTHRITQIQQEVAVKLQRLNTDNGSNIDTRQLLNGQPSCPITKNSRMRWSNEINEFIVRNYYILTNLENNRSAYRQPLFQAVIAKFPNLSHLSEQRISDQCRAVINNKMISDERLQEIKDQVLIELNTKETQSTPTETHTSNTIENCNIDITNSTQNNSRQVEQYVQNGIINETLIRSTFIKALVDFKLIEPTDRPFIPKQRSNKKLAVISNFINNKVLPSYLSENNDFEMTQLILYCAAFTATTCNGIKIHTTTNNTPRVSNVPKWQQRLQNRIVDLRAKIGKLTEFIRGNTSQKLRKHVDNIKRQYRIHAQFENENSDLTQFLDTLKQKLNLLSNRLRRYKKTTLRKRQNSQYANNEKLFYRTMEHRNCFRSTGANIPTAEQLHNFWSSIWEDKQYHNDSEWSKEAFIEDIPQMPFENISLELLKFVIKKSHSWKAPGSDKLHNYWYKKYTTIHPYLVSHINDFIHNPNSVPSYITKGITYMISKDETDTVNPAKYRPITCLQNFYKIITACISELIYKHSESNNILAEQQKGCRKKSQGCKEQLIIDSVVLKQALNKKRNIYTMFIDYKKAFDSMPHSWLIYVLKSYNIHPKIIHFLETAMVKWSTTLKLNHLETEEIVIRRGIFQGDSLSPLWFCLALNPLSFLLNNSNAGFKIKYHKTSHTLSHLMYMDDIKLYGSNLNEINKLADITQQFSADIKMEFGIEKCRIQSIKRGKLEFNSYETTNKEVIEPVDCDKGYKYLGYAQTTQIHHKEIKQTLSSKFRNRLHKILNTHLNSRNIIKAINSFAVPILTYSFGVISWSQSDLKRLQRIINTTMTKYRKHHPRSCSQRLTLPKSEGGRGLIDIRNLHNTQITSLRTFFHTKSENSILHKAVTHADKHTPLNLSSRLIQKNEAIVQTQQKMDEWLHKSLHGRHRRDLISPHVDKTASNEWLKRGELFPETEGFMLAIQDQVIETANYRKFIIQDKNLVTDICRHCHSNSETIQHITGACRAITQTDYKHRHDQVASIIHQYLALKQNLITEYTPYYKYKPKAVIDTKDYKLYWDRTILTDKTVCCNRPDITFHDKKNRTVYLIEIAVPNTHNLITTNTEKMTKYVDLSMEIKAQWNVQYVKTIPIVISSTGVVPYTLHDSLRALNINRATYILLQKAVIINTCRIVRKFLAIDE

SEQ ID NO: 22621 - protein, 1340 aa, Pholisora mejicanus
MKSFVSNKNKNVEKAQNLDHTVETRRYNLRPLSGGHRRKEAVNESKKQEILDLDCIQQPTTQIITSTISSPISSTHSLFQSPNTSPHSFENPSRSTTTSPMPVDVVQEEAYVDIPVPATGIKKCARKKWSEEMNIFILRTFYEETKIETDLSTYLIPLHKKFIERFPHMDVSRQRVGDQRRAIIRNKFLSTSKINDIRQEVALQLQNNNITTTNTHQQQINPNLNSDNTTQRMRWKPEVNEFIVKSYYKITELETNKSAYRQPLHQVVTEKYPNLSHLSEQRISDQCRAVIHNKMLPEEKLQQIRDEIVMELNTRDTINNNTTEENTHEPQNNYSQHFNTQDIELQDETAIRNTFNKALHDFKFIEPTERYFIPKQKSNRKLAIITRFINTKLLPLFITEDSNFETVQLTLYCAAYTATIHNDVKIHINSDKVSVHNTCKWQQRLQRRIEDLRAKIGKITEYIRGNTSHKLSKQVEDIKQQYKIHAQFEKDNCDLTQILDTLKQKLNLVSHRLRRYKQTTLRKRQNIQFVNNEKLFYRNLETPQSNVPTDNSFPTSEQLHTFWSNIWGNAQEHRESEWCKKSFAKDISDMQYEKVSLDLLKTVIARTHNWKAPGSDKLHNYWYKRFTHVHIHLLKHINNFIEKPDTLPHYITKGITYMLPKDNTDTMNPAKYRPITCLQNIYKIITACISELIYKHTETNNILAEEQKGCRKNSQGCKEQLIIDMVASKQALNKKRNIYTMYIDYKKAFDSIPHTWLIYILQAYKIHPKIIHFLENSMLKWSTVLKLKHIETEKILIRRGIFQGDSLSPLWFCLALNPLSCLLNNSKLGFKIKHNNKFHILSHLVYMDDIKLYGSNLNEINELARITEQFSVDIQMEFGIDKCRIQSINKGKLELNSYQTNNGEIIEPVECTEGYKYLGYAQSRQIHHKEVKQNLINKFRSRLHKILNTYLNSKNITKAINTFAIPILTYSFGIINWSQTDLKKLQRIINTTMSKHRKHHPRSCKQRLTLPKHEGGRGLIDVQNLHNTQISSLRLYFMEKDSTLHKIITQADLKYTPLNLHNSSTQKNENIIHPQQKLDEWLQKSLHGRHRRDLLHPHIDKVASNEWLKRGELFPETEGFMLAIQDQVIETANYRKFIIRDKSLTNDQCRHCHSNTETIQHITGACKSITQTDYKHRHDQVASIIHQYIALKHKLVTDYTPYYKYIPKPVIDTKEFKLYWDRTILTDKTIHYNRPDITFHDKKNQIVYLIDIAVPNTHNLITTHTEKITKYADLSIEIKSQWKVQKVKTVPIILSSTGVIPHTLHEGLRTLSIHRSAYILLQKAVILNTCRLVRKFLSLE

SEQ ID NO: 22622 - protein, 1344 aa, Eburuncus unifasciata
MRLRSRQIPQAGTCEGESRPGPSSSGSPSYSGGGNVSHMTAQCCTVAVNNTTSYISDSSSPPSSSTNSFFPSPSPLSPGPFENSSLTTATNPMIVDVVQKVVTDNTAPAAVSKHVRKKWSEEMNIFILRTYYEESKLGTDRTYLLPLYTKFIRQFPNMQVSRQRVGDQRRAIERNKLLPTNKIYQIRQEVASKLNDNSQNRTQSKINHQASHSNTNKRMRWSNEINEFIVHSYYEITNIESNRSGYRQPLFQAVINKYPHLGNLSEQRISDQCRAIIQNKMISDQRLQEIKDNIIIKLNRMETDNTATDIQNIDLTIRDYRPTDSTVNSSHNPALENMQAVPKNETKIRNTFIQAIDDFKFIEPTLRPRIPRQRSNKKLAVITSFINTTLLPQYLPEDCDFNKLQLILYCAAYTATICNDVKIQDKKNNQSQLQHNTPQWQQRLQKRIDDLRSKIGNLTEYIRGNTSYKLRKKVDQIKKQYATHAQFDNENTELSQFLDTLKQKLNLFANRLRRYKQTALRKQQNAQFVSNEKLYYRFLDNNSVSLTNTNVPTPTQLHSFWSNIWSNPEYHTESEWNQIDKTNAENVTEMQFEKLDIDLLKLVIGKTLNWTSPGSDNLHNYWYKKFTYIHSHLLSHINSFIQKPSTLPTYITKGVTYMLPKDKTDTTNPAKYRPITCLQNIYKIITGCISKLIYRHTNLHNILAEQQKGCRKHSQGCKEQLIIDSVACKQALHRKRNIYTMYIDYKKAFDSVPHSWLQSILKSYKIHPTLIQFLTKCMTNWSTILRLNHFVETEEIPIRRGIFQGDSLSPLWFCLALNPLSNALNNSKKGFKIKYCNTSFTLSHLIYMDDIKLYASNQNEINKLGDITEQFSADIKMEFGISKCKIQSIKRGHLEHNAYVTSIGEIIEPVDSNNGYKYLGYEQTRQIHHKEIKQTLTNKFRDRLHKILNSHLNAKNTIKAINTYAVPILTYSFGIINWSQSDLKKLQRLVNTNLTKHRKHHPRSCTQRLTLHRSEGGRGLIDIQNLHNTQISALRTYFHIKALETPLHKAIMKADTRYTPLNLHDTATQKNQKITKPQQKMDDWIQKSLHGRHRKDLISPHVDKVASNEWLKRGELFPETEGFMLAIQDQVIETGNYRKHIIHDKHLITDQCRQCHSSSETIQHITGACKSISQTDYKHRHDQVASIVHQYIAIKFRLITEYTPYYKYKPKAVIETEHYRIYWDRTILTDKTVHHNRPDIVFYDKSKKEVYLVDIAIPNTHNLIQTHSEKLKKYTDLSVEIKSQWKVLKVKTVPIVISSTGVIPHTLHDSLRTLNINRHLYIQIQKAVIINTCRIVRKFLALDK

SEQ ID NO: 22623 - protein, 1356 aa, Atarnes sallei
MNTIYHTINKTNSKNLTNRSPKYNLRSSSKTYSQDHEKDSQSYETQASDIRKNRLHTSNRKGTLARNVYSHTFTNSPLPTTTDVLSHEDQLTPRPSTVTSTSEDVVQAALAKNPAPAIGTKSVRKKWSNEMNIFILRTYYEVTKMESNVHDYLTPLHNKFTEKFPEMHASRQRVGDQRRSIVRNGRLPLHNINQIKEEVRAQLNLVETAVGISTPDSEKQPGSKISRMKWSNEINEYIIQSYFKITNLETNLSGYRSLLKQTVIEKFPHLSHLSEQRISDQCRVIIKNKMINDQRLEQIKDEIVIEINRIEQETQQLSAIISTNIELNTTDSFSNDIGTETVRSSQNVSDITLENSEKIAEIFNKTLKEFSNTDPIQRPYIPIQKTTRKLNSATHFVNTLILPKYLKDSMKFDELQTLIYTAAVTVCTYNGAKFNSNTIHKPNTKTVPKWQLRLQKRVQDLRVMIGRLTEYINGNKSKKLSMYVEKIKLQYKTHAKYEKDNTDLTHFMDTLKQKLSLVSNRLRRYKQAALRQYQNKQFSRNEKAFYKTLDSSCDNKQEDIKTPTSEQLHTYWSKIWAYPANHIEGNWIKPDKQFTQNITEMQFKMVDINLLENIISKTHNWKAPGSDKIHNFWYKKFTNTHTYLLTHINDFIQEPGSLPSYLTKGVTFMLLKDKADNRNPAKYRPITCLQTLYKIITACITELVHKHTVTYNILTEQQKGCRRGSQGCKEQLTVDAIASKQALTRKRNIYTMYIDYKKAYDTIPHSWLIFILEHYKIHPTLINFLKAIMVRWNTVLKINNVETKEINIRRGIFQGDSLSPLWFCLALNPLSSALNNSNIGYKIKYNRTSYTLSHLMYMDDIKLYGSNIQEINKLAATTQSFSSDIQMEFGIDKCKIQSVRRGNLEKNFFNTMTGEIIEPVDLDSGYKYLGYQQSRQIHHKNIKVTLTDKFKNRLQKILKTALNSKNTIKAINTYAIPYLTYSFGIIKWSQTELKTLQRIINTNMTKHRKHHPRSCTQRLTLPKKEGGRGLIDIRNLHNSQITTLRNFFQTRSQQSSLHMAVLHSDINYTPLNLHENSKQKNETLTNPQQKLDEWLQKSLHGRHRRDLISPHIDRQASNTWLIRGELFPETEGFMLAIQDQVIETRNYKKFIIRDNSIPDKCRHCHSASETIQHITGACRSISQTDYKHRHDQVAAIIHQYLAIKYKLISEKTSYYKYTPQSVIDTHKTKLYWDRTILTDKTIHNNRPDITLHDKINKTVYLIDIAVPNTHNLKTSYTEKTTKYTDLSIELKKQWKVNIVKTVPIVLSTTGVIPQTLKDSLETLNIPYKTYFLLQKACIINTCRIVRKFLALDETIN

SEQ ID NO: 22624 - protein, 1355 aa, Charidia lucaria
MNTIDTVLNKNNSKNFNSTKRSQMYNLRSLSKTYRQDNVIDSQSCETQGSDNREKRSHTSNREETLVQNASIPTFINSSLATTTDSLSRADLITQRSTTITSMSEDVVQEALATNSAPAIGTKSVRKKWSNEMNIFILRTYYEVTKIESNVTDYLTALHNKFTEKFPEMQASKQRIGDQRRSIVRNGRLPLHTINQIKEEVRAQLNLVEPTVNISIPDSERQSGSRMKWSNEINEYIIQSYFKITNLETNLSGYRPLLKQTVIAKFPHLSHVSEQRISDQCRVIIKNKMINDQRLEQIKDEIVVEVNKLENQTQQSSATILTGIEFNTIDSFRNNTRTETVRSSQNLSDITSLNAEKIEEIFNNTLKEFSNTDPTQRPYIPVQKTTKKLTSVIYYINMSILPRYLKDAIKFEELQCLIYTAAVTVCRCNGAKFNSNTKHTSKIKTMPKWQLRLQKRVQDLRVMIGRLTEYMNGNNSKKLSIYIKKIKLHYKIHAKYEKENTDLTHFLDTLKQKLSLVSNRLRRYKQAALRQSQNKQFSSNEKAFYKSLDSSSDNKQEDIKTPTSEQLYTYWSKMWAHPTNHNEGKWIKSDKQLTQNITVMQFKMVDINILQHIISKTHNWKAPGTDRIHNFWYKKFTNTHPYLLKYINEFIKEPESLPPYLTKGVTFMLLKDKNDTRNPAKYRPITCLQTLYKIITACITELVHKHTVTNNLLAEQQKGCRRGSQGCKEQLTIDAIASKQALARKRNIYTMYIDYKKAYDTIPHSWLIFILEHYKIHPTLINFLKAIMVRWNTVLKINNIETKEINIRRGIFQGDSLSPLWFCLALNPLSSALNDSHIGYKIKYNNTSYTLSHLMYMDDIKLYGSNIHEINKLASITQTFSSDIQMEFGIDKCKIQSVRRGNLEKNIFNTIKGEIIEPVDLDDGYKYLGYQQSRQIHHKIIKSTLTDQFKYRLQKILKTALNSKNTNKAINTYAIPYLTYSFGIIKWSQTELKTLQRIINTNMTKHRKHHPRSCSQRLTLPKKEGGRGLIDISNLHNNQITTLRHFFQTRSQQSSLHMAVLHSDINYTPLNLHENSKQKNETLTNPQQKLDEWLQKSLHGRHRRDLISPHIDRHASNTWLIRGELFPETEGFMLAIQDQVIETRNYKKFIIRDNSVSDKCRHCHSGSETIQHITGACRSISQTDYKHRHDQVAAIIHQYLAIKYKLISEKTSYYKYTPQAVIDTHKTKLYWDRTILTDKTVHNNRPDITLHDKINKTVYLIDIAVPNTHNLKTSYTEKTTKYTDLSIELKKQWKVNIVKTVPIVLSTTGVIPRTLKDSLETLSIPYRTFILLQKACIINTCRIVRKFLALDETVT

SEQ ID NO: 22625 - protein, 1342 aa, Haemactis sanguinalis
MRLRSRQIPQAGTHLGESRPGPSSSGCPTYSGEGNVSHMTAQWRTVAVNNTTSYIPDPSSPTSSTTNNLFPSPSSSLHLSENSSTPTPNIPMIVDVVQEVVTDNTAPATVSKSVRKKWSEEMNIFILRTYYEESKLGTDRTYLLSLYTKFIKKFPNMQVSRQRVGDQRRAIERNKLLPTQKIHQIWQEVATNLSNNLQNATQSEINHDQRHSYTNMRMRWSNDINEFIVQSYYEITNIESNRSGYRQPLYQAVINKYPHLRHLSEQRISDQCRVIIQNKMISENRLQEIKDDIIIKLNRMETNNTIEIQNLDQTIRNYGQTDNGVSTTHNIALENVQAVPKNETKIHNTFIQAIGEFQFIEPTLRPRLPRQKSNKKLAIITNFINTTLLPQYISEDSDFTKVQLILYCAAYTATICNDVKIQERKDSNSQPQHNIPKWQLRLQRRIEDLRSKIGNLTEYIRGNTSYKLRKKVDLIKKQYATHAQFDNENTELSQFMDTLKQKLNLYANRLRRYKQTTLRKQQNAQFLCNEKQYYRLLDYNSVSLTNTNVPTPTQLHKFWSNIWSKPENHKEGVWNQIDKTTTEKVTEMHFEKLNIDLLKLVIGKTRNWTSPGSDNLHNYWYKKFTYIHSHLLRHINSFIREPTTLPTFITKGITYMLPKDKSDTKNPSKYRPITCLQNIYKIITGCISELIYRHTDLNNVIAEQQKGCRKHSQGCKEQLIIDSVACKQALSKKRNIYTMYIDYKKAFDSVPHSWLLSVLQTYKIHPTIIHFLENCMANWSTILRLNHLIETDEIPIRRGIFQGDSLSPLWFCLALNPLSYALNNSKKGFKIKYNSTSYTLSHLIYMDDIKLYGSNQTEINRLGYITEQFSADIKMEFGISKCKVQSIKQGRVERNDYVTNCGDVIEPVDSDNGYKYLGYEQTRQIHHKEIKQKLTQKFRDRLRKILNTHLNAKHTIKAINTYAIPILTYSFGIINWSQSDLKKLQRLVSTSLTKHRKHHPRSCTQRLTLQRSEGGRGLIDIQNLHNTQISALRNFFFLKARKTPLHKAIMQADTRYTPLNLHDETFQKNQKITKPQEKMDNWIQKSLHGRHRKDLISPHVDKVASNEWLKRGQLFPETEGFMLAIQDQVIETGNYRKHIIHDRNLITDKCRHCHSSSETIQHITGACKSISQTDYKHRHDQIASIVHQYIARKFELINEYKPYYKYKPKPVIETEQHRLYWDRTILTDKTVHHNRPDIVFYDKSKKEVYLIDIAIPNTHNLIQTHTEKIKKYTDLTVEIKSQWKVQKVKTVPIVISSTGIIPHTLHNSLRTLNINKDLYGQIQKAVIINTCRIVRKFLALEE

SEQ ID NO: 22626 - protein, 1352 aa, Paramimus stigma
MTNGALVTKNMRCVLETDKYPRRVPVRENPAPGLRARAALRILGGGNVSHMTAQCRAVAVSNITSYIPDSSSPSSSTTNSLFPSPSSSPDLFKNSSTTPTNPMIVDVVQEVLTDNTAPATVSKGIRKKWSEEMNIFILRTYYEESKLGTDRTYLVPLYTKFIKQFPYMQVSRQRVGDQRRAIERNKLLPTNIIDQIRQEVATNLNNSQIITQNDINHRVSRTNTNTRMRWSNDINEFIVQSYYEATNIESNRSGYRQLLFQAVINKYPHLGHLSEQRISDQCRAIIRNKMISEERLQEIKDDIIIKLNPAEIDSTTDTQKLDPTIRDYRPADSIVNTSHNIALENIQPSPENERKIQNIFIQAIDHFKFIEPTLRPRIPRQRSNKKLAVITNFINTTLLPQYLSEDCDFNKAQLILYCAAYTATICNDVKIQEKKDSQSQSQQNIPKWQLRLQKRIEDLRSKIGNLTEYIRGNTSYKLRKKVDQIKKQYAMHAQFDNENTELSQFLDTLKQKLNLFANRLRRYKQTALRKQQNAQFLNNEKLYYRLLDDNSVSLTNTNVPTSTQLHSFWSNIWSKPVYHTDNEWYQIDKTFAENVAEMQFEKLNIDLLKAVIGKTRNWTSPGSDNLHNYWYKKFTYIHSHLLRHINSFIQEPTTLPTYITKGVTYMLPKDKSDTNNPSKYRPITCLQNIYKIITGCISELIYRHTDLHNLLAEQQKGCRKHSQGCKEQLIIDSVACKQALHRKRNIYTMYIDYKKAYDSVPHSWLLSVLKNYKIHPTLIQFLTSCMSNWSTILRLNHFIETEEIPIRRGLFQGDSLSPLWFCLALNPLSNALNSSKKGFKIKYSNTSYTLSHLIYMDDIKLYGSNKNEINKLGNITEQFSADIKMEFGISKCKIQSIKRGQLERNDYVTNYGEVIEPVDSNSGYKYLGYVQTRQIHHKEIKQTLTNKFKDRLRKILNSHLNAKNTIKAINTYAVPILTYSFGIISWSQSDLKKLQRLVNTNLTKHRKHHPRSCTQRLTLHRSEGGRGLIDIQNLHNTQITTLRTYFHTKALKTPLHKAIMKADTRYTPLNLHDTTPQKNQKITNPQQKMEDWIQKSLHGRHRKDLISPHVDKVASNEWLKRGEMFPETEGFMLAIQDQVIETGNYRKHIIHDKNLTTDQCRQCHSSSETIQHITGACKSISQTDYKHRHDQVASIVHQYIALKFRLITEYTPYYKYKPKAVIETEQYRLYWDRTILTDKTVHHNRPDIVFYDKSKKEVYLVDIAIPNTHNLVQTHTEKIKKYTDLSVEIKSQWKVLKVKTIPIIVSSTGVIPYTLHDSLRILNINKNLYIQIQKAVIINTCRIVRKFLSLEK

SEQ ID NO: 22627 - protein, 1342 aa, Zera sp.
MPWWTFNSLAVRGYQMKKTSNIKNTNINLHITTSSKPYNLRSLNRDTSTRESQIPCIHLNPTSPTSTSSLFQSPSSSPKWYEDPTTSRSSTVTPISLDVVQVANVTNPVPAIDNNKKSRKKWSSEMNIFILRTYYEVTKMEADIGTYLIPLHNKFIEKFPEMEVSRQRIGDQRRAIIRNKLLSLEKIDEIRKEVEAQLKTVGSSNDMPTQENTIQNTQRMRWSNDINEFIVRSYFRITCLETNISGYRPLLKQAVVTQYPALSHLSEQRISDQHRAIINNKMIHFTRLHQIKDEIALELNKTERENSEEFSNATIETADNGQNIVATDINVNETHTAPSNSTEIEDTFIKSMTEFNMTDPIQRPYLPVQKPSRKLTIITHFVNTTLLPKYLTDTSDYRDVDKLLYCAAYTICASNGAKIKLCSENNLRQKTIPKWQRRLENRVENLRAMIGRMTEYLKGNKSKKLSMHIEKIKTQYKIHAKYDKENTDLTHFMDTLKQKLNLFSNRLKRYKQTILRKSQNIQFSNNEKHFYRSLNTLQSKKIADVDTPPSDQLYTFWSNIWANTSTHTEGDWFKQDKEHIKNLSDMQFEQIDIHLLKFIISKTHNWKAPGSDKIHNYWFKKLTSLHPHLLRHINNFIREPNTLPHYITKGVTYMLPKDKNDMKNPAKYRPITCLQNFYKIITACITELLRKHIESNGILAEQQKGCRKGSLGCKEQLTIDAVVSKQALVRKRNIYTMYIDYKKAYDSIPHSWLISILKHYKIHPILTQFLQNTMAKWSTVLKINNIITEEINIRRGIFQGDSLSPLWFCLALNPLSAALNNCNKGYKIKYNNSSYTLSHLMYMDDIKLYGSNIREIYKLADITESFSSDIQMEFGIDKCRIQSVRRGHVENNTFDTATNQKIEPVDYDSGYKYLGFQQSRQIHHKETKLTLTGKFKNRLHKILNTALNSKNTIKAINTFAIPYMTYSFGIVKWSQSELKSLQRTVNTSMTKFRKHHPRSCTQRLTLPKNEGGRGLIDIKNLHNSQITKLRHFFHTRAQQSTLHKAVMQADIKYTPLNLHDIVTQKNESITNQQQKLDEWLQKSLHGRHCRDLLNPNIDKHASNAWLQQGELFPETEGFMIAIQDQVVETRNYKKFIIQDRTLVSDQCRHCHSASETIQHITSSCRSISQTDYKHRHDQVAAIVHQYLAFKYKLIHEKTAYYKYTPKAVIDTDKYKLYWDRTILTDKTVHNNRPDITFYDKTKKLVYLIDIAVPNTHNLTNTYTEKTIKYKDLSIELKSQWKVKTVKTIPIVISATGVVPRTLKHSLNILNIHHLTYLLLQKACIINTCRIVRKFLAIDEDGS

SEQ ID NO: 22628 - protein, 1351 aa, Myrinia binoculus
MKSTNKFNNDHPESTIKTRTYNFRPLTGGRRSNYKASTDCPAQPRQQSQGTDVVSINSSPPSPTSSSYSLFQTPRSSPQSFEDQITSRSSTVTPVPVDVVQEANAKKPAPAIVTKSARKKWSDEMNIFILRTYYEVTKMETDTNTYLTPLHSKFIEKFPDMQVSRQRLGDQRRSIVRNRLLSIQIINQIKEEVRTQSNTTGTIADTCTQYQDTSINATSRMRWSNEINEFIIHSYFKITDLETNISGYRQLLKQAVITKYPSLSHLSEQRICDQYRAIIKNKMVSDSRIQQIKDEVIIDLHKIEEENLYLQQSSNTPTDATEVNKSQENLNNSQTLETHNPDQIQLNLNSPDAAQVENTFYTALSEFSYINPTQRPYLPKQKPSKKLGTITHFVNTKILPRYLTDESEFSFMETVLYCAAFTVCIHNGTKIHSNTENKSKTQMIPNWQRRLQNRIQELRVMIGRLTEYMRGNKSMKVCVHIEKIKLRYKIHSKHEDENTSLIQFMDTLKQKLNLLSNRLRRYKQTTDRKTQNIQFTNNEKLFYRTLNQQHCNNNTDIHTPTSQQLHTFWSDIWANPKDHSEGEWLKQDKNLCKNISDMQFIDINIDILKNVIAKTHNWKATGSDKIHNYWFKKFTNIHPYLLTHINSFIKNPDSLPLYITKGVTYMIPKDKNDTKNPSKYRPITCLQNIYKIITACITELIYRHIETNKILSEQQKGCRRGSQGCKEQLTIDAIVSKQALTRKRNIYTMYIDYRKAFDSVPHSWLLYILGHYKIHPVLIHFLNTTMRKWSTLLKLGNIETEAISIQRGIFQGDSLSPLWFCLALNPLSTALNNSNIGFKIKHNTSSTTLSHLMYMDDIKLYGTNLREIYKLADITESFSTDIHMEFGIDKCRIQSVHRGHLKTNNFVTAMGEEIEPVDCDSGYKYLGYQQSRQIHHKDIKHALRTKLKQRLHKILNTFLNSKNTIKAINTFAIPCLTYSFGIIKWSQTDLKNLQRIVNTSMTKYRKHHPRSCTQRLTLPKHEGGRGIIDIQNLHNNQIITLRKFFHTQAQQSALHKAIVNSDIKYTPLNLYDNLTQKNESITDTKVKLDEWLQKSLHGRHRRDLINPQVDRCASNAWLRRGELFPETEGFMIAIQDQVVETRNYKKFIIRDNNLVSDQCRHCHSASETIQHITGACRSISQSDYKHRHDQVAAIVHQYLALKYKLISEKTAYYKYTPQTVIDSKKFKMYWDRTILTDKTIHNNRPDITFHDKINKTVYLIDIAVPNTHNLTSTYTDKITKYTDLSIELKSQWKVKVVKTVPIVISATGIIPKTLESSLKTLNIHHFTYILLQKAVIINTCRLVRKFLAIDE

SEQ ID NO: 22629 - protein, 1364 aa, Dyscophellus porcius
MKSNKNFKNKNYSHRDSAVKTRTYNLRPLPGVNREKLNTNADVLNTQIAHIEEVDQTPTIPSSNASSPISSNHSLFVSPRSSIHSFENLSIPRSSTITPMSVDVVQEANARELAPAIGTKCPRKKWSAEMNIFILRTYYEVTKMETDTKTYLIPLHNKFIERFPDMQVSKQRVGDQRRAIERNILLPPHLINQIKEEVKEQLHLLVAEIPNNTPTHDHITSTNSNTSRMRWSNEINEFIIRSYFTITRLDTNVSAYRQPLKQALITKYPHLSHLSEQRISDQYRVIIKNKMIGDDRLQQIKDEVFLELRQMEQEQSHIQTSSHQSFGSVLSDTYTQIPTTDTTNIEITTETNNSNHNQLNSSSLNGTAIEDIFIEALNNFKSVEPTHRPYLPAQKASKKLTLITNYVNSTLLPIYLNNVSDFSQFENIVYCAAFTVCTYNGAKILTVENTREPKKQNIPKWQRRLQDRIEDLRVKIGRLTEYMRGNTSRKLNTYIEKIKLQYKVHSKYEDENINLAEFMDTMKQKLNLLSNRLRRYKQTTLRKYQNNQFTNNEKLFYRTLDTPHNSQHNTDTPTSEQLHTFWSNIWTNSKKHTEGEWIKKDKEVVKGIPEMQFEEIDMVLLKNVITRTHNWKATGSDKIHNYWFKKFTHIHSHLLTHVNNFIRNPDTLPIYITKGVTYMLPKDKDDIKNPAKYRPITCLQNIYKIITACITEVIHKHVETNGILAEQQKGCCRNSQGCKEQLTIDAVATKQAILRKRNIYTMYVDYKKAYDSIPHSWLIYILKHYKIHPTLIQFLKNTMVNWSTVLKLKQVETAEIHIRRGIFQGDSLSPLWFCLALNPLSTVLNNSKIGYKIRHNSTSYTLSHLLYMDDIKLYGSNLKEIYKLADITQSFSADIQMEFGIDKCKIQSVHRGRLEYNSYYTAIGREIEPMNDSDGYKYLGFQQSRQIHHKETKQVLTHRFKDRLHKILKTALNSKNTIKAINTYAVPLLTYSFGIITWSQTDLKKLQRIINTSMTKHRKHHPRSCTQRLTLSKLEGGRGLIDLQNLHNKQITRLRSFFHTRAQESTLHKAVIEADIRYTPLNLHIISVQKNETIIKTQQKLDEWLQKSLHGRHRRDLIDPHIDKQASNTWLKRGELFPETEGFMLAIQDQVIETRNYRKFIIHDNTLISDQCRHCHGASETIQHITGACRSISQTDYKHRHDQVAAIIHQYLGFKYKLLKEKIAYYKYSPQAVIESDKFKLYWDRTILTDRTIYHNRPDITLHDKVNKVAYLIDVAVPNTHNLTSTYSEKITKYTDLSIELKSQWKLKTVKTVPIIISATGVIPQTLRISLNTLNIHHFTYILLQKAVIINTCRIVRKFLSLNE

SEQ ID NO: 22630 - protein, 1383 aa, Aurina azines
MPRGGRTLDSTLLHNPNDQRSTSKNKHAMRLRNRTIPQAGTREGESRPGPSSSGCPTYSGGGTVSHKTTQAYTAVVNKSPITSHPSSPISSTHSLFPSPSSSPSNSNPSPSISSDHSLFKSPRSSPHSFESPPVTPMSADVVQEANASETAPAAGIKRARKKWSVEMNIFILRTYYKITKMETDIRTYLIPLHNKFIEQFPDMQVSRQRVGDQRRAIERNNLLPSHIINQIKEEVKAQIHLAESSYHTPNHGKDLTNEPNTSRMRWSNEINEFIVRSYFKITSLGTNLSAYRRPLKSALITKYPHLSHLSEQRISDQYRVIINNKMIEENRLQEIKDEVLIDLNRIEQETSNIQSTSNPSLETMVNDTHTPIIVNNTRINSQNNLNTTAIEDIFVKALNNFSTFEPTQRPYIPRQKPSKKLATVTHYVNSTLLPKYLTEVSEFSRFETILYCAAFTVCTYNGAKIFTTIENRSRTQNIPKWQRRLQNRIQDLRVKIGRLTEHMRGNTSTKLNKHVEKIKLQYKVHSKHEDENTNVAQFMDTLKQKLNLLSSRLQRYKQTTLRKYQNKQFTNNEKLFYRTLDISNTQTDLNSPTSEQLHTYWSNIWSNSKNHTEGDWIKQDKEKVKCILEMQFEEIDIDLLQTVITRTHNWKATGSDKIHNYWFKKFTYIHPYLLTHINNFIRKPESLPNYITKGVTYMLSKDKEDTKNPAKYRPITCLQNIYKLITACITELIQKHIESYNILAEQQKGCRRRSQGCKEQLTIDAVATKQAVTRKRNIYTMYVDYKKAYDSIPHSWLIYILKHYKIHPDLIQFLENAMINWSTVLKLNNVETAQINIRRGIFQGDSLSPLWFCLALNPLSTTLNNSNTGYKFRQNNTSYTLSHLLYMDDIKLYGSNLKEVYKLADITQLFSSDIHMEFGIDKCRIQSVHRGRLEYNSYYTATGDEIEPVDSDNGYKYLGYQQSRQIHHKETKQTLTNKFKQRLHKILNTALNSKNTLKAINTYAVPLLTYSFGIIKWSQTDLKTLQRLINTRMTKYRKHHPRSCTQRLTLPKIEGGRGLIDLQNLHNKQITTLRSFFHARAQQSTLHKAVIQADIKHTPLNLHDNSTQKNQTIIKPQQKLDEWLQKSLHGRHRRDLINPHIDKQASNAWLKKGELFPETEGFMLAIQDQVIETRNYKKFIIRDNTLISDQCRHCHSASETIQHITGACRSISQTDYKHRHDQVAAIIHQYLAVKYKLIEEKIAYYKYIPQTVIESANYKLYWDRTILTDKTIHHNRPDITFHDKVNKSVYLIDIAVPNTHNLTNTYTEKITKYTDLSIELKSQWKVKTVKTVPIIISATGVIPQTLQNSLNTLNIHYFIYILLQKAVIINTCRIVRKFLSLHE

SEQ ID NO: 22631 - protein, 1264 aa, Gindanes brontinus
MPWWTFNSLAIRGYTMKSTCNTKNNNINLNTATRSRAYNLRSLNRQIFTKDDCQIPTVTLSNSSSPSSTYSLFQSPRSSPKSYEEPTTSRSSAATSISVDVVQEANAENPVPAMDNKSSRKKWSNEMNIFILRTYYEVTKMETDIGTYLTPLHSKFIEEFPEMQVSRQRLGDQRRAILRNRLLSLEKIAEIRNEVETHLKIVGSSNNTTTHEYITQNTQRMRWSNDINEFIVRSYFQITSLETNLSGYRQLLKQAVITKYPSLSHLSEQRISDQHRAIINNKMISHNRLQQIKDEIAVELTRVERENSDQSSNTVIETINDDHDLTTTITTNLSNTYTTPPNTIEIEDIFTKSVKEFNMTDPTQRPHIPVQKSSRKLAIITHFVNTKLLPKYLTDTTEFRDVEKLLYCAAYTVCTSNGAKIKLYSEYKPRLQSIPRWQRRVENRIKNLRVMIGRLTEYIKGNKGVKLCMHVEKIKVHYKIHAKYDKANTDLIHFMDTLKQKLNLLSNRLRRYKQTTLRKSQNTQFNRNEKYFYRSINTLQCRKPADPDTPPSEQLHTYWSNIWADTKTHIEGEWFEQDKEHIKNLSEMQFEHIDMHLLKHIISKTHNWKAPGSDKIHNYWFKKFTNIHPHLLTHINNFIREPNTLPLYITKGVTYMLPKDKTDTKNPAKYRPITCLQNIYKIITACITELVRKHIEINGILAEQQKGCRKGSQGCKEQLTIDAIVSKQALARKRNIYTMYVDYKKAYDSIPHSWLITILQHYKIHPILIQFLQKAMANWSTALKINNILTKEINIRRGIFQGDSLSPLWFCLALNPLSTALNNCNKGYKIKHNNTSYTLSHLMYMDDIKLYGSNIREIYKLADITQSFSSDIQMEFGIDKCRIQSIRRGRLENNTFNTAIGEKIEPVDCDSGYRYLGYQQSRQIHHKETKLTLTSKFKDRLHKILNTALNSKNTIKAINTFAIPYLTYSFGIIKWSQTELKSLQRIINTSMTKHRKHHPRSCTQRLTLPKTEGGRGLIDIKNLHNSQITKLRHFFHTRAQQSTLHKAVIQADIKYTPLNLCDTGTQKNESISKPQQKLEEWLQKSLHGRHRRDLISPHIDKHASNAWLQQGELFPETEGFMVAIQDQVVETRNYKKFIIQDNTLVSDQCRHCHSASETIQHITGSCRSIAQTDYKHRHDQVAAIIHQYLALKYKLISEKTAYYKYSPQAVIDTNKYKLYWDRTILTDKTVDNNRPDITLYDKTKKVVYLIDIAVPNTHNLTSTY

SEQ ID NO: 22632 - protein, 1348 aa, Pythonides amaryllis
MPWWTFNSLATRGYAMKSNSEIKNNNTRSQIYNLRPLNRKTQPKNVQQIFNEPCTSFNPPSPTSSSTSIHFESPRSSPKSYEDPIRSRSSTVTPMSMDVVQEANAGNPAPATDNKSCRKKWSTEMNIFILRTYYEVTKMETDIGYYLTPLHSKFSDKFPEMQVSRQRLGDQRRAIVRSRLLSLEKINQIRNEVEEQLKLIGSSTDLSTHEHITQNTQRMRWSNEINEFIVHSYFEITSLETNLSGYRQLLKKAVVTKYPSLSHLSEQRISDQYRAIINNKMISLNRLQEIKDEIAVELNMRERESLQHSSDTIIDRIELNEEPRHINRNSQNIGTNNSNRNETYTIPLNSKEIEDIFTKSLTEFNMTDPTQRPYLPIQKPSRKLATITHFVNTTILPKYLTDTELKDLEKILYCAAYTVCTSNGAKINLSSEYKPRTQNIPKWQRRLQNRVKNLRVMIGRLTEYLKGNKSEKLSMHVERIKVHYKIHAKYDKENTDLTHFMDTLKQKLNLFSNRLRRYKQTTLRKSQNTQFNNNEKYFYRSINTLEATKPKETDTPPPEELYKHWSNIWANFRNHTEGDWFKQDKQYIKNLSEMQFEQIDMTLLKHIISKTHNWKSPGSDKIHNYWFKKFTSLHPHLLTHINNFIKEPNTLPLYLTKGVTYMLPKDITDTRNPAKYRPITCLQNLYKIITACITELIRKHVETNNILAEQQKGCRKGSQGCKEQLTIDAVVSKHALARKRNIYTMYIDYKKAYDSIPHSWLISILKHYKIHPTLTQFLQNTMTNWRTSLKINNIVTQEINIRRGIFQGDSLSPLWFCLALNPLSTSLNNSSKGYKIKYNNTSYTLTHLMYMDDIKLYGSNIREIYKLADITQSFSSDIQMEFGIDKCRIQSVRRGHLENNTFNTAAGEIIEPVDCDTGYRYLGYQQSRQIHHKETKLTLIGKFKDRLHKILNTALNSKNTIKAINTFAIPYLTYSFGIIKWSQTDLKSLQRTVNTCMTKHRKHHPRSCTQRLTLPKTEGGRGLIDIRNLHNNQITKLRLFFHTRAQQSTLHKAVTQADIKYTPLNLYDHNKQKNEIITDPQQKLDEWLQKSLHGRHRRDLVNPHIDKHASNAWLQRGELFPETEGFMIAIQDQVVETRNYKKFIIQDTTLVSDQCRHCHSGSETIQHITGSCRSISQTDYKHRHDQVAAIVHQYLALKYKLISEKTAYYKYTPKAVIDSDKFKLYWDRTILTDKTVYNNRPDITFHDKAKKIVYLIDIAVPNTHNLTSTYTDKTTKYTDLAIELKSQWKVKIVKTVPIVISSTGVVPHTLKDSLITLNIHHLTYLLLQKATIINTCRIVRKFLSMDEN

SEQ ID NO: 22633 - protein, 1349 aa, Quadrus cerialis
MPWWTFNSLASRGYRMKSTSNNDTNSNYSTRSRIYNLRSLNRQTLAKGDLQTVNLAEISLNSISPASSCSLFQSPRSSPTSYEDPTTSRSSTVTPISMDVVQEANAVKPGPAMDNKRSRKKWSNEMNIFILRTYFEVTKMETDLGTYLTPLHIRFMEKFPEMQVSRQRVGDQRRAIVRNKLLSIEKINEIRNEVEAQLKLIESSTDIPATEHTIQNTMRMRWSNEINEFIVHSYFQITSLETNMSGYRQLLKQAVVTKYPFLSHLSEQRISDQHRAIINNKMISLDRLQEIKDEIAIELNRIDKENSQQSSNTHIVTVEDFENPGNIENNQNLGNNNNNLNEAYPKPPNSAEIEDTFVKALTEFNMTDPTQRPYIPIQKSSRKLTIITHFVNTTLLPKYLPDTTDFVDFEKIIYCAAYTVCISNGAKINLSPEYKPRQQHIPKWQRRLQNRIENLRIMIGRLTEYLKGNKSEKLVRHVEKIKEQYKIHAKYDKENTDITHFMDTLKQKLNLVSNRLRRYKQTTLRKSQNTQFNRNEKFFYRSLNAIQCSKTANTDAPSSEQLYTYWSNIWGDDKNHTGDWIKHDKQFTTTIPEMQFEQINIQLLKYVIAKTHNWKAPGSDKIHNYWFKKFTYIHAQLLIHINNFIREPKTLPPYITKGVTYMLPKDKTDTKNPAKYRPITCLQNLYKIITACITELIQKHVETHGIMVEQQKGCRKGSQGCKEQLTIDAVVSKQALVRKRNIYTMYIDYKKAYDTIPHSWLISILTHYKIHPTLTQFLQNTMKNWNTALRINNTVTNEINIRRGIFQGDSLSPLWFCLALNPLSNALNSCSKGYKIKHNNTTYTLSHLMYMDDIKLYGSNIREIYKLADITQAFSLDTQMEFGIDKCRIQSVHRGQLENNTYNTATGEIIEPVDTHSGYRYLGYQQSRQIHHNETKTTLVNKFKDRLHKILNTALNSKNTIKAINTFAIPYLTYSFGIIKWSQTDLKSLQRNVNTIMTKHRKHHPRSCTQRLTLPKSEGGRGLIDIRNLHNNQITKLRHYFHTRAQQSSLHQAVIQADIKYTPLNLHDNNTQKNENITNSQQKLDEWLQKSLHGRHRRDLINPHIDKDASNAWLQRGELFPETEGFMISIQDQVIETRNYKKFIIQDRTLVSDQCRHCHSASETIQHITGSCRSISQTDYKHRHDQVAAIVHQYLALKYKLIEEKTAYYKYTPKAVIDSDKYKLYWDRTILTDKTIHNNRPDITLHDKIKKVVYLIDIAVPNTHNLMTTYTDKTTKYTDLAIELKSQWKVKFVKTVPIVISATGVVPRSLKDSLNTLNIHHLTYLLLQKASIINTCRIVRKFLAMDENG

SEQ ID NO: 22634 - protein, 1328 aa, Pythonides amaryllis
MKSTSRINSNNARSRIYNLRPLNRTLVNNDHHTPNISRSNSSSPTSTSSLFEPPSSSPKSYEDPITSRSSTTSMSVDVVQEANAENLAPAIGNKSSRKKWSTEMNIFILRTYYEVTKMETDVGTYLTPLHSKFSENFPEIQVSRQRLGDQRRAIVRNRLLSLEKINQIRNEVEVQLKLIESSNEIPTHEHITLNTQRMKWSNEINEFIVRSYFQITSLETNLSGYRQLLKHTVVTKYPNLSHLSEQRISDQNRAIINNKMISINRLQEIKDEIAIELNKVERESVQQYLDSTTETIVLNENIINIENDQNIGINNRNQNETYSIPPNSTEIEEIFTKSLTEFNFTDPTQRPYLPIQKASRKLATITHFVNTTLLPKHLTDTTEFSDVEKLLYCAAFTICTSNGAKINLSTEHRPRPQKIPKWQKRLQSRVKNLRIMIGRLTEYLKGNKSKKLSMHVQRIKSHYKIHAKYDKENTDLTHFMDTLKQKLNLYANRLRRYKQTTLRKSQNSQFNRNEKYFYRSLNTSQCTNSSETNTPSSEQLYTYWSNIWGTDRNHTEGDWFKRDKQSVKNVADMQFEHIDMHTLKHIISKTHNWKATGSDKIHNYWFKKLTSIHPQLLTHINKFIREPNTLPPYITKGVTYMLPKDKSDTKNPAKYRPITCLQNLYKIITACIAELIRKHIEINGILAEQQKGCRKGSQGCKEQLTIDAVVSKQALARKRNIYTMYIDYKKAYDSVPHSWLISILKHYKINPILTQFLQNTMSNWSTALKINNIVTNEINIRRGIFQGDSLSPLWFCLALNPLSTALNNCNKGYKIKYNNISYTLSHLMYMDDIKLYGSNIREIYKLADITQSFSSDIQMEFGIDKCRIQSVYRGQLENNTYVTATGEKIEPVDSDSGYKYLGYQQSRQIHHKETKLTLTSKFKNRLHKILNTALNSKNTIKAINTFAVPYLTYSFGTIKWSQTELKSLQRIINTSMTKYRKHHPRSCTQRLTLPKNEGGRGLIDIRNLHNNQITKLRHFFHTHAQQSTLHKAVIQADIKYTPLNLHDNTTQKNESITQSQQKLDEWLQKSLHGRHRRDLINPHIDKYASNAWLQRGELFPETEGFMVAIQDQVIETRNYKKFIIKDSSLVSDQCRHCHSASETIQHITGACRSISQTDYKHRHDQVAAIVHQYLGLKYKLISEKVAYYKYTPKAVIDSNKYKLYWDRTILTDKTVHNNRPDITFHDKSKKVVYLIDIAVPNTHNLTTTYTDKTTKYTDLAIELKAQWKVKTVKTVPIIISATGVVPHTLKDSLNILNIHHLTYLLLQKASIINTCRIVRKFLAIEENS

SEQ ID NO: 22635 - protein, 1365 aa, Quadrus cerialis
MPWWTFNSLAERGYRMKSTSSIKNNNTTSNYITRSRYNLRSLKRQTLVKGEPETANISDRSLSLPSPTSSYSLFESPRSSLKSYEDPTTSRSSIATSISMDVVQEANAENPVPAIDNNKSRRKKWSNEMNIFILRTYFEVTKMETETGTYLTPLHNKFIDKFPEMQVSRQRLGDQRRAIVRNKLLSLEKINQLRNEVELQLKLIGSTNDVPIHEHVIQNTKRMRWSNEINEFIVRSYFEITSLESNISGYRQLLKQAVVSKYPCLSHLSEQRISDQHRAIINNNMISLNRLQEIKDEIVIELNRIEKDNSVTQFQNNTNPHQQSPNASGVTMAVNENSNNAVENSQVLGNINTAQNGTYPIPPNSSEIEDTFVKALSEFKLTDPTERPYIPIQKSSRKLTIITHYVNTTLLPKYLTNSTEFSDVDKIIYCAAYTVCVSNGAKIKLIAEHTQRQQCIPKWQKRLQNRIENLRIMIGRLTEYVKGNKSEKLIRHVEKIKENYKIHAKYNSENTDITHFMDTLKQKLNLVSNRLRRYKQTTLRKTQNTKFNSNEKYFYRTLNTLQCTQAPSSQTPPSEQLYSYWSNIWGNVKNHTEEKWINQEEQFIKNVPEMPFEQIDMQLLKYIISKTHNWKAPGSDKIHNYWLKKFTTIHCHLLTHINNFIKEPNTLPPYITKGVTYMLPKDKTDTKNPAKYRPITCLQNIYKIITACITELIRKHTETNGILVEQQKGCRKGSQGCKEQLTIDAVVSKQALARKRNIYTMYIDYKKAYDSIPHSWLIRILQHYKIHPTLTQFLQNTMKNWSTTLRINNTLTKDIYIRRGIFQGDSLSPLWFCLALNPLSNALNGSSKGYKIKYNNTSYTLSHLMYMDDIKLYGSNIREIYKLADITQSFSSDIHMEFGIDKCRIQSVHRGHLESNTYDTATGEKIEPVDYDSGYKYLGYQQSRQIHHKETKITVISKFKDRLHKILNTTLNSKNTIKAINTFVIPYLTYSFGIIKWSQTDLKSLQRTVNTTMTKHRKHHPRSCTQRLTLPKSEGGRGLIDIRNLHNSQITKLRQFFHTRAQQSTLHKAIIQSDIKHTPLNLYDNSTQKNENITQSQQKLDEWLEKSLHGRHRRDLISPHIDKRASNAWLERGELFPETEGFMIAIQDQVVETRNYKKFIIQDSTLVSDQCRHCHRASETIQHITGSCPSISQTDYKHRHDQVAAIVHQYLALKYKLITEKTPYYKYIPKVVIDSDKYKLYWDRTILTDKTVHNNRPDITLHDKTKKVVYLIDIAVPNTHNLTSTYTDKINKYKDLAIELKSQWKVKTVKTVPIVISATGVVPRTLKESLNTLNIHQLTYVLLQKASIINTCRIVRKFLAMDENG

SEQ ID NO: 22636 - protein, 1362 aa, Ouleus salvina
MPWWTFNSLAVRGYTMKSTNNIKNSIKNSSNTTRSRYNLRSLKGQSLIKGEPEAAEISDTLLSLPSPTSSYSLFESTSSSPKSYENLSTSRSSTATSMSMDVVQEANAENPVPAIDNNKSRRKKWSSEMNIFILRTYFEVTKMETDIGTYLTPLHNKFIDEFPEMQVSRQRLGDQRRAIVRNRLISLEKIKQIQNEVESQLKLTESTNDMPTHEHVTQNTKRMRWSNEINEFIVRSYFEITSLESNISGYRHLLKQAVIAKYPHLSHLSEQRISDQHRAIINNKMISFNRLQEIKDEIIIELNRIEKDNSFTQLHMNANTQHQSPNTSIVTMAVNDNLGNIVENGHVLRNNNTNRNRIYTLPPNCSKIEDTFVKSLEEFNMTEPTDRPYIPIQKPSRKLTIITHYVNTTLLPKYLINSTEFRDVEKLIYCAAYTVCLSNGAKIKLIPEHTQRQQRIPKWQKRLEIRVENLRIMIGRLTEYVKGNNSEKLIRHVEKIKENYKIHAKYDVENTDITHFMDTLKQKLNLVSNRLRRYKQATLRKTQNTQFKNNEKYFYRTLNTLQSSSSETPPSEQLYSYWSNIWGKVKNHTEEKWIQQDQKFIKNVSEMQFEHIDMQLLKYIISKTHNWKAPGSDKIHNYWLKKFTTVHSHLLTHINNFIKKPNTLPPYITKGVTYMLPKDKTDTKNPAKYRPITCLQNIYKIITACITELIRKHTETNGILVEQQKGCRKGSQGCKEQLTIDAVISKQALARKRNIYTMYIDYKKAYDSIPHSWLISILKHYKIHPTLTQFLENTMKNWSTALKINNIITKDISIRRGIFQGDSLSPLWFCLALNPLSNALNSSTKGYKIKYNNTSHTLSHLMYMDDIKLYGSNIREVHKLADITHSFSSDIHMEFCIDKCRIQSVHRGNLKNNAYETARGEKIEPVDRDSGYKYLGYQQSRQIHHKYTKVTLISKFKDRLHKILNTALNSKNTIKAINTFAIPYLTYSFGIIKWSQTELKTLQRAVNTTMTKHRKHHPRSCTQRLTLPKSEGGRGLIDIRNLHNSQISKLRHFFHTRAQQSPLHNAIIHADIKYTPLNLYDNSIQKNENITKSQQKLDEWLEKSLHGRHRRDLINPHIDKLASNAWLQRGELFPETEGFMIAIQDQVIETRNYRKFIIQDSTLVSDQCRHCHSTSETIQHITGSCPSISQTDYKHRHDQVAAIVHQYLAFKYKLITEKTAYYKYIPKAVIDSDKYKLYWDRTILTDKTIYNNRPDITLHDKSKKAVYLIDIAVPNTHNLTSTYTDKITKYKDLSIVLKSQWKVKIVKTVPIVISATGVVPRTLKDSLNTLDIHQLTYVLLQKASIINTCRIVRKFLAMDENS

SEQ ID NO: 22637 - protein, 1359 aa, Morvina fissimacula
MKSTIKDKNKNDYNNLDSTVRSRRYNLRPLAGGRRQKSNSDVSCYDIQNSNDNELRGQAQPHDINSFRVSPSSPTTITSLFPSPRSSLNSYEDPTTSRSSTATPMSVDVVQEANAIEPAPATHTKSVRKKWSNEMNIFILRTYYRVTNMETELGNYLTPLHNKFIEQFPEMQVSRQRVGDQRRSIERNKLLTLDTINQIKEEVRVQLNLAETSTNTLQYDQYNHPELHTSRMRWSNEINEYIIRSYFKVTSLETNISGYRQLLKQAVITKYPFLSHLSEQRISDQHRAIINNKMVSDNRLQEIKDDISIELNRIQKKNLRQSSPALQETLEINNSQGCFDNGQIPERINSNLSSSCIKPSNAAEIEDIFSKILNEFKSVDPTQRPYIPKQKASKQLAIITHFVNSTLLPKYLTDESNFTTIETLLYCAAVTVCSSNGAEISLTSGYKSKTQATPRWQRRLQNRIKDLRITIGRLTEYVNGNKSKKLSIHIEKIKLQHKVHAKHEKENSELIQFMDTLKQKLNLYANRLRRYKQTTLRKSQNTQFNNNEKLFYRTLQSPHCSNHTNTESPTLDQLHTYWSDIWTNSKNHIEGDWINQDKQTVENISEMRYEAIDMNLLQNVIAKTHNWKTPGSDKIHNYWFKKFTSLHPHLLTHINKFIKNPDSLPPYITKGVTYMLPKDKNDTKNPAKYRPITCLQNLYKIITACITELISKHTDMNDILAEQQKGCRRGSQGCKEQLTIDSVVSKQALSRKRNIYTMYIDYKKAYDSVPHSWLIYILEHYKIHPTLIHFLKNTMTKWNTVLKINNTETGQISIRRGIFQGDSLSPLWFCLALNPLSTALNKSNNGYTLKHNKTSYTLSHLLYMDDIKLYGRNIREIHKLADITQSFSSDIQMEFGIDKCRIQSVHRGHLENNSYFTSTGEEIEPVDCDSGYRYLGFQQSRQIHQKQTKIVLTSKFKERLNKILKTALNSKNTIKAINSFAIPYLTYSFGIIKWSQTELQNLQRNINTSMTKYRKHHPRSCTQRLTLPKIEGGRGLIDLKNLHNNQITTLRHFFHTRAQQSSLHKAVTQSDIKYTPLNLHDNSTQNNQTITNPQQKLDKWLQKSLHGRHRRDLINPHIDRHASNAWLKRGELFPETEGFMIAIQDQVIETRNYKKFIIRDNTLPTDQCRHCHNSSETIQHITSACRSISQTDYKHRHDQVAAIIHQYLALKHKLILEKTAYYKYKPQAVIDTRSFKLYWDRTILTDKTIYNNRPDITLHDKINKTVYLIDIAVPNTHNLTSTYTDKITKYTELSIELKSQWKVKTVKTVPIVISATGVIPQTLEKSLKMLNIHCMTYILLQKAVILNTTRIVRKFLSID

SEQ ID NO: 22638 - protein, 1455 aa, Zera sp.
MTSSSPLMGNLSSQISLSHSAHLASYLSCSNTLLKGALVSRSSGGSSNNVNRSESKDSVTSTHSDSVFERVMRTGKVPVPTPRTKDLMKIESGGEGFKASSKQLSRDSSYLRYSNQPPVPPPRSSTDMRTNYIESGYDVDQDSCDQPIDFSRKYSETKTTESEPQLSEKPKPSEPNKKYSKKESANFGDYQETDLDQPTDYSLRYAEHQSETGSDISEPPGPSVHEDTIKHFATEGTPYETPIIFSTATSMSMDVVQEANAENPVPAIDNNKDRRKKWSNEMNIFILRTYFEVTKMETDIGTYLTPLHNKFIDKFPEMQVSRQRLGDQRRAIVRNRLLSLEKINQIRNEVESHLKFIGSTNDTPTHEQVVQNTTRMRWSNEINEFIVRSYFEITSLESNKSGYRPLLKHAENLQQSSNKSSVTMEVIGTPGNIIENTLGNINTTPNETYTLPSNCSEIEDTFLKSQIEFNMIDPTERHFIPIQKSSKKLTIITHFVNTTLLPKYLINSTEFRDLEKLIYCAAYTVCVSNGAKIKRIPEYTQRQQRIPKWQKRLQNRVEKWRIMIGRLTEYVKGNKSEKLIRHVANIKEHYKIHAKYDTENTDITHFMDTLKQKLNLTSNRLRRYKQTTLRKTQNTQFNNNEKYFYRSLNSLQCTQAPNTETPLAEQLYTHWLNIWGDAKNHTGENWIRQDEEFNKNVSEMQFEKIDMQLLKYIISKTHNWKAPGSDKLHNYWFKKFTTVHSHLLTHINNFIREPNTLPPYITKGVTYMLAKDKTDTNNPAKYRPITCLQNINKIITGCITELIRKHTEINGILAEQQKGCRKGSQGCKEQLTIDAVVSKQALDRKRNIYTMYIDYKKAYDSIPHSWLISILKHYKIHPTLTQFLQNSMKNWSTALRINNTLTKDIKISRGIFQGDSLSPLWFCLALNPLSNSLNSSSKGYKIKYNRTSSTLSHLMYMDDIKLYGSNIREIYQLADITQSFSSDIHMQFGIDKCRIQSVHRGHLENNIYETAIGEKIEPVDNDSGYKYLGYQQSRQIHHKETKTTLISKFKDRLHKILNTALNSKNTIKAINTFAIPYLTYSFGIIKWSQTDLKSLQRVVSTIMTKHRKHHPRSCTQRLTLPKTEGGRGLIDIRNLHNSQITKLRQFFHTRAQQSTLQKAIIQADNKYTPLNLYDNSKQKNENITKSQQKLDEWLEKSLHGRHRRDLINPHIDKLASNAWLQRGELFPETEGFMIAIQDQIVETRNYKKFIIKDSTLVSDQCRHCHRASETIQHITGSCPSISQTDYKHRHDQVAAIVHQYLAFKYKLITEKTAYYKYIPKAVIETDKYKLYWDRTILTDKTVHSNRPDITLHDKTKKFVYLIDIAVPNTHNLTSTYTDKINKYKDLTIELKSQWKVKIVKTVPIVISATGVVPRTLKDSLNTLNIHQLTYVLLQKASIINTCRIVRKFLAMDENN

SEQ ID NO: 22639 - protein, 1366 aa, Udranomia orcinus
MKSSNNIHSKTNENRKISDSAVETRKYNLRPLTGACRRKYETTQGSSNLEEFTGLVNNHQKPTIDNINSPSNPSSPISSTHSLFQSPSSSIHSFENPSTSRYTTPSPMSVNVVQEAYAGNPAPATGTRCARKKWNAEMNIFILRTYYKETKMETDTRTYLTPLHTKFIERFPNMQVSRQRVADQRRAIERNKLLPTETINKIRQEVKTELQNETETSMMTCQPQLLNTDQILNTGTNTTRMRWSTEINEFIVRNYYRITNLETNRSAYRQPLLQAVITKYPHLSHLSEQRVSDQCRAVINNHMISADKLQEIKDEVLLELNRREMYNSQQQQLTHTNTLHLNADTNNTDNNVIQHMSGITSTNLHNNIKNTFDKTLLDFKTTEPTGRPYIPRQKPSKKLSFITHTINNLLPSYLSENCDFSEMQLTLYCAGYAAAICNGAKINVDISRQNTPRTRTQNIPKWQKRLQHRIEDIRSKIGRLTEYMKGHASQKLSKYVEAIKIQYKIHAQFESENSELTQFLDTLKQKLNLLSNRLRRYKQTTLRKTQNSQFTNNEKQFYQTLEHGHNNTPTDSSTPAADQLHTFWSNIWGNPEKHIEGNWFIEEQEFTKNISEMQFENVTLDLLKTTINRTHNWKAPGSDKLHNYWYKKFTNVHPHLLRHINSFIQSPHTLPAYITKGITYMLPKDNTDTQNPAKYRPITCLQTIYKIITSCISELIYKHTDLNNILAEQQKGCRKRSQGCKEQLIIDAVVSKQAQTKKRNIYTMYIDYKKAFDSVPHSWLIRILHNYKIHPTLTEFLKYAMSKWSTMLKLQNIQTEEIDIHRGIFQGDALSPLWFCLALNPLSFILNNSKNGFKIKYSNTSHTLSHLMYMDDIKLYGSNLREINYLADLTQAFSSDIKMEFGIDKCKIQSIRKGQLEQNTYQMSSGEVVEPVNCEYGYKYLGYEQTSILHHKRIKETLTNKFRGRLHKILNSHLNARNTTKAINTFAIPILTYSFGVINWSQSDLKKLQRIINTTMTKHRKHHPRSCTQRLTLKKLEGGRGIIHLQNLHNSQITSLRSFFHSKALQSPLHNAITQSDIKHTPLNLHSSSTQKNQNIICQQQKCDEWLQKALHGRHRRDLINPHVDKAASNEWLKRGELFPETEGFMLAIQDQVIETGNYRKFIIRDKNLLTDICRHCHSSSETIQHITGACKSIAQTDYKHRHDQVASIIHQQLAFKYKMITEHIPYYKYKPQTVIDTKDYKLYWDRTILTDKTIHHNRPDITLHDKSNKTVYLIDIAVPNTHNLITTHTEKMAKYTDLCIEIKSQWKVAKVRTVPIIISSTGIIPNTLHDSLRTLNIHRLVYAHLQKAVIINTCRIVRKFLSIED

SEQ ID NO: 22640 - protein, 1358 aa, Oechydrus chersis
MKSSINLNENRNPDSAVNTRRYNLRSLPGGRRRKYEATTELSRMQLVGIDHTIQLPITEIINSNSNPSSPISSTHSLFQSPSSSPHSFENLSTSRSTIESPMPVHVVQEAHADYTAPVTVTTCARKKWSEEMNIFILRTYYEETKMETDLRTYLLPLHTKFTQRFPNMQASKQRLGDQRRAIERNKLLPIHIINNIKQEVADQIQNNTNTSRDIHQARHDQSLQAIQTQPNNAPRMRWSAEINEFIVHTYYKITNLENNRSAYRQTLLQAVITKYPHLSHLSEQRVSDQCRAIINNKMIKEHRLQEIRDEVAIELNIRETPFVDSIDNNNQHNNIINHTTQNHTTENRTTHNLSNKNTDKIKNTFTKTLQDFKSIEPTIRPYIPKQKPSKNLAFITSFINNNLLSMYLTQDSDFTQVQLTLYCAAYTAATCNGAKIYTHKKKEDTSRIANIPKWQKRLQYRIESIRVKIGKLTEYIKGNASHKLKKHIEEIKKHYKIHSNFENENTELVQFLDTLKQKLNLLSNRLRRYKKTTLRKTQNTQFNNNEKQFYRTLEHPHNITPTDTEMPSPSKLHSFWSSIWTNPIEHKEGQWCKQIKESVKDVSDMQFEEISLDLLKMIISKTHNWKSPGSDKLHNYWYKQFTTLHPYLLKHINKFIKSPDTIPLYITKGITYMIPKDYTDTQNPGKYRPITCLQNIYKIITACVSELIYKHTESNNILAEQQKGCRKNSQGCKEQLIIDSIASKQAINKKRNIFTMYIDYRKAFDSVPHSWLIYILENYKIHPTLIHFLKTTMSKWSTVLKLKELETEEIPIRRGIFQGDSLSPLWFCLALNPLSTLLSNSTKGFKVKYSNTSYTLSHLMYMDDIKLYGSSLKEINQLADITQNFSSDIQMEFGIEKCRLQSVHRGRLKFNTYETNSGDVIEPVDYGDGYKYLGYEQSKQIHHKQIKQSLTNKFKDRLHKILNTFLNATNTIKAINTFAVPILTYSFGVISWSQSDLKKLQRIINTMMTKYRKHHPRSCSQRLTLPKSEGGRGLVDIKNLHNTLITSLRSFFYSKALQSPLHTAIVKSDIKHTPLNLQNESAQNNQKVTNCQQKIDEWLQKSLHGRHRRDLINPHVDKEASNEWLRRGELFPETEGFMLAIQDQVIETSNYRKYIIRDKGLITDQCRHCHSVSETIQHITGSCKSITQTDYKHRHDQIASIIHQYLAFKHKLITERIPYYKYKPQAVIDTEEYKLYWDRTILTDKTVHHNRPDITLFDKKNKIVYLIDIAVPNTHNLINTHTEKIKKYQDLSIEIKSQWKVKKVKTVPIVISSTGIIPYTLHDSLHALNIHRLVYILLQKAAIINTCRIVRKFLSIQE

SEQ ID NO: 22641 - protein, 1357 aa, Morvina fissimacula
MKSFSYNKNTNSISKTLDSTVETRRYNLRPLSGGRRRNPEAAIECSKRKRHERLDVEKQQLTSEFVITHSKPSSSSSSSTHSLFQSPSSSPHSFESPPISRSTSISPMSVDVVQEADADNPAPATGSKCVRKKWSKDMNIFILRTYYEESKMETDRAYLIPLHTKFIKKFPNMQVSRQRIGDQRRAIERNRLLPIDTINLIRQEVATKLQNYTETTHQRLDQAPNTLPSTARMRWSNEINEFIVRNYYKITNLETNRSAYRQPLFQVVIEKYPQLSHLSEQRISDQCRAAIHNKMISEEKLQKIKDDIIIELNSKESNNTIIEKETSNTTDIRYTNTDNTNSTQNNIVQQNTYTSIKDDSFIRRTFTQALEEFKSIDPLERPHIPKQKSSKKLAVLSHYINVHLIPIHLTDDSEFKTVQLTLYCAAYTATICNGIKLHNKEKDNKPKTQIIPKWQQRLQRRITDLRAKIGKLTEYIRGNTSYRLTKQVEDIKKQYKIHAQFENENTDLTQVLDTLKQKLNLISNRLRRYKQTTLRKTQNAQFTNNEKTFYRNLEHKSTTLTDSNIPTTTQLHSFWSNIWGKTKNHTESEWCKVDKEFVKEIPEMQFEKVSLDLLRAIITKTHNWTSPGSDNLHNYWYKKFTNIHLHLLKHINNFIREPETLPAFITRGVTYMLPKDKSDTENPAKYRPITCLQNIYKIITGCLSELIYNHTQTNNILAEQQKGCRKYSQGCKEQLIIDSITSKQALNKKRNIYTMYIDYKKAFDSVPHSWLLHILTNYKIHPILIHFLKTCMVKWSTILKLQHLETEEIKIRRGIFQGDTLSPLWFCLALNPLSNLLNNSKKGFKIKHSNTSYTLSHLLYMDDIKLYGSNLKEINKLADITQQFSADINMEFGIDKCKIQSIKRGKLELNSYQTINGEVVEPVDCDKGYKYLGYEQTRQIHHKEIKQSLINKFKDRLRKILKTHLNARNSIKAINSFAIPILTYSFGVISWSQNDLKTLQRVINTTMTKYRKHHPRSCIQRLTLPNSEGGRGLIDLQNLHNTQISSLRAYFHSKALQTDLHNAISKSDIKLTPLNLHSSTTQKNQNITHAQEKIDKWVQKSLHGRHRKDLISPHVDKVASNKWLARGELFPETEGFMLAIQDQVIETGNYRKYIIRDKGLVTDQCRHCHSNSETIQHITGACKSIAQTDYKHRHDQVALIIHQYLARKYKLIDNYTPYYKYKPKAVIDTEQYRLYWDRTILTDKTVHHNRPDITLYDKPNKTVYLIDIAIPNTHNLISTHTEKMTKYTDLSIELKSQWKVQKVKTVPIIISSTGIVPYTLHQSLRNLNIHHSTYVLLQKAVIINTCRIVRKFLALDK

SEQ ID NO: 22642 - protein, 1357 aa, Achlyodes mithridates
MESSKTRRNKYKTQIPDSTVETRKYNLRPLPGGRRRNSEAVIENKEQLVGNNIKDLQPTTEIIASNSYPSSPISSTHSLFESPNSSPHSYENPSKSRSTTISPMSVDVVQEANAEYSVPATATINVRKKWSEEMNIFIMRTYYEETKFGTDHSSYLIPLHTKFIQRFPNMEVSRQRVGDQRRAIERNKLLSSDKINQIRQEVETHLQNYHLKRTDTLQPRYDESSNASTNIKRMRWSPEINEFIVRNYYKITNLETNRSAYRQPLFQVVIAKYPNLAHLSEQRIADQCRAIINNKMIPESKLQEIRDDIAIELNKTDIDREHVETQATHLDRENNTVSLNNTENNSIQPTTHSLQITPNTETIIRKTFSKALDDFKFSKPTERPYIPKQKSSKNLAIITNYININLLPLYLTDESNFEMVQLVLYCAAYTASTCNGVRIHTNASSKPNINYIPKWQIRLERRIEDLRAKIGKLTEYIRGNTSRRLIKHIELIKQQYKIHSQYENENCDLAQFLDTLKQKLNLLSNRLRRYKQTTLRKSQNSQFISNEKNFYRTIDNKHTNILSNNNTPTSQQIHTFWSAIWGNAKYHREGRWSKEESVKDILEMHFEKVSPELLRTVIARTHNWKAPGSDKLHNYWYKRYTNIHSHLLRHINMFIQEPNKMPAYITKGVTYMLPKDNTDTQNPAKYRPITCLQNIYKIITACISDIIYKHTETNNILAEQQKGCRKKSQGCKEQLIIDSVASKQALKQKRNIFTMYVDYKKAFDSVPHSWLIHVLKYYKIHPTLIHFLENTMAQWSTVIKLKHIETEEIAICRGIFQGDSLSPLWFCLALNPLSYFLDESRKGFKIRHNNTSHLLSHLMYMDDIKLYGSNLDEINKLADITDQFSADIKMEFGIDKCRIQSINRGKLELNTYQTISGETIEPVDNDSGYKYLGYAQTRQIHHKQIKQTLTNKFKDRLRKILNTHLNAKNTTKAINTYAIPILTYSFGVIKWSQSDLKKLQRTINTTMTNHRKHHPRSCVQRLTLPRLEGGRGLIDIQNLHNSQITLLRTFFHTKAEHSNLHKAIIKADIKYTPLNLNDIDIQKNQTVTQPQQKLDEWLQKSLHGRHRRDLLYPHVDKLASNEWLRKGELFPETEGFMLAIQDQVIETANYRKFIIRDKNLRTDQCRHCHSNSETIQHITGSCKSITQTDYKHRHDQVASIIHQFLARKYKLITDHTPYYKYKPKPVIDTQEYRIYWDRTILTDKTIHHNRPDITFYDKKSKTVYLIDIAVPNTHNLVTTQTEKLIKYTDLSIEIKSQWKVQKVKTIPIILSSTGVIPHSLHESLRALKIHHLAFILLQKAVIINTCRIVRKFLAIED

SEQ ID NO: 22643 - protein, 1375 aa, Aethilla lavochrea
MQGSVEADCLYPSLLVGTEMKSLKLIKNSNKKQILDSAVETRKYNLRPLSGGRRRNNEAVIENREQPVGHNTKHLQPTTEIIISNSCPPSPLSSNHSLFESPNSSPHSFENPHTSRSTTISPMSVDVVQEAIAENSAPATATMCVRKKWSEEMNTFILRTYYEETKMGTDHSTYLIPLHTKFIKRFPNMSVSRQRVGDQRRAIERNKLLSSNKITRIRQEVQTQLQIHSLTHTNTSQPQHESFSNGTNITRMRWSPEINEFIVRNYYKITNLESNRSAYRQPLFQAVIEKYPNLAQLSEQRIADQCRSVIYNKMIPETKLQEIRDDIIIELNKAEMYREQADTQVIQIIDTENPTNTNNTQNNSIGPTTHNPLVTIKTESAIRETFSKTLDDFKYIKPTERPYIPKQKSSKNLALITHFINQNLLPSYLTEESDFETVQLILYCAAYTATVCNGVKIYTKTSSQSNSHITPKWQQRLQRRIEDLRAKIGKLTEYMRGNTSKRLAKHIEAIKQQYKTHAQFENVNCELEQFLDTLKQKLNLLSNRLRRYKQTTLRKTQNTQFMNSEKNFYRTLDSKKGNTLTSTNTPTSQELHTFWSGIWSNAQYHIEGRWSKEETVKDITEMQFEKISLELLKTVITRTHNWKAPGSDKLHNYWYKRYTYIHTNLLKHINIFIQEPDKLPSYIMKGVTFMLPKDHTDTQNPSKYRPITCLQNIYKIITACISELVYKHTETNNILAEQQKGCRKKSQGCKEQLIIDAVASKQALKRKRNIYTMYVDYKKAFDSVPHSWLIQVLRNYKIHPTLIHFLENTMVQWSTVIKLKDIETEDIVIRRGIFQGDSLSPLWFCLALNPLSYFLDHSKKGFKIMYNNSSYLLSHLMYMDDIKLYGSNLNEINKLADITEQFSTDIKMEFGIDKCRIQSVKRGKLELNSYQTNGGETIEPVDNDSGYKYLGYTQTRQIHHKEIKQNLINKFKDRLHKILNTHLNAKNIIKAINTFAIPILTYSFGVIRWSQSDLKKLQRTINTTMTKHRKHHPRSCVQRLTLPKSEGGRGLIDIQNLHNSQITLLRNFFHTKSEHSILHKATVHSDIKHTPLNLNDRVTQKNQTVTQAQQKLDEWLQKSLHGRHRRDLLNPHVDKLASNEWLKRGELFPETEGFMLAIQDQVIETANYRKFIIRDKNIVSDQCRHCHCSSETIQHITGSCKSITQTDYKHRHDQVASIIHQYLARKHKLIADYTPYYKYKPKPVIDTNEYRLYWDRTILTDKTIHHNRPDITFYDKKSKTVYLIDIAVPNTHNLVTTHTEKLIKYKDLSMEIKTQWKVQKVKTIPIIISSTGIIPHSLHDSFRALNIHHSAYILLQKAVIINTCRIVRKFLAIEE

SEQ ID NO: 22644 - protein, 1262 aa, Dalla quadristriga
MLVDVVQEANAIEPVPAIGTKRARKKWSLEMNIFILRTYYEVTNMETDLSNYLIPLHNKFIEKFPDTQVSRQRVGDQRRAIERNKLVPIHTQNQIKQEVIAQIKTGHLHNTIIQSQTEKTSLNTSRMRWSNEINEFIIRSYFKITSLETNRTAYRQPLKLAVITKYPNLSHVSEQRISDQYRAIITNKMIAVDRLQQIKDEVAIELNRLEPNILQGHQSFEPINEHIPASQTQHSVDNALTLESNYVSRQSNSTRTNNTPLVNYSTIEDIFLKALSDFKMTDPTKRPYIPKQKPSKYLATTTKYVNTTLLPKYLKDNSDFKTVETILYCAAFTVCTFNGTKIIVTQENITKTPNIPKWQRRLENRIEKLRTMIGRLTEHMRGNNSKKLKIHIEKIKSHYRIHSKYEPDNINIMQFMDTLKQKLNLLANRLRRYKQTTLRKSQNTQFINNEKLFYRTLNTSQHNNKKNTDTPTSEELHKFWSNIWTNSKNHTVGEWIKPDQKLVQNIKEMQFEDIDLELLQRVIAKTHNWKATGSDRIHNYWLKKLTNIHPHLLRHINQFIKNPDTLPKYITKGLTYMLPKDQMDTKNPAKYRPITCLQNIYKIITACITELIYKHTETHNVLAEQQKGCRKRSQGCKEQLTIDAVVTRQALTRRKNIYTMYVDYKKAYDSIPHSWLLYILEHYKIHPTIIQFLKITMDNWSTILKLQHVETENISIRRGIFQGDSLSPLWFCLALNPLSTLLNNCKKGYKIKCNNSSYLLSHLMYMDDIKLYGSNLNEIHKLADITQVFSSDIQMEFGIDKCRIQSVHRGKLENNTYFTTNGEEIEPVDCDSGYKYLGFQQSRQIHHRDTKQALTNTFRNRLHKILNSALYSKSIIKAINTFAIPYLTYSFGIIRWSQSDLKKLQRIINTSMTKHRKHHPRSCTQRLTLPRIEGGRGLIDIQNLHNKQIVTLRNYFITQAQTSPLHNLVIQSDIKHTPLNLHDNTTQKNHIITEHQQKLNDWLQKSLHGRHRRDLINPHIDKQASSAWLQRGELFPETEGFMIAIQDQVVETRNYKKFIIHDSTLVSDQCRHCHAASETIQHITSACRSIAQTDYKHRHDQVAAIIHQYLALRSKLIKEKTPYYKYNPQTVLDSDNFKIYWDRTILTDKTIHHNRPDITFHDKLNKIVYLIDVAIPNTHNLTSTHTDKITKYTDLSIELKSQWKLKTVKTVPLVISATGIIPKTLHNSLRTLNIHPLTYILLQKAAILNTCRIVRKFLSMDE

SEQ ID NO: 22645 - protein, 1366 aa, Erynnis tages
MEKPNIDLSVSNKKEVLDCTVERRRYNFRPLSGGRRRNNDVGNIALDKIRSKQQVGKQQLTSETVVPISYPSSPLSSTHSLFDSPASSPHFFESPSTSRSTTASPMSVDVVQEANADKPVPATATINVRKKWSDEMNIFILRTYYEETKLETDCSTYLAPLHAKFIDQFPNMQVSRQRLGDQRRAIIRNKLLSIENINLIRQEVEELLKNGNKTANDSTHILNTGHTNGARMRWSTEINECIVRNYYKITNLESDRSAYRQPLHQAVITQYPNLANLSEQRISDQCRAIINNRMLPEEKMQQIRDEILEELYNTETQDTHIETRIFNTTNDYNTNVLTTNTDNTDISAEAITQTNASGQPIQFGFITNENQTKIRNTFTKALADFKFIEPTDRPYIPKQKSSKTLAVITNFINKNLLHSYLTDDIDFYNLQLVLYCAAYTASIHNGVRIQTKADNTRNIHNNNPKWQRRLEGRIEDLRAKIGRLTEFMRGNTSHKLKKHVEQIKKQYLVHAQHEKENSEPAEFMDTLKQKLNVLVNRLRRYKKTTLRKRQNTQFVNNEKTFYRTLEHKEHNTDCNIPTSNQFHTFWSGIWGNAQNHTESGWHQEAFTGDIPDMVFEKINIDLLKIIIARTNNWKAPGSDKLHNYWYKRFTNIHTHLLTHINNFIQNPTTLPAYVTKGITYMLPKDNTDIGNPEKYRPITCLQNIYKITTACISTLIYKHTESNNILAEQQKGCRKNSQGCKEQLTIDAVASKQALNRKRNIYTMYIDYKKAFDSVPHSWLIQVLKHYKIHPTLIHFLENTMIKWSTVLRFKNILTEEIPIRRGIFQGDSLSPLWFCLALNPLSNLLNKSKKGFIIKYNESSYTLSHLMYMDDIKLYGSNLEQINNLADITQRFSSDIKMEFGIDKCRIQSIRRGKLETNFYKTLNSETIEPVDIENGYKYLGYAQSRQIHHKKIKQILTNKFKDRLHKILNTHLNSKNITKSINTFAIPILTYSFGVINWSQSDLKKLQRIINITLTKYRKHHPRSCIQRLTLPTSEGGRGIIDIKNLHNGQITLLRTFFHTKAQHSSLHKAIAQADDKYTPLNLNTNSTQKNEVITEPQHKLNEWLHKSLHGRHRKDLINPHIDKSASNEWLKKGDLFPETVGFMLAIQDQVIETANYRKFIIRDKNITRDQCRHCHSNSETIQHITGACKTITQTDYKHRHDQVAAIIHQYIARKHKLTTEYCPYYKYKPKAVIDTIDYKLFWDRTILSDKTIHHNRPDIIFYDKKGKTVYLIDIGVPNTHNLVTTYTEKLKKYTDLSFQIKSDWKVQKVKTVPIIISSTGVIPHTLHDSLRTLNINRSIYILLQKAVIINTCRIVRRFLAIEE

SEQ ID NO: 22646 - protein, 1377 aa, Gesta gesta
MQGSVGADLSIPSLFVGIKMEKPNNNFNSNSHHSPNSKRKVLNYTGGTRSYNLRPRTGGRFRNDAVATQRSNTRLVVDQQATTDTIIHNSNPSSPISSTHSLFQSPCSSPHSFENPPSSRSTTVSPMSVDVVQEANADNPAPATATISVRKKWSDEMNTFILQTYYEETKLETDLSTYLIPLHAKFIDRFPNMQVSRQRVGDQRRAIVRNKLLPTHKINLIRKEVEERLQKYENTNGLHTTQRDLTTGNMNTGRMRWSKEINECIVRNYYQITNLETDRSAYRQPLFQAVTTQYPSLSHLSEQRISDQLRAVIHNKMLSDERLQQIKDEIVAERNRVGASNTHVEAQAPDHTDTYEINTNSSHLTQSNTTHTILIDTISNENQTAIRTTFSRALCDFELVEPTDRPYIPKQNSNKSLALLTNFINKQVLPTYLTEESTFEKIQLALYCAAYTASIHNGVKIKTVINNTTRTQNKPKWQQRLERRIEDLRIKIGRLTEYIRGNTSHRLKIHVEEIKKHYKIHAQYEKENTEPTEFLDTLKQKLNVLSSRLRRYKKTTLRKKQNTQFNNNEKLFYRTMENNQKNTVSNLPTPDQLQTFWSGIWGNAENHTDSGKYKEDFVKDIPEMLFDKINLELFKTIISKTHNWKAPGSDRLHNYWYKRYTSTHAYLLRHINDFIQNPQTLPAYVTQGITYMLPKDNTDTSNPAKYRPITCLQSIYKIITACISQLIDKHTDSNNILAEQQKGCRKNSQGCKEQLVIDAAASKEALIRKRNIYTMYIDYKKAFDSIPHSWLLYILKNYKIHPTIIIFLENIMTKWSTVLKLNQLETEQIAIRRGIFQGDSLSPLWFCLAMNPLSSLLNNSKKGFLLKCKETSYKLSHLMYMDDIKLYGSSLQEINKLADITQQFSLDIKMEFGIDKCRIQSVNRGKVESNSYETINGEIIEPVDPENGYTYLGYAQSRHIHHKAIKQTLIKKFKDRLHKILNTHLDARNTIKAINSFSVPVLTYSFGVINWSQTDLKKLQRIMNVTMTKFRKHHPRSCTQRLTLPKSEGGRGLIDIKNLHNNQITLLRTFFYTKAEQSPLHKVICQIDTKYTPLNLHDNSFQKNQTITETQQKLDEWLGKSLHGRHRKDLISPHIDKQASNEWLKKGQLFPETEGFMLAIQDQVIETANYRKFIIRDQNIATDQCRHCHSSSETIQHITGACRSITQTDYKHRHDQVAAVVHQYLARKYKLITEYSPYYKYKPKAMIDTDSYRIYWDRTIMTDKTVHYNRPDITFYDKKAKTVYLIDIAVPNTHNLVSTYTEKKKKYTDLAIEIKTQWKVLKVITIPITLSSTGIIPYTLHDSLRTLNINPSVYILLQKAVIINTCRIVRKFLSIEE

SEQ ID NO: 22647 - protein, 1430 aa, Chiomara georgina
MKIEHLFFQLTVPKLKMVMESKTKPRPQVLGGPSNFPDHDGGRADAGSRGVYNLRARRTRQTTQALLEDSDLQNDKDIHPITSTSTKKITISPISTSSVTVAPIMETRKYNLRPLSRIYRRNQDTVAKMQHVAVEAQQSQPVCETRLNVASPVSSTYSLFDSPISSPNSFENPSISRSTSVSPMSIDVVQEAAANKPAPATGIKSVRKKWSDDMNIFILRTYFEETKLETDLSTYLLPLHTKFIQQFPNMQVSRQRVGDQRRAIMRNNLLSPEQIKLIRQQVAAYLQTSDVHQQSTFEISKETTTSRMRWSYKVNEFIVRSYYKITNLESNKTGYRPLLFKSVISEYPNLAHLTEQRISDQCRAIICNKMIPEERLQEIRDEIAIELHRTEFNNTHTDTEVLHTEDAISLTESNHIQTIHIHYHTRNEITDDNETIISNTFIAALENFKCIVPAERPYIPKQTSSKNLAMITNYINNKLLPSYLNEDPDFQTVHLLLYCAAYTASICNGVKIDSNTHKSTVNTINTPKWQLRLQNRIQDLRSNIGKLTEYVRGNTSHRVRKSVEKIKTQYKTHAQFENDNCDLEQFLDTLKQKLNLLSNRLRRYKKTTLRKTQNAQFTYNEKRFYRTLQQNNLLKNNNNPSPEQLHTFWSSIWGNPAEHKEGKWCDEIKEAAINIPEMQFDIVSPELFKSVISRTHNWKAPGSDKLHNYWLKKITNTHPHLLRHINNFIKYPDTLPAFVTKGITYMLPKDNTDTSDPTKYRPITCLQSIYKIITACISELIYKHTHTNNILAEEQKGCRKNSQGCKEQLIIDAVACKQAYSKKRNIFTMYVDYKKAFDSIPHSWLVFVLKIYKINPTIVTFLEKCMGKWSTVLKLEHQESEEIHIRRGIFQGDSLSPLWFCLALNPLSTVLNNSKKGFKIKHNSAPYTLTHLMFMDDIKLYGTNLQEINTLANITQRFSIDIHMKFGIDKCKIQSILRGKFQLNSYQTLDGEIVEPVDCDTGYKYLGYQQTRIIHHKEVKQTLTIKFRDRLHKILNTHLNSRNTIKAINTFAIPILTYSFGIITWSQTDLQKLQRIVNTTMTKYRKHHPRSCRQRLTLPKSEGGRSIIDIRNLHNNQITLLRTFFYSKAEQSILHKAVTQSDIRYTPLNLHNHSTQRNQNITQIKDKLDEWLQKPLHGRHRRDLINPHVDKSASNEWLKRGELFPETEGFMLAIQDQVIETANYRKFIIRDNSLVSDQCRHCHSNSETIQHITGACKSITQTDYKHRHDQVASIIHQYLARKYKLITEYTPYYKYTPKSVIDTDLYKLYWDRTILTDKTIHNNRPDITLHDKKNKTVYLIDISVPNTHNLVSTYTDKMTKYRDLSIEVKSQWRVQTVKTVPIILSSTGVIPHSLHDSLRTLNINNSVYTLLQKAVIINTCRIVRKFLTIE

SEQ ID NO: 22648 - protein, 1341 aa, Mylon lassia
MEKPNLKFKSNYRSKLLDYTVETRSYNLRPLSGGRRRNAATEPKTFNATHPVDQQAKTDIISLNSNQSSPISSTHSLFQSPCSSPHSFENSSSSRSTTVSPMSVDVVQEANAEKPASATATISVRKKWSDEMNTFILRTYYEETKLETDHSTYLTPLHAKFIDRFPNMQVSRQRVGDQRRAIIRNKLLSTHKINLIRQEVEERLKKHKETSDNIHISQCEQILKNGNTNTARMRWSNEINEYIVRNYFKITNLETDKSAYRQPLFQAVVTQYPNLSHLSEQRISDQCRAVINNKMIAEERLQQIKDEIVVELNTNVVNDVHSHSTTVIQNNSTQNFIVNDEILTESQIAIRNTFIKSLCDFEFTEPTDRPFIPKQKSNKNLALITHFINKNLLPIYLTEESSFQHIQLILYCAAYTASIHNGVRIQTGTNNTTNAHNSPKWQQRLERRIEDLRIKIGKLTEYIRGNTSRRLQTHIEKIKEHYKVHAQFESENSDLTQFLDTLKQKLNVLANRLRRYKKTTLRKRQNSQFINNEKLFYRTIENKQTNTLNNIPTSEQLQTFWSDIWGNVENHKESERYREDFVEDISDMFFDKIDINLFKAIITKTHNWKAPGSDKLHNYWYKKYTNIHPHLLTYINKFIQEPNTLPTYVTQGITYMLPKDNDDTKNPAKYRPITCLQNIYKIITACISELIYKHTDSNKILAEQQKGCRKNSQGCKEQLIIDAVASKQALSRKRNIYTMYIDYRKAFDSIPHSWLIYILKNYKIHPTLVNFLQNTMGRWSTVLKLKHIETETIAIRRGIFQGDSLSPLWFCLAMNPLSNLLNNSKKGYLIKCNDTSYRLSHLMYMDDIKLYGSNVKEINKLADITQQFSLDVKMEFGIDKCRIQSVNRGKIEFNTYQTVNGETIEPVDLENGYKYLGYAQSRQIHHKMIKETLTHKFRNRLHKILNTHLNARNTTKAINSFAIPILTYSFGIINWSQSDLKKLQRIINVTMTKFRKHHPRSCSQRLTLPKSEGGRGLIDIKNLHNNQITLLRNFFFTKAEYSSLHGVINQADTKYTPLNLSDNTFHKNQTIIDTKQKIDEWLQKSLHGRHRKDLISPNIDKHASNEWLRNGQLFPETEGFMLAIQDQVIETANYRKFIIRDKSITTDQCRHCHSVSETIQHITGACKSITQTDYKHRHDQVAAIVHQCLARKYKLISEYTPYYKYKPKAVIDTDNHKLYWDRTILTDKTVHHNRPDITFYDKRGKTVYLIEIAVPNTHNLVTTYTEKMKKYTDLSIEIKSQWKVLKVKTVPIILSSTGIIPYTLQDSLRTLNINHKIYILLQKAAIINTCRIVRKFLSIEE

SEQ ID NO: 22649 - protein, 1412 aa, Potamanaxas melicertes
MESKMRPRPQVPGGSSNFPDSDGSRAGSGSRGAYNLRVRKTRQTTQALLKDSDTKLDKDLHKIKSTTTKTLIISPIPTSNVTAGPIVDSQKYNLRSYRRNLKNVGEDRTRHINVDPHQHQPSAEPRSNVTSPISSTHSLFPSPISSPLSFENPSLPRSTTISPMSVDVVQEAAAIKPAPATGTKCARKKWSDDMNIFILRTYFEETKLETDFSTYLIPLHVKFIQQFPNMQVSRQRVGDQRRAIMRNKLLPTEKIDNIRQEVATYLQSHTLRLADTCQTGLNNTNKETVRMRWASEINECIVRNYFKITNLESNRSGYRQPLYQSVIAEYPNLAHLSEQRISDQCRAIIYNKMLSDEKLQEIRDDIAIELERTEDHSLHIEHEVLNTVNTTIIDETNDINSIQIQDNTHNTKDKNNILIRNTFTAALENFKHIKPIERPYIPKQTSSKNLAIITHYINNNLLPTYLNDDTDFETLHLLIYCAAYTASTCNGVKIHINKNNTTKTNIPKWQQRLSNRIEDLRSKIGKLTEYVRGNTSQKLRKHVEKIKLQYKTHAQFENENCDLEQFLDTLKQKLNLLSNRLRRYKKTTLRKTQNTQFIYNEKLFYRQLDSKNNNLLKNSNIPSPEQLYTYWSGIWGNTQEHQEGQWCNEIKEAAMNLPEMLFEKVSVELLKIVISRTHNWKAPGSDKLHNYWFKKFTNTQPHLLRHINNFIKNPDTLPAYITSGITYMLPKDDTNTSDPTKYRPITCLQSIYKIMTACISELIYKHAETNNILAEQQKGCRKNSQGCKEQLVIDAVTSKQANSKNRNIFTMFIDYQKAFDSIPHSWLLYVLRNYKINPTIVNFLESSMGKWTTVLKLENQISEQIQIRRGIFQGDSLSPLWFCLALNPLSTLLNNSKKGFKIKYNSNSYTLSHLMFMDDIKLYGTNLQEINTLADITQTFSTDIHMKFGIDKCKIQSILKGKLQLNKYQTMSGEIVEPVDSSTGYKYLGYKQTRQIHHKEIKDNLTIKFKNRLHKILNTHLNGRNTIKAINTFAIPILTYSFGIITWSQTDLKKLQRIVNTTMTKYRKHHPRSCSQRLTLSKSEGGRGLIDIKNLHNNQITLLRTFFYSKAEQSPLHKAVTQSDIRYTPLNLHNHLTQTNQNIIQTKDKFNEWLQKPLHGRHRRDLINPHIDKIASNEWLKRGELFPETEGFMIAIQDQVIETGNYRKFIIRDKHLISDQCRHCHSNSETIQHITGACKSITQTDYKHRHDQVASIIHQYLARKYKLISHYTPYYKYSPKSVFDTEQYKLYWDRTILTDKTIHHNRPDITLHDKKNKIVYLIDIAVPNTHNLVPTHTEKMVKYRDLSIELKSQWRVQKVMTVPIILSSTGVIPHSLHNSLRTLNINRSTFILLQKAVIINTCRIVRKFLSID

SEQ ID NO: 22650 - protein, 904 aa, Cycloglypha thrasibulus
MRLQKRIEDLRVMIGRLTEHMKGNKSKKLSAHIEKIKLRFKVHSKYEDENSSIEQFMDTLKQKLNLLSNRLRRYKQTTLRKSQNTQFINNEKTFYRKLHLPDYHTHTDTDSDIPTSQQFHTFWSNIWGNSKDHTVGGWIDADKQLTESMTDMHFESIDINILEKVISKTHNWKATGSDKIHNYWFKKFTHLHSHILHHINNFIKHPNFLPSYITKGITYMLCKDTNDTKNPAKYRPITCLQNIYKIITACITEVVQKHTDINNILAEEQKGCRRGSQGCKEQLTVDAVVSKQAFTKKRNIYTMYIDFKKAYDSVPHSWLIYVLEHYKIHPTIINFLEHAMKTWSTTLKIKTTETQEIRIRRGIFQGDSLSPLWFCLALNPLSTALKNSNLGYKIKFSNVLYTLSHLMYMDDIKLYGTNFEEINKLADITQQFSSNIHMEFGIEKCKIQSVRKGKLEKNIYYTHSGEAIDPVDFESGYKYLGYQQSRHIHHKEIKVTLRKKFKERLQKILNTGLNAKNTTKAINTFAISYLTYSFGTIKWSQTDLKQLQRIINTSMTTYRKHHPRSCTQRLTLPKLEGGRGLIDIQNLHNRQITTLRSFFHTREQQSLLHSAIVESDIKYTPLNLQDHSTQKNEIITESQQKLKKWLEKSLHGRHRRDLINPHPSHASNIWLKRGELFPETEGFMLAIQDQVIETRNYKKHIIGDKNLVSDQCRHCHSASETIQHITGACRSISQTDYQHRHNQVAAIIHQYLALKYKLISVKTPYYKYKPQTVIDSDKFKLYWDRTILTDKTIHSNRPDITLHDKSNKTVYLIDIAVPNTHNLTTTYTDKITKYTDLSIELKSQWKVKIVKTVPIIISTTGVVPRTLQNSLQTLDIHKLIYISLQKAVIINTCRLVRKFLSMDT

SEQ ID NO: 22651 - protein, 1345 aa, Eracon sarahburnsae
MKTTNKLKINLNTTNQTCRYNLRRLNGGRRNNLQASEECSTEPDNNSVHLNSSSPSSSTYNVFQSPISSPHSFEDQITSRSSTVTPVPVDVVWKANAEQTAPATSAKRARKKWSNEMNIFILRTYYEVTKMETDMSSYLIQLHSKFIDKFPEMQVSRQRVGDQRRTILRNNLVPIHIINQIKEDIKVQSNRAESIANTITQHHDTHIKPQTSRMKWSSEINEFIIRTYYKITDLETNISGYRQSLKQALVTKYPNLSHLSEQRISDQQRAIFKNKMISDDRIQQIKDEVNIDLHRTEQGKLHSQGPVQTSCDTVEEINSQEFLNYCQASEAQNFNQIHTNLNPSDIADIENLFNKTLHEFSNTDPTKRPYIPKQKQSKKLATITHFINTTLLPRYITDESDFKSIETAIYCAAYTVCTTNGAKIFSNSTCTAKIQRIPKWQERLQNRIEELRVMIGRLTEYMRGNKSKKVCIHIEKIKQRYKIHSKYEIENNSLTQFMDTLKQKLNLLSNRLRRYKQTTLRKTQNKQFTNNEKVFYRTLNTPPHCNYSTDIPTPTSEQLHAFWSNIWANAKDHNEGEWIKHNKQLVKNILEMQFDEINIDILKNVIAKTHNWKATGSDKIHNYWLKKFTNVHQHLLRHINTFIKNPDSLPLYINKGITYMLPKDNNDTKDPAKYRPITCLQNIYKIITACLSELIYRHIETNNILAEQQKGCRRGSQGCKEQLTIDAVVSKQALAGKRNIYTMYIDYRKAFDSVPHSWLIYILEHYKIHPKIIQFLKAAMVNWSTVLKLNNSETDLISIRRGIFQGDSLSPLWFCLALNPLSIALNNSNIGYKITQCNSSFTLTHLMYMDDIKLYGSSLKQIYKLADITQLFSADIQMEFGIDKCKIQSVRRGHLESKTYTTAAGDEIEPVDSDNGYKYLGYQQSRQTHHKHTKETLKNKFKQRLHKILNTYLNSKNTIKAVNTFAIPCLTYSFGIIKWSQTELKNLQRVVNTTMTKYRKHHPRSCSQRLTLPKYEGGRGLIDIQNLHNKQITSLRHFFHTQAQQSSLHKAIINSDIKYTPLNLHEISIQKNETITDTKQKLDEWLQKSLHGRHCRDLMNPHIDRHASNAWLKRGELFPETEGFMLAIQDQVIETRNYKKFIIRDNSLPTDLCRHCHSASETIQHITGACRSISQTDYKHRHDQVAAIVHQYLALKYKLISEKTAYYKYSPQAVIDSPKFKIYWDRTILTDKTVHNNRPDITFHDKINKIVYLIDIAVPNTHNLTNTYTDKTTKYTDLSIELKSQWKVKMVKTVPIVISATGVIPQTLENSLNTLNIHKLTYILLQKAIIINTCRIVRKFLSIDE

SEQ ID NO: 22652 - protein, 1345 aa, Eracon sarahburnsae
MESTNNLKNKPNCSVRTRTYNLRPLVGGRRNNLQVSKDCSATKTDKKNSIHFNSLSPSSSTINLFQTPISSPYSFEDLATSRSSTVTPVPVDVVRKANAEQAAPAIVIKRVRKKWSDEMNIFILRTYYEVTKMETDMSTYLIPLHNKFVEKFPDMQVSRQRVGDQRRSIVRNKLLSIEKLNQIKEDARAQLSRTEPYNDVLTQHQTTSIRAQTSRMRWSNEINEFILRSYYEITDLETNISGYRQSLKQVVVDKYPHLSHLSEQRISDQHRAIIKNKMISDSRMQQIKDEVVIKLSRIETEHTQHRSITTLQTFYDTVEANTSQECGLTLEPHNFNQIQLNLKPSETAHIENMFNRALNQFSNIDPTQRPYIPKQKPSKKLATITHFVNSKLLPKYLTDISEFSFVETVLYCAAFTVSTSNGAKICSNPEYKSRTQSSPKWQIRLQNRIQELRGMIGRLTEYMKGNKSKKVCMHVEKIKQRYTIHSKHEDENNSLIQFMDTLKQKLNLLSNRLRRYKQTTLRKTQNTQFTNNEKLFYRNFHSSHSNNSTDMHTPTAEQLYTYWSNIWTNSKNYTEGEWFKHDKDFIKNIVEMQFNDIDINTLKNVIAKTHNWKATGSDKIHNYWFKKFTNIHEHLLRHINNFIKNPNCLPLYITKGVTYMLAKNKNDTKNPANYRPITCLQNIYKIITACLTQLIYKHIETNSILTEQQKGCRRGSQGCKEQLTIDAVVSKQALVKKRNIYTMYIDYRKAFDSVPHSWLIYILEHYKVNPTLIHFLKTAMANWNTALRLNNTETDPISIRSGIFQGDSLSPLWFCLALNPLSTALNNSNTGYKIKYNNSLFTLTHLMYMDDIKLYGSNLGEIHKLADITQAFSVDIQMELGIEKCKIQSVHRGHIENNIYNTASGEEIDPVDCDAGYKYLGYQQSRQIHHKHIKETLRNSFKQRLHLILNTYLNSKNTIKAINTFAIPYLTYSFGIITWSQTDLKNLQRIVNTSLTKFRKHHPRSCKQRLTLPKYEGGRGIIDIQNLHNKQITTLRQFFHSKAQQSSLHNAIVTSDTKYTPLNLHDNCAQKNEIIADTKHKMDEWLQKSLHGRHRRDLINPHVDKYASNAWLKRGELFPETEGFMLAIQDQVIETRNYKKFIIRDSNLTTDQCRHCHSASETIQHITGACRSISQTDYKHRHDQVAAIIHQYLALKYKLIPEKTAYYKYSPQAVIDSPQYKLYWDRTILTDKTVHNNRPDITFHDKTNKIVYLIDIAVPNTHNLTSTYTDKNTKYTDLSIELKSQWKAKIVKTVPIVLSATGIIPRTLENSLNTLNIHHLTYILLQKAVIINTCRIVRKFLAIEG

SEQ ID NO: 22653 - protein, 1346 aa, Mimia chiapaensis
MKSTNNLKKNLYFTVKTRTYNLRPLIGGRWNNQEVNESCSTIPIDNNNRVRLNSSSPTSSNDRLFQTPRSSSESFEDQTTSRSSTVTPVPADVVRKANAEQTAPATVTKRARKKWSNEMNIFILRTYYEVTKMETDMSTYLIPLHGKFIEKFPEMQVSRQRVGDQRRSIVRNNLLPTHIINQIKEEVKVQSIRTAPYADTITQHQDTYNRPQTSRMRWSNEINEYIIRSYYKITDLESNISGYRQSLKQELITKYPNLSHLSEQRISDQHRAIIKNKMISDDRIQQIKDEVVIEIHRTEHGNLHTPGPLQTSCDTIEVSNSQERLNHSQPTKSQIIDDIQINLNPSDIAEIENLFNRTLREFWNTDPTKRPYIPKQKQSKKLATITHFVNTTLLPRYLTDESEFKLVETVLYCAAFTVCSTNGAKIFLNAEYTPRTQTIPKWQKRLQNRIQELRVMIGRLTEYMRGNKSKKVCTHIEKIKQRYKIHSKYENENNSLTQFMDTLKQKLNLLSNRLRRYKQTTLRKTQNKQFSNNEKVFYRTLHPSHSNYHTDIDTPTSDQLHAFWSNIWANSKNHNEGDWIKHDKQLVKNIVEMKCGDVNIDTLKNVIAKTHNWKATGSDNIHNYWFKKFTSIHQHLLRHINSFIKNPDSLPFYITKGVTYMIPKDKNDTKNPAKYRPITCLQNIYKIITACLTELIYRHIETNNILTEQQKGCRRGSQGCKEQLTIDAVVSKQALARKRNIYTMYIDYRKAFDSVPHSWLIYILEHYKIHPTLIYFLKTAMANWSTVLKLNNFETELISIRRGIFQGDSLSPLWFCLALNPLSIALNNSNTGYKIKQSNSSFNLTHLMYMDDIKLYGSSLRQIYKLADITQLFSADIQMEFGIDKCKIQSVRRGQLEKNTYNTVAGDEIEAVDCETGYKYLGYQQSRQIHHKHTKETLRNKFKQRLHMILNTYLNSKNTIKAINTFAIPCLTYSFGIIRWSQTDLKNLQRVVSTSLTKYRKHHPRSCIQRLTLPKYEGGRGLIDIQNLHNKQITTLRQFFYTQAQQSSLHNAIINSDTKYTPLNLHDSSTQKNETITETKQKMDEWLQKSLHGRHRRDLINPLIDKHASNTWLKRGELFPETEGFMLAIQDQVIETRNYKKFIIRDNNLVSDQCRHCHSASETIQHITSACRSISQTDYKHRHDQVAAIIHQYIALKYKLISEKTPYYKYSPQAVIDSPKFKLYWDRTILTDKTVHSNRPDITFHDKVNKVVYLIDIAVPNTHNLHSTYTEKTTKYTDLSIELKSQWKVKTVKTVPIVISATGIIPQTLENSLNTLNIHKLTYIILQKAVIINTCRIVRKFLSIDG

SEQ ID NO: 22654 - protein, 1359 aa, Nymphalis polychloros
MMSSLVQTNKAMNTNPTNKPPVPGSSKRDADDSKQLPRGARGKMNLRVGIFNYQMTNASLSDSDTTTESISSLLAADVVQEANADKPAPAKASKRARRKWNEAMNIFILRTYFILTSTETNTKSYLPELHSRFTEKFPDMQASRQHVGGQRRAIVRNKLLTTEQIQRIREEAEDYLRSNPNHIRNNVIASQRMRWNNDLNEFIMRSYYRITNVETNKTAYRRLLHQSFILEYPNLSHVSEQRVADQRRVIINNKLINPNRLQELKDEIAIELASLNNNNISHIERNTPSQSSQVLHFILDNTNTAITATPKPLLPVTLESLPIIAENTVIAATNHQDTENSDNLKHLCNLSMDLRNQIKETFLFLLNKFKNSDPTSRPSIPKQRTSKKFATIVQYINLSVLPAYISRESDFSEIQNAVYCSGVTAAVYNGCKFSDHQPTHKTRCIPKWQKRLEDKVTALRAKIGRLTEYINGNTSVNLKREVDKIKTAYKIHSRHENANTDLVHFLDTLKQKLSALSNRLRRYKETTLRKQQNALFNNNEKLFYRNLSTDINIKDNNEDSVKDMPEVQSLHQFWSNIWSHPKTHRETDWIKQDRESLVHLREMRFEEIHIDTLKEVINKTHNWKATGSDKIHNYWYKKFTYLHPFLLTHINAFINNPKTMPHYITLGSTYMISKDRTDRKNPAKYRPITCLQNIYKIITSCLSQLIYSHAISQNILTEQQKGCRKGSLGCKEQLTIDTVVSKQAVIKKRNIYTMYIDYKKAFDSVPHSWLIYILEHYKIHPLIIQFLKNTMLHWKTTLKLYNGNACLETETIEIRRGIFQGDALSPLWFCLALNPLSTLLNNSNMGYKLTNNNEHYTLSHLLYMDDIKIYGNNLSEVYSLANLTENFSMDIHMEFGIDKCSIQSIHKGKIEQNSYQLQSGEIIEPVDETSGYKYLGFNQTKQIHEKQTKKILLQLFKSRLHKIFNTHLNARNTIKAINTFAIPTLSYSFGIIHWSKTNLIKIQRLINTTLTKYRKHHPRSCIERLTLPKIEGGRGLIDIKNLHNSQITSIRAFFHHQATKTQLHYAIVHADIKLTPLNLVDHAKQKNETVISAQDKINTWLQKSLHGRHRRDLMNPIVDKIASNTWLKRGDLFPETEGFMMAIQDQIIHTRNYRKHIIKDHTLQSDLCRHCLNSSETIQHITGACSSITQTDYKHRHDQIAAIVHQYLAFKYNLISDKTPYYKYKPEIILESREFKLYWDRTVLTDKTVHFNRPDIMLHDKKNQTVYLIDIAVPNTHNLASCFTEKIAKYTDLSIEIKSQWKVKDVKTIPIIISSTGVIPYSLFTSLEALSIHKLTFILLQKAVILNTCRIVRKFLSNG

SEQ ID NO: 22655 - protein, 1352 aa, Vanessa atalanta
MNKIMNNNPLNKPLVPGSSMGDADDSRQLTRGARGKMNLRVGIFNYQTTNASLSDSDTTGSITSLLATDVVQEASAETPAPAKASKRARRKWNEAMNIFILRTYFILTSMETNTRSYLPELHSRFTEKFPDMQASRQHVGGQRRAIVRNNLLTTEQIQMIREEAGDYLKKNPGQIKNNVSGSQRMRWDNDLNEFIMRSYYRITKVETNKTAYRRPLHQCFILEYPNLSHVSEQRVADQRRIIINNKLINTDRLQELKDEIAIELASHSNNNTNLTERNTNLQISQVQHFPLDSTQTATTAAPDNLLTLTPVSLPIISENTLQPDTSHNTVQGTEHNNNLQHLPNLSSDIQNQIKETFLLLLNKYKNLDPTDRPSIPKQKTSKKFASIVQYINLSVLPAHISPESDFSEIQNAIYCGGVTASIYNGCKISDHQPIHKTRLIPKWQKRLDDKVAALRVKIGRLTEYINGNTSKKIKLEVDNIKKAYKIHSRHENANTELTHFLDTLKQKLTALSNRLRRYKETALRKQQNGLFNNNEKLFYRNLNANIQDSNNVTSTDMPEATKLHQFWSNIWSNPKTHHETDWIKRDREILVDLPEMKFDEINIDILEQVINKTHNWKATGSDKIHNYWYKKFTYLHPLLLCHINAFIKKPEMMPNYITLGSTYMISKDRTDLKNPAKYRPITCLQTIYKIITSCLSQLIYSHVISQNILTEQQKGCRKGSLGCKEQLTIDAVVSKQAITKKRNIYTMYIDYKKAFDSVPHSWLIYILEHYKIHPFIIDFLKNTMLHWRTTLKMFNGNHSLETETIEIRRGIFQGDALSPLWFCLALNPLSTLLNNSNLGYRLTCNNKSYTLSHLLYMDDIKLYGNSFSEINNLADLTENFSINIHMEFGIDKCSIQSINKGKIEQNSYCLRTGEIIEPVDEISGYKYLGFNQTKQIHEKQTKKILEKQFKTRLHKILKTHLNARNTIKAINTYVIPTLTYSFGIIHWSKSNLIKFQRLINTTLTKYRKHHPRSCIERLTLPPKEGGRGLIDIKNLHNSQITSIRAFFHHQATKTPLHYAIVHADIKLTPLNLKDHTKQKNEVVVSTEEKINTWLQKSLHGRHRRDLMDPVVDKIASNMWLKRGDLFPETEGFMMAIQDQIIHTRNYRKHIIKDHTLQSDLCRHCRNSSETIQHITGACSSITQTDYKHRHDQIAAIVHQYLAFKYKLVNDKTAYYKYKPDIILESRDFKLYWDRTVITDKTVHFNRPDIMLHDKKNETVYLIDIAVPNTHNIVSTFTEKIAKYTDLSIEIKSQWKVKIVKTIPIIISSTGVIPQSLFSSLQALGIHKLTFILLQKAVILNTCRIVRKFLSND

SEQ ID NO: 22656 - protein, 1352 aa, Vanessa atalanta
MNKIMNNNPLNKPLVPGSSMGDADDSRQLTRGARGKMNLRVGIFNYQTTNASLSDSDTTGSITSLLATDVVQEASAETPAPAKASKRARRKWNEAMNIFILRTYFILTSMETNTRSYLPELHSRFTEKFPDMQASRQHVGGQRRAIVRNNLLTTEQIQMIREEAGDYLKKNPGQIKNNVSGSQRMRWDNDLNEFIMRSYYRITKVETNKTAYRRPLHQCFILEYPNLSHVSEQRVADQRRIIINNKLISTDRLQELKDEIAIELASHSNNNTNLTERNTNLQISQVQHFPLDSTQTATTAAPDNLLTLTPVSLPIISENTLQPDTSYNTVQGTEHNNNLQHSPNLSSDIQNQIKETFLLLLNKYKNLDPTDRPSIPKQKTSKKFASVVQYINLSVLPAHISPESDFSEIQNAIYCGGVTASIYNGCKISDHQPIHKTRLIPKWQKRLEDKVAALRVKIGRLTEYINGNTSKKIKLEVDNIKKAYKIHSRHENANTELTHFLDTLKQKLTALSNRLRRYKETTLRKQQNGLFNNNEKLFYRNLNANIQDSNKVTSTDMPEATKLHQFWSNIWSNPKTHHETDWIKRDREILVDLPEMKFDEINIDILEQVINKTHNWKATGSDKIHNYWYKKFTYLHPLLLCHINAFIKKPEMMPNYITLGSTYMISKDRTDLKNPAKYRPITCLQTIYKIITSCLSQLIYSHVISQNILTEQQKGCRKGSLGCKEQLTIDAVASKQAITKKRNIYTMYIDYKKAFDSVPHSWLIYILEHYKIHPFIIEFLKNTMLHWRTTLKMFNGNHSLETETIEIRRGIFQGDALSPLWFCLALNPLSTLLNNSNLGYRLTCNNKSYTLSHLLYMDDIKLYGNSFSEINNLADLTENFSINIHMEFGIDKCSIQSINKGKIEQKSYCLRTGEIIEPVDEISGYKYLGFNQTKQIHEKQTKKILEKQFKSRLHKILKTHLNARNTIKAINTYVIPTLTYSFGIIHWSKSNLIKFQRLINTTLTKYRKHHPRSCIERLTLPPKEGGRGLIDIKNLHNSQITSIRAFFHHQATKTPLHYAIVHADIKLTPLNLKDHTKQKNEVVVSTEEKINTWLQKSLHGRHRRDLMDPVVDKIASNMWLKRGDLFPETEGFMMAIQDQIIHTRNYRKHIIKDHTLQSDLCRHCRNSSETIQHITGACSSITQTDYKHRHDQIAAIVHQYLAFKYKLVNDKTAYYKYKPDIILESRDFKLYWDRTVITDKTVHFNRPDIILHDKKNETVYLIDIAVPNTHNIVSTFTEKIAKYTDLSIEIKSQWKVKIVKTIPIIISSTGVIPQSLLSSLQALGIHKLTFILLQKAVILNTCRIVRKFLSND

SEQ ID NO: 22657 - protein, 933 aa, Vanessa atalanta
MLIIIIIKISDHQPIHKTRLIPKWQKRLEDKVAALRVKIGRLTEYINGNTSKKIKLEVDNIKKAYKIHSRHENANTELTHFLDTLKQKLTALSNRLRRYKETTLRKQQNGLFNNNEKLFYRNLNANIQNSNNVTSTDMPEATKLHQFWSNIWSNPKTHHETDWIKRDREILVDLPEMKFDEINIDILEQVINKTHNWKATGSDKIHNYWYKKFTYLHPLLLCHINAFIKKPEMMPNYITLGSTYMISKDRTDLKNPAKYRPITCLQTIYKIITSCLSQLIYSHVISQNILTEQQKGCRKGSLGCKEQLTIDAVVSKQAITKKRNIYTMYIDYKKAFDSVPHSWLIYILEHYKIHPFIIDFLKNTMLHWRTTLKMFNGNHSLETETIEIRRGIFQGDALSPLWFCLALNPLSTLLNNSNLGYRLTCNNKSYTLSHLLYMDDIKLYGNSFSEINNLADLTENFSINIHMEFGIDKCSIQSINKGKIEQNSYCLRTGEIIEPVDEISGYKYLGFNQTKQIHEKQTKKILEKQFKSRLHKILKTHLNARNTIKAINTYVIPTLTYSFGIIHWSKSNLIKFQRLINTTLTKYRKHHPRSCIERLTLPPKEGGRGLIDIKNLHNSQITSIRAFFHHQATKTPLHYAIVHADIKLTPLNLKDHTKQKNEVVVSTEEKINTWLQKSLHGRHRRDLMDPVVDKIASNMWLKRGDLFPETEGFMMAIQDQIIHTRNYRKHIIKDHTLQSDLCRHCRNSSETIQHITGACSSITQTDYKHRHDQIAAIVHQYLAFKYKLVNDKTAYYKYKPDIILESRDFKLYWDRTVITDKTVHFNRPDIMLHDKKNETVYLIDIAVPNTHNIVSTFTEKIAKYTDLSIEIKSQWKVKIVKTIPIIISSTGVIPQSLFSSLQALGIHKLTFILLQKAVILNTCRIVRKFLSND

SEQ ID NO: 22658 - protein, 1348 aa, Vanessa cardui
MNNNPLNKPLVPGSPMGDADDSRLLTRGARGKMNLRVGILNYQTTDASLSDSDTTESISSLLATDVVQKASAETSAPAKASKRARRKWTEAMNIFILRTYFILTSMETNTRSYLPELHSRFTEKFPDMQASRQHVGGQRRAIVRNNLLTTEQIQMIREEAGDYLKKHSGPIRNNVSGSQRMRWDNDLNEFIMRSYYRITKVETNKTAYRRLLHQCFILEYPNLSHVSEQRVADQRRIIINNKLINTDRLQELKDEIAIELASHINNNTNLSERNTPLQISQLQNFALDNTQIATAATPNNLLTLNPISLPIISENTLLHVASHNTVQDTEHSNNLQHLPSLTSDMQNQIKDTFLLLLNKYKNIDPTTRPSIPKQKTSKKFASIVQYINLFVLPAHISPESDFSEIQNAIYCGGVTASICNGCKISDHQPIHRTRPTPKWQKRLEDKVAALRIKIGRLTEYINGNTSRKIKLEVDKIKEAYKIHSRHENANTELTHFLDTLKQKLTALCNRLRRYKETTLRKQQNGLFNNNEKLFYRNLNSNIQESNVVTVTDMPEAKKLHQFWSNIWSNPKTHHETDWIKRDRELLVDLPEMKFDEINIDILKQVINKTHNWKATGSDKIHNYWYKKFTYLHPFLLCHINAFIKKPEIMPHYVTLGSTYMISKDRTDLKNPAKYRPITCLQSIYKIITSCLSQLIYSHVISQNILAEQQKGCRKGSLGCKEQLTIDAVVSKQAITKKRNIYTMYIDYKKAFDSVPHSWLIYILEHYKIHPHIIEFLKNTMLHWRTILKMFNGNHSLETEIIEIRRGIFQGDALSPLWFCLALNPLSILLNNSNMGYRLTYNSEAYTLSHLLYMDDIKLYGNSLSEINNLADLTENFSTDIHMEFGIDKCSIQSINKGKIEQNSYRLQTGEIIEPVDEVSGYKYLGFNQTKQIHEKQIKKILEKQFKSRLHKVLKTHLNARNTIKAINTFVIPTLTYSFGIIHWSKSNLIKFQRLINTTLTKYRKHHPRSCIERLTLPTQEGGRGLIDIKNLHNSQVTSIRAFFHHQATKIPLHCAVVHADVKLTPLNLKDHTKQKNEAVFSAQEKINIWLQKSLHGRHRRDLMNPIVDKIASNTWLKRGDLFPETEGFMMAIQDQIIHTRNYRKHIIKDHTLQSDLCRHCHNSSETIQHITGACSTLTQTDYKHRHDQIAAIVHQYLAFKYKLVNDKTAYYKYKPDIILESREFKLYWDRTVITDKTVHFNRPDIMLHDKKKETIYLIDIAVPNTHNIASTFTEKIAKYTDLSIEIKSQWKVKNVKTIPIIISSTGVIPYSLFSSLQALGIHKLTFILLQKAVILNTCRIVRKFLSSD

SEQ ID NO: 22659 - protein, 1348 aa, Vanessa cardui
MNNNPLNKPLVPGSSMGDADDSRLLTRGARGKMNLRVGILNYQTTDASLSDSDTTESISSLLATDVVQKASAETSAPAKASKRARRKWTEAMNIFILRTYFILTSMETNTRTYLPELHSRFTEKFPDMQASRQHVGGQRRAIVRNNLLTTEQIQMIREEAGDYLKKHPGPIRNNVSGSQRMRWDNDLNEFIMRSYYRITKVETNKTAYRRLLHQCFILEYPNLSHISEQRVADQRRIIINNKLINTDRLQELKDEIAIELASHINNNTNLSERNTPVQISQLQNFALDNTQTATTATPNNLLTLTPISLPILSENTLLHVASHNTVQHTEHSNNLQYLSNLTSDMQNQIKDTFLLLLNKYKNLDPTARPSIPKQKTSKKFASIVQYINLSVLPAHISQESDFNEIQNAIYCGGVTASICNGCKISDHQPIHRTRPTPKWQKRLEDKVAALRIKIGRLTEYINGNTSRKIKLEVDKIKEAYKIHSRHENANTELIHFLDTLKQKLTALCNRLRRYKETTLRKQQNGLFNNNEKLFYRNLNSNIQDSNIVTVTDMPEEKKLHQFWSNIWSNPKTHHETDWIKRDRELLVDLPEMKFDEINIDILKQVINKTHNWKATGSDKIHNYWYKKFTYLHPFLLCHINAFIKKPETMPHYVTLGSTYMISKDRTDLKNPAKYRPITCLQSIYKIITSCLSQLIYSHVISQNILAEQQKGCRKGSLGCKEQLTIDAVVSKQAITKKRNIYTMYIDYKKAFDSVPHSWLIYILEHYKIHPHIIEFLKNTMLHWRTTLKMFNGNHSLETEIIEIRRGIFQGDALSPLWFCLALNPLSTLLNNSNMGYRLTFNSEAYTLSHLLYMDDIKLYGNSLSEINNLADLTENFSIDIHMEFGIDKCSIQSINKGKIEQNSYRLQTGEIIEPVDEVSGYKYLGFNQTKQIHEKQIKKILEKQFKSRLHKILKTHLNARNTIKAINTFVIPTLTYSFGIIHWSKSNLIKFQRLINTTLTKYRKHHPRSCIERLTLPTQEGGRGLIDIKNLHNSQVTSIRAFFHHQATKIPLHFAVVHADVKLTPLNLKDHTKQKNEAVFSAQEKINIWLQKSLHGRHRRDLMNPIVDKIASNTWLKRGDLFPETEGFMMAIQDQIIHTRNYRKHIIKDHTLQSDLCRHCHNSSETIQHITGACSTLTQTDYKHRHDQIAAIVHQYLAFKYKLVNDKTAYYKYKPDIILESREFKLYWDRTVITDKTVHFNRPDIMLHDKKRETVYLIDIAVPNTHNIASTFTEKIAKYTDLSIEIKSQWKVKNVKTIPIIISSTGVIPHSLFSSLQALGIHKLTFILLQKAVILNTCRIVRKFLSSD

SEQ ID NO: 22660 - protein, 929 aa, Atrophaneura dixoni
MDPENNSSYRKKRTPIWQMRLEDRISNLRVKIGRLTDYINGNTSTKLKREIEKITAAYKIHSMHEQENKKLAHFLDTLKQKLSSLANRLRRYKETTLRKQQNAAFYNNEKTFYRNLTNAHDITDNNKLVEIPETEQLHQFWSNIWSNPKTHRESDWIKQDRELLVDLPEMVFDEIYMNLFKSVINKTHNWKATGSDKIHNYWYKKFTFLHPLLLSHINTFIKTPESLPSYITLGTTYMIPKDRSDSKNPAKYRPITCLQNIYKIITSCLSQLIYKHAISHNILAEQQKGCRKASLGCKEQLIIDAIVSKQAVTKKRNIFTMFIDYKKAFDSVPHSWLIYILEHYKIHHKIREFLKNTMLHWRTTLKLYNGDSCLETDTITIRRGIFQGDALSPLWFCLALNPLSNLLNRNDKGYKITNGNTHHTLSHLLYMDDIKLYGSSLKDLLTLADITESFSTDIQMEFGINKCRIQSIRRGKVEQNSYTLQTGETIEPVDENAGYKYLGFTQTRQIHQKHVKKTLEKEFKLRLNRILNTHLNARNTIKAVNTFAIPILTYSFGIIHWSKSNQIYLQRLINKTMTKYRKNHPRSCSERLTLPKVEGGRGVIDIKNLHNSQISAMRNFFYQQANNSPLHNVVVQADTKLTPLNLKDQRKQKNESIVSAQDKINSWLQKTLHGRHRRDLMNTNVDKVASNMWLRRGELFPETEGFMLAIQDQTIHTLNYRKHIIKDHTLQSDLCRHCHNSSETIQHITGACSSITQTDYKHRHDQVAAIIHQYLAYKYKLIDEKIAYYKYKPEIILDSREFKLYWDRTILTDKTVHYNRPDITLHDKRNESVYLIDIAIPNTHNLTSTYNEKIAKYTDLSIEIKSQWKVKTVKTIPIVISATGVIPHSLFSSLKELDIHKLIFISLQKATILNTCRIVRKFLSKNYNT

SEQ ID NO: 22661 - protein, 1342 aa, Vanessa atalanta
MNKIMNNNPLNKPLVPGSSMGDADDSRQLTRGARGKMNLRVGIFNYQTTNASLSDSDTTGSITSLLATPAPAKASKRARRKWNEAMNIFILRTYFILTSMETNTRSYLPELHSRFTEKFPDMQASRQHVGGQRRAIVRNNLLTTEQIQMIREEAGDYLKKNPGQIKNNVSGSQRMRWDNDLNEFIMRSYYRITKVETNKTAYRRPLHQCFILEYPNLSHVSEQRVADQRRIIINNKLISTDRLQELKDEIAIELASHSNNNTNLTERNTNLQISQVQHFPLDSTQTATTAAPDNLLTLTPVSLPIISENTLQPDTSYNTVQGTEHNNNLQHLPNLSSDIQNQIKETFLLLLNKYKNLDPTDRPSIPKQKTSKKFASIVQYINLSVLPAHISPESDFSEIQNGIYCGGVTASIYNGCKISDHQPIHKTRLIPKWQKRLEDKVAALRVKIGRLTEYINGNTSKKIKLEVENIKKAYKIHSHHENANTELTHFLDTLKQKLTALSNRLRRYKETTLRKQQNGLFNNNEKLFYRNLNANIQDSNNVTSTDMPEATKLHQFWSNIWSNPKTHHETDWIKRDREILVDLPEMKFDEINIDILEQVINKTHNWKATGSDKIHNYWYKKFTYLHPLLLCHINAFIKKPEMMPNYITLGSTYMISKDRTDLKNPAKYRPITCLQTIYKIITSCLSQLIYSHVISQNILTEQQKGCRKGSLGCKEQLTIDAVVSKQAITKKRNIYTMYIDYKKAFDSVPHSWLIYILEHYKIHPFIIEFLKNTMLHWRTTLKMFNGNHSLETETIEIRRGIFQGDALSPLWFCLALNPLSTLLNNSNLGYRLTCNNKSYTLSHLLYMDDIKLYGNSFSEINNLADLTENFSINIHMEFGIDKCSIQSINKGKIEQNSYCLRTGEIIEPVDEISGYKYLGFNQTKQIHEKQTKKILEKQFKSRLHKILKTHLNARNTIKAINTYVIPTLTYSFGIIHWSKSNLIKFQRLINTTLTKYRKHHPRSCIERLTLPSKEGGRGLIDIKNLHNSQITSIRAFFHHQATKTPLHYAIVHADIKLTPLNLKDHPKQKNEVVVSAEEKINTWLQKSLHGRHRRDLMDPVVDKIASNMWLKRGDLFPETEGFMMAIQDQIIHTRNYRKHIIKDHTLQSDLCRHCRNSSETIQHITGACSSITQTDYKHRHDQIAAIVHQYLAFKYKLVNDKTAYYKYKPDIILESRDFKLYWDRTVITDKTVHFNRPDIMLHDKKNETVYLIDIAVPNTHNIVSTFTEKIAKYTDLSIEIKSQWKVKIVKTIPIIISSTGVIPQSLFSSLQALGIHKLTFILLQKAVILNTCRIVRKFLSND

SEQ ID NO: 22662 - protein, 1410 aa, Udranomia orcinus
MAEGNSVSNDPPLIPGNNRVLFQPYLSKRGTAGADHLIPLLYVGIKMESSINSYKFINTNIIDSAVKTRRYNLRSLPGGRRGIYETAAEDSSGQITSSHHNQNQTRTETAASHSNPSSPISSTYSLFQSPSSSPHSFENPSPYRSRTTSLMSVDVVQEANADNPAPAIVTKCTRKKWSDEMNIFILRTYYKITKMETDVRSYLIPLHETFIEQFPNMNVSRQRIGDQRRAIERNKLLPINIVNQIKSEVAAQLDDITNTSSTTHKPRTDQLLNTKNNNSRMRWSNEINEFIVRTYYTITNLETNKSGYRQSLLQALITEYPHLSYLSEQRVSDQCRAIINNKMISDIKLQEIKDEVVVRLNKRENSNSYTQIHESHSTHTENIDRNSLHNTENNIVHDPKQDLPNSINYDLMTTIRNTFDKAMFDFKTTEPTERPYIPKQRPSKKLAIITNYINNNLLPTILREDSDFNEFQLILYCAAYTASISNGTKIKSNKQSNVSRAKNIPNWQKRLQDRVEEIRVKIGKITEYIRGNTSKKLSKDVEKIKEQYKIHAQFENENVSLAQFLDTLKQKLNLLANRLRRYKDTTLRKTQNTQFINNEKLFYRTLENKQYNSLSDTNIPTSNELHTFWNKLWGNPVDHKEGKWCREIDKFVKDIPEMQFDNVSIDLLKTIIARTHNWKAPGSDMIHNYWYKKFTYIHKQLLRHINNFIQSPNTMPLYITKGITYLLPKGADTKDPSKYRPITCLQNIYKIITSCISELIYKHTHSSNILAEEQKGCRRRSQGCKEQLVIDAIVSKQALNKKRNIYTMFIDYKKAFDSVPHSWLIYVLDHYKIHPTLIQFLRSSMLKWVTVLKLKSIETEEIMIRRGIFQGDSLSPLWFCLALNPLSHLLNNSEKGFKINYDSASHTLTHLMYMDDIKLYGSSLCEINKLADITQHFSSDIQMEFGIDKCKIQSVRRGKLEFNTYMTNSREIVEPVDKDNGYKYLGYEQTKQIHHKHIKQTLTTKFRERLHKILKTYLNASNTTKAINTFAIPILTYSFGVISWSQSDLKNLQRIINTSMTKYRKHHPRSCIQRLTLPKSEGGRGLIDIQNLHNTQITSLRSFFHSKSLQSSLHKAVTQSDTKYTPLNLSNYTTQKCETIHDQSQKLDEWLQKSLHGRHRRDLINPHVDKLASNGWLKRGELFPETEGFMLAIQDQVIETRNYRKFIMHDNNLVTDQCRHCHSCSETIQHITGACRAITQTDYKHRHDQVAAIIHQYLALKHKLVTKYVSYYKYKPQSVIDTKDYKLYWDRTILTDKTIHHNRPDITLHDKKNKTVYLIDIAVPNTHNLISTHTEKLTKYTDLSIEIKTQWKVEVVKTIPIIISSTGIIPNTLHDSIRTLNIHRSAYMLLQKAAILNTCRLVRKFLSIKE

SEQ ID NO: 22663 - protein, 1363 aa, Udranomia kikkawai
MKSSINFNKPNNTDDSAVKIRRYNLRSLPGGRRGIHEAAAGNSGAQQITSLHQDQNQTRTEIAASNSSPSSPISSTHSLFQSPISSPHSFERSSTFRSRTTSPMSVDVVQEANADNPAPATVTKCARKKWSDEMNIFILRTYYKITKMESDLRSYLIPLHETFIEQFPNMNVSRQRIGDQRRAIERNNLLPMNIINQIKSEVAAQLDNLTNTSNPTHKTQTDLILNTKNSNSRMRWSNEINEFIVRAYYTITDLETNKSAYRQALLQALTTEYPHLSHLSEQRVSDQCRAIINNKMISDKKLQEIKDEVVMGLNRREIGNSHTQIQEPHSICTEYIDRNSLQNTENNSSQEPRQYLQNSISYDLMATVRNTFNKAMNDFKTTEPSERPYITKQRPSQKLVTIINYINNNILPTQLPEDSDFNKFQLTLYCAAYAASVSNGTRIKSNRLNNTPRTKNIPFWQKRLQDRIEDIRVKIGKLTEYIRGNTSKRLSKDVEKIKQQYKIHAQFENENINLTQFLDTLKQKLNLLANRLRRYKDTTLRKTQNTQFSNNEKLFYRTLENKQCNNLIDTNIPTSNEVHTFWTNLWGNPVDHKEGKWYDKINKSVMDTPQMEFDNISIDLLKTIITRTHNWKAPGSDKIHNYWYKKFTYIHNQLLKHINNFIQSPNTMPSYITKGITYLLPKGTDTKNPSKYRPITCLQNIYKIITSCISELIYKHTELHNILTEEQKGCRRRSQGCKEQLVIDSIVSKQALHKKRNIYTMFIDYKKAFDSVPHSWLIYVLDHYKIHPTLIQFLKSSMSKWVTVLKLKNIETEEIMIRRGIFQGDSLSPLWFCLALNPLSYLLNNSEKGFKINYTSTSHTLSHLMYMDDIKLYGSSLDEINKLADITQHFSSDIQMEFGIDKCKIQSIKRGKLELNTYVTNNSEVIEPVDKDNGYKYLGYEQTRQIHHKQIKQTLTTNFRERLHKILKTYLNASNTTKAINTFAVPILTYSFGIIRWSQSDLKNLQRIINTSMTKYRKHHPRSCIQRLTLPKSEGGRGLIDIQNLHNTQITSLRSFFRSKALQSSLHNAVTQADTKYTPLNLRNDTTQKNETIRNQEQKLDEWLQKSLHGRHRRDLINPHVDKLASNGWLKRGELFPETEGFMLAIQDQVIETRNYRKFIMHDNNLVTDQCRHCHSSSETIQHITGACRAITQTDYKHRHDQVASIIHQYLALKHKLVTKYTSYYKYKPQSVIDTKDYKLYWDRTILTDKTIHHNRPDITLHDKKNKTVYLIDIAVPNTHNLISTHTEKLTKYTDLSIEIKTQWKVEIVKTIPIIISSTGIIPNTLHDSIRTLNIHRSAYMLLQKAAILNTCRLVRKFLSIKE

SEQ ID NO: 22664 - protein, 1325 aa, Ephestia elutella
MSRENPSPLSSLAESVISNPTVTVVQEATDAANPVPTTAGRSVRLKWSDDMNIFILRTYFILTNLESEKGSYLPQLHEQFIKKFPDMNVSRQRVGDQRRAIINNKYLNQDQIAEIRAEVQAELALDNGTTSIAQSQNSQQRMRWSNKINESIIRGYYIVTELEANISAYRLLLHQYVITENPEIAHVSEQRIADQRRVILNSKRITETRIQQIRDEVALQLNSHNSHSYTTQFNDLEQNLRLDPTSDTISTPLITQQEYISDPIYTPITNEQPPNDSIQIDNNITLDVQLDEHTSLQLAKIENYFVTTLEKFKDIDPTLKPYIPKQKASKKFTRIVHLINSHVLPKYLKEDNDFPTLHNIIYCAAYTAAVNNGAKIFDSTTNHTNNKREPVWEKRLKGKIDDLRTKSALLIEYMNGNRSPNIVKQVDFIKLHYKTHSRHEQDNTDLSHFLDTLKQKLNALASRLRRYKLTTLRKSQNKQFNSNEKAFYRKLNNNNTSNLSSQAPNVQGPYPTATDPNTQPASRNSNLPTINQNSSAPTSDELQQYWSNIWSNPVEHKTEQWIEDDRERLSHIEEMNFETISLDLLQMIIGKTHNWKATGSDKIHNYWYKRFHSVHPFLLTHINNFIQSPDTMPHFISQGITYMLPKNPTDTRNPANYRPITCLQNIYKIITSCLSHLIYTHTQNNNILAEQQKGCRKFSQGCKEQLTIDAIVSKLAIRKKKTIHTMYIDYKKAFDSVPHSWLLYILHHYKINPTIIQFLQNTMKNWITKLQLNQTETEFIQIRRGIFQGDSLSPLWFCLALNPLSHLLNNSNNGYKIPHENSHFTLSHLLYMDDIKLYGSNLEEIHNLAGITETFSNDIQMSFGIDKCGIQSIEKGKVLNNSYQLTTGERIEPIDDTIGYKYLGFYQTRQIQEKSAKSDLINKFKTRLHRILNTHLNSKNTTKAINTFAIPTLTYSFGVIHWSQTDLKKHQRTINTLMTKYRKHHPKSCIQRLTLPRNEGGRGIIDIPNLHNKQITSLRSFFHAQQSPLHKAIVQSDAKYTPLNLSDHSRQPNESITTPQQKIETWQQKSLHGRHHLDLINPNVDKTASNAWLKRGELFPETEGFMLAIQDQIMNTKNYQKHIIRDVNLQSDLCRHCHSASETIQHITGACRSISQTDYKHRHDQIAAIIHQYLALKYKLISEKTAYYKYNPQTVLDNTQFKMYWDRTIITDKTIHYNRPDITLHDKNNSTVYLIDIAVPNTHNLTSTHTEKLSKYTDLSIEIKTQWRVENVRTIPIVISSTGVVPKTLHNSLKTLNIHHLTYLLLQKATILNTCRIVRKFLSLE

SEQ ID NO: 22665 - protein, 912 aa, Ephestia elutella
MNGNRSPNIVKQVDFIKLHYKTHSRHEQDNTDLSHFLDTLKQKLNALASRLRRYKLTTLRKSQNKQFNSNEKAFYRKLNNNNTSNLSSQAPNVQGPSPTATDPNTQPASRNSNLPTINQNSSAPTSDELQQYWSNIWSNPVEHKTEQWIEDDRERLSHIEEMNFETISLDLLQMIIGKTHNWKATGSDKIHNYWYKRLHSVHPFLLTHINNFIQSPDTMPHFISQGITYMLPKNPTDTRNPANYRPITCLQNIYKIITSCLSHLIYTHTQNNNILAEQQKGCRKFSQGCKEQLTIDAIVSKLAIRKKKTIHTMYIDYKKAFDSVPHSWLLYILHHYKINPTIIQFLQNTMKNWITKLQLNQTETEFIQIRRGIFQGDSLSPLWFCLALNPLSHLLNNSNNGYKIPHENSHFTLSHLLYMDDIKLYGSNLEEIHNLAGITETFSNDIQMSFGIDKCGIQSIEKGKVLNNSYQLTTGERIEPIDDTIGYKYLGFYQTRQIQEKSAKSDLINKFKTRLHRILNTHLNSKNTTKAINTFAIPTLTYSFGVIHWSQTDLKKHQRTINTLMTKYRKHHPKSCIQRLTLPRNEGGRGIIDIPNLHNKQITSLRSFFHAQQSPLHKAIVQSDAKYTPLNLSDHSRQPNESITTPQQKIETWQQKSLHGRHRLDLINPNVDKTASNAWLKRGELFPETEGFMLAIQDQIMNTKNYQKHIIRDVNLQSDLCRHCHSASETIQHITGACRSISQTDYKHRHDQIAAIIHQYLALKYKLISEKTAYYKYNPQTVLDNTQFKMYWDRTIITDKTIHYNRPDITLHDKNNSTVYLIDIAVPNTHNLTSTHTEKLSKYTDLSIEIKTQWRVESVRTIPIVISSTGVVPKTLHNSLKTLNIHHLTYLLLQKATILNTCRIVRKFLSLE

SEQ ID NO: 22666 - protein, 1368 aa, Spialia mafa
MKKSLGKSKKVNKTQSLDYTVETRRYNLRPLSGGHRRPEAVVESKEQLIDSECIQQLTTETIISNSTPSSPISSTHSLFESPSSSPHSFENPSRSTTISPMSVNVVQEADADNPVPATANRCVRKKWSEEMNIFILRTYYEVTQMETDLSTYLTPLHTKFIEKFPYMDVSRQRVGDQRRAIIRNKLLSTNKINDIRHEVQLKLQNNNNTPTLTQTLTLPQAPTLTLTPTQTLTPTFIHQQQISPTLNTNGVAPRMRWKPEINEFIVRTYYKITRLETNKSAYRQPLHQAVIAKYPNLSNLSEQRISDQCRAIIYNKMICEEKLQQIKDEIILELNAEETYITDTINLPEENIIRSQNDSTQHNTIQNIEATDETAITNTFTSALHEFKSIKPTEREFIPKQKSSRNLAIITHFINTKLLPLFITEDSDFETTQLILYCAAYTASVHNGTKIKTNSDKTVSAQKVPKWQLRLQRRVQDLRAKIGKLTEFIRGNTSRKLKRHIEDIKQQYKLHAQFENNNNDLPDFLDTLKQKLNVITSRLRRYNKTTLRKRQNTQFINNEKLFYRNLDTQHNINSTDDSTPTPEQLHTFWSNIWGNAQQHNESEWCNTAFVKDISDMQFEKLSLDLLKSVITRTHNWKSPGSDKLHNYWYKRFTYLHPNLLKHINNFIESPDSLPDYITEGVTYMLPKDNTDTINPSKYRPITCLQNIYKIITSCISELIYKHTESNNILAEEQKGCRKNSQGCKEQLIIDTVASKQALSKKRNIYTMYIDYRKAFDSIPHTWLIHVLQAYKIHPKIINFLKNSMLKWSTVLKLKQLETEKIMIRRGIFQGDSLSPLWFCLALNPLSVLLNSSQAGFKIKHNNMFHTLSHLIYMDDIKLYGSNLSEINKLASITEQFSDDIKMEFGIDKCKIQSIKRGKLEFNSYETNNGGTIEPVDPDEGYKYLGYAQTRQIHYKQIKQNLINKFKNRLHKILHTYLNSKNTIKAINTYAIPILTYSFGVVHWSQTDLQKLQRIINTTMTKHRKHHPRSCTQRLTLPRHEGGRGLIDIKNLHNTQITLLKTFFREKAIHSTLHHTVVNADVKYTPLNLHNSSMQKNQNITHPQRKIDEWLQKSLHGRHRRDLINPCIDKEASNEWLKKGELFPETEGFMVAIQDQVIETANYRKFIIKDTNLKTDQCRHCQSCSETIQHITGACKSITQTDYKHRHDQVASIIHQYIALKHKLIADYTPYYKYNPKAVIDTNEYKLYWDRTILTDKTIYHNRPDITLHDKKNQTVYLIDIAVPNTHNLINTHTEKMRKYADLSIEIKSQWNVRKVQTVPIILSSTGVIPHTLHDGLRVLNINRFAYILLQKAVIMNTCRLVRKFLSLD

SEQ ID NO: 22667 - protein, 1244 aa, Noctuana haematospila
MSVDVVQETFVDNPVPATVNRCVRKKWSEEMNIFILRTYYEETKLETDHSTYLIPLHTKFIENFPHMDVSRQRVGDQRRAIIRNKLLPTNKINDIRHEVAAQLQNNNSTITNIHQINPILNKDSATPRMRWKPEINEFIVRTYYRITKLEMNKSAYRQPLHQAVIEKYPNLSHLSEQRISDQCRVVINNKMISEEKLQQIKDEIVIELNTIEADTFNTTNLPEENITRPQYYSTNYNNTHNNEAMDVTAIRDTFSKALHDFEAIEPTDRDFIPKQKSSKNLSIITNIINNKILPIFLTEDSDYETVQLKIYCAAYTASIHNGVKIHTNSDKQPLGDRKTPKWQKRIERRIQDLRAKIGKLTEYIRGNTSRKLIKQIEDIKRQFKIHAQYENDNCDLSEFLDTLKQKLNVVTNRLRRYKKTTLRKRQNIQFINNEKLFYRSLETQQSSLPTDNNTPTSEQLHTFWSNIWGNAREHKDSGWCKKAFVKDVPDMQFEKVSLDLLKTVISRTHNWKAPGSDKLHNYWYKRFTCVHSLLLKHINNFIENPNSFPDYITKGITYMLPKDNNDTINPAKYRPITCLQNIYKIITACISELIYKHTESNNILGEEQKGCRKNSQGCKEQLIIDMVASKQALNKKRSIYTMYIDYKKAFDSIPHTWLIHVLQVYKVHPKIINFLENSMLKWSTVLKLQHLETEKIMIRRGIFQGDSLSPLWFCLALNPLSYLLNNSKIGFKIKHNKEVHTLSHLIYMDDIKLYGSNLNEINKLADITQQFSDDIQMEFGIDKCRIQSINRGKLEFNTYQTNNGEIIKPVEPDEGYKYLGYVQSRQIHQKEIKKSIVNKFRGRLHKILNTYLNSTNITKAINTFAIPILTYSFGIINWSQTDLKKLQRIINTTMTRHRKHHPRSCIQRLTLPRHEGGRGLIDIKNLHNTQITLLRTFFQNKAVHSTLHHTVVEADVKHTPLNLHSSMAQKNENIIRPQQKIEEWLQKALHGRHRRDLLNPHIDKVASNEWLKKGQLFPETEGFMIAIQDQVIETANYRKFIIRDKNLITDQCRHCHSNSETIQHITGACKSIAQTDYKHRHDQVASIIHQYIALKHKLITDYTPYYKYIPKAVIDSNEYKLYWDRTILTDKTIHHNRPDITLHDKKSQTVYLIDIAVPNTHNLITTHTEKMTKYADLSIEIKSQWKVRKVQTVPIILSSTGIIPYTLHDGLRILDLNRLSYLLLQKAVIMNTCRLTRKFLSLQE

SEQ ID NO: 22668 - protein, 1117 aa, Spialia sertorius
MRWKPEINEFIVRTYYKITKLETNKSAYRQPLYQAVIAMYPNLSHLSEQRISDQCRAVIYNKMISEEKLQQIKDEITLELNAEETYITDTINTPNLPEENITRSQNDSTQHNYLQNMEETEEIAITNTFTNALHDFKLIEPTERYFIPKQKSSRNLAIITNFINTKLLPLFLTEDSDFETIQLTLYCAAYTASVHNGTKINTNPDKTVSVLKVPKWQLRLQRRVQDLRAKIGKLTEFIRGNNSRKLKRQIEDIKQQYKLHAQFENNNCDLSEFLDTLKQKLNVVTNRLRRYNKTTLRKRQNTQFINNEKLFYRNLDTQHNSNSTDNNIPTPEQLHTFWSNIWGNAQEHKESEWCNTAFVKDISDMQFEKLSLDLLKTVINRTHNWKSPGSDKLHNYWYKRFTYLHPHLLKHINNFIESPDSLPDYITKGITYMLPKDNTDTINPSKYRPITCLQNIYKIITSCINELIYKHTESNNILAEEQKGCRKNSQGCKEQLIIDTVASKQALTKKRNIYTMYIDYRKAFDSIPHTWLIYVLQAYKIHPKIIHFLKHSMLKWSTVLRLKQLETEKIMIRRGIFQGDSLSPLWFCLALNPLSVLLNSSQTGFKIKHNNTFHTLSHLMYMDDIKLYGSNLSEINKLASITEQFSEDIKMEFGIDKCKIQSIKRGKVEFNSYQTNNGEIIEPVEPDEGYKYLGYAQTRQIHYKEIKQTLINKFKNRLHKILHTYLNSKNTIKAVNTYAIPILTYSFGVVHWSQTDLQKLQRVINTTMTKHRKHHPRSCTQRLTLPRHEGGRGLIDIQNLHNTQITLLKTFFKDKALHSTLHHTVVNADVKYTPLNLHNSSTQKNQNITHPQQKIEEWLQKSLHGRHRRDLINPYIDKVASNEWLKKGELFPETEGFMVAIQDQVIETANYRKFIIRDTNLKTDQCRHCHSCSETIQHITGACKSITQTDYKHRHDQVASIIHQYIALKHKLIADYTPYYKYNPKAVIDTKEYKLYWDRTILTDKTIYHNRPDITLHDKKNQTVYLIDIAVPNTHNITNTYTEKMRKYADLSIEIKSQWNVRKVQTVPIILSSTGVIPHTLHDGLRALNIDRFAYILLQKAVIMNTCRLVRKFLSLE

SEQ ID NO: 22669 - protein, 1214 aa, Timochares trifasciata
MAVDVVQEAIANKPVPTTDTISVRKKWSNEMNTFILRTYYEETKMEKDCSTYLIPLHKKFVEQFPDMQVSRQRLGDQRRAILRNKLLSTEQIDLIRHQVEEGLKNCNETISINCSTTESGTTNKGRMRWSNETNEFIVRNYYKLTKLENDRSAYRQPLHQTVIAQYPHLAHLSEQRISDQCRAVINNKMISEERLQKLKDEVLKELCNRENQNTHTETQSLDLDINDIDTNINSTNTAQNKITNHPTQYEYITNENQTKIRNTFVKAFTDFKHIEPTNRPYIPKQKTSKNLAVITNFINKTLIPSFYTEHSDFENMQLILYCAAYTASVHNGVRIQTNVDKTPKIEKSNPKWQERLQRRIEELRAKIGKLTEYTRGNTSQRLKKHVEQIKKQHLIHAQFENENSDPAQFLDTLKQKLNVLVNRLRRYKKTTLRKRQNAQFINNEKLFYRTLEHKENNTESNIPTSNQLHTFWTGIWGNAHDHIKSERYEEEFAKDIPDMFFENINLDLLKTIIARTHNWKAPGSDKLHNYWYKRFTNLHPHLLTHINKFIQNPGTLPAYVTKGITYMIPKDNTDTCNPEKYRPITCLQNIYKIITSCISELIYKHTSSNSILSEQQKGCRKNSQGCKEQLTIDAIASKQALSKKRNIYTMYIDYKKAFDSIPHSWLIQVLKNYKIHPTLVNFLKNTMVKWSTVLKLKQIVTEEIAIRRGIFQGDSLSPLWFCLALNPLSNLLNNSRYGFIIKHNRSSYRLSHLMYMDDIKLYGSNLIEINNLADLTQQFSSDIKMEFGIDKCRIQSVNRGKIEANIYKTISSDIIQPVDLENGYKYLGYAQSRQIHQKKIKQILTTKFQDRLHKILNTHLNSKNTRKAINTFAIPILTYSFGIISWSQSDLKKLQRLVNITMTKYRKHHPRSCTQRLTLPTSEGGRGIIDIQNLHNKQITLLKTFFLTKAQQSFLHKAVVQADLKYTPLNLNNDTTQKNQIITEPQQKLDEWLQKSLHGRHRKDLLNPNIDKSASNEWLKKGDLFPETEGFMLAIQDQVIETANYRKFIIREKNVSDKCRNCHSNSETIQHITGACKTITQTDYKHRHDQVAAIIHQYIARKHKLTTEYCPYYKYKPKAVLDTPKFKLYWDRTILTDKTVHYNRPDITFYDKNNKIVYLIDIAVPNTHNLGTTHTEKLKKYTDLSIEIKTQWKVHKVKMVPIIFHGRYPIHTTR

SEQ ID NO: 22670 - protein, 1374 aa, Ebrietas anacreon
MRGSVEVDFLIPSLLVGIKMEKSDINIDNRVKNKVLDSAAKNRRYNLRPLSSRRRRYNVVPIDMSSSGQLTQESELCTSHPPSPISSNHSLFQSPISSPHSFENLSMSRSTTATPTSVDVVQEANANKPVPTTAAINVRKKWSDEMNIFILRTYYEETKMETDCSTYLVSLHAKFIDRFPNMQVSRQRLGDQRRAIIRNKLLSTQKIDLIRREVKEEMKNRDETSNINCFIGQHTPTQTLKTGNTNITRMRWSNEVNEFIVRTYYKITQLEKDRSAYRQPLFQTVTAKYPDLAHLSEQRISDQCRAVLNNKMIPEKRLQKIKDEVLEELHNREALDVQIDIQVSDRADAENTNTNSANTTQCSIIKHPTHYEYITNENQTKIRETFTRALIEFECVEPTDRPFIPKQKSNKKLLGITNFINKHLLPSYLTEHDDFENMQLSLYCAAYAASIHNGVVIQTNSDKTKKIQNSIPKWQERLQRRIEELRVKIGKLTEYIRGNNSQRLKKHVEQIKKHYLVHAQFENENSELAQFLDTLKQKLNVLVNRLRRYKKTTLRKRQNTQFINNEKLFYRTLEYKGNNTLSNIPTPNQLHKFWSGIWGNAEDHIESERYVEEFVKDIPDMLFDKISIDLLKTVISRTHNWKAPGSDKLHNYWYKRFTYVHTHLLTHINKFIQNPATLPAYVTKGITYMLPKDNTDTRNPEKYRPITCLQNIYKLITACISELIYKHTESNNILAEQQKGCRRNSQGCKEQLTIDAVASKQALCKKRNIYTMYIDYKKAFDSIPHSWLIQVLKNYKIHPTLVQFLQNTMFKWSTVLKLKQVVTEEIAIRRGIFQGDSLSPLWFCLALNPLSNLLNNSRHGFIIKHNKTSYKLSHLMFMDDIKLYGKNSSEINNLADLTQQFSSDIKMEFGIEKCRIQSVNRGKLEANIYKTITSDIIQPVDFENGYKYLGYAQSRQIHHKKIKQILTTKFRGRLHKILNTHLNAKNTTKAINTFAVPILTYSFGIINWSQSDLKKLQRVINITMTKYRKHHPRSCTQRLTLPTSEGGRGIIDIQNLHNRQITLLKTFFFTKSQQSSLHKAIVEADLKYTPLNLNNNSTQKNQFIIEPQLKLNEWLQKSLHGRHRKDLINPNIDKSASNEWLKKGELFPETEGFMLAIQDQVIETANYRKFIIRDKNLVTDQCRNCHSNSETIQHITGACKTITQTDYKHRHDQVAAIIHQYIARKHKLTTEHCPYYKYKPKAVIDTVEFKLYWDRTILTDKTIHYNRPDITFYDKKNKIVYLIDIAVPNTHNLVATHSEKLKKYTDLSIEIKSQWKVQKVKTVPIVISSTGVIPYTLHDSLRTLNINSSTYILLQKAVIINTCRIVRKFLAIDE

SEQ ID NO: 22671 - protein, 1419 aa, Ebrietas anacreon
MLKSLTNGPKPNLRCKESCREMHGWRESSLERSTSVTGQPRRVFLPYLNMRGSVEVDLLIPSLLVGIKMEKYNNNIGTRKTNNVRDCIVEKRQYNLRPLSSGRRRYYEAAADISSSRQLTPGNDLPTSRPLSPISSNHSLFQSPISSPHSFEILSMSRSTTASPMSVDVVQEASADKPVPTTATINVRKKWSDEMNTFILRTYYEETKMETDCSTYLLPLHTKFVDQYPNMKVSRQRLGDQRRAIMRNKLLPAHKIDQIRQEVEERLKNCNETLNINSLTNQHISVHTLDTRKTHTTRMRWSNEINESIVRSYYKITKLENDRSAYRQPLHQAVIAQYPDLAHLSEQRISDQCRAVINNKMIPEERLQKLRDEVVEELHNREALETHIETQTSDRTDTDNIIMSSTNTAQKTHLFHSDNITSENQIKIRDTFAKALNDFQYTEPTDRPYIPKQKSSKNLAIITHFINKNLLPSCLVEDNDFEKMQLTLYCAAYTASIHNGVRIQTKSDKTLKVRNSIPKWQERLERRVEDLRAKIGKLTEYIRGNTSQKLQNHIEQIKKQYLVHAQFENQNSDLAQFLDTLKQKLNVLVNRLRRYKKTTLRKRQNTQFINNEKLFYRTLEHKENNTNSNSLTSNQLHTFWSGIWGNAQEHIESENYHEELKDIPEMIFDNISIDLLKTIIAKTNNWKAPGSDKLHNYWYKRFTTIHPHLLTHINNFIKDPTTLPAYVAKGITYMLPKDNADRGNPEKYRPITCLQNIYKIITACITELIYKHTESNSILAEQQKGCRKKSQGCKEQLTIDAVVSKQALNKKRNIYTMYIDYKKAFDSIPHSWLIQVLKNYKIHPALIHFLEKTMVKWSTVLKLEQTVTAEIKIRRGIFQGDSLSPLWFCLALNPLSNLLNSSRNGFIIKHHKTSYRLSHLMYMDDIKLYGTNLKEINALADITQRFSSDIKMEFGIDKCRIQSVNRGKLETNIYKTIINEVIEPVDSENGYRYLGYAQSRQIHHKKIKQITINKFRDRLHKILSTHLNSKNTTKAINTFAVPILTYSFGVINWSQSDLMKLQRIINITMTKHRKHHPRSCIQRLTLPTSEGGRGIIDIKNLHNRQITLLKTFFYTKSQQSSLHNAIVQADIKYTPLNLNNSSTQKNQIITEQKLKLDEWLQKSLHGRHRKDLINPNIDKSASNEWLKKGNLFPETEGFMLAIQDQVIETGNYRKFIIRDKNLTSDQCRNCHSNSETIQHITGACKSITQTDYKHRHDQVAAIIHQYIARKYKLITEYFPYYKYKPKAVIDTVEFKLYWDRTILTDKTVHSNRPDITFYNKKEKMVYLIDIAVPNTHNLVATHTEKLRKYTDLAIEIKSQWKVDKVKTVPIIISSTGVIPHTLHESLRTLNMNSSAYILLQKAVIINTCRIVRKFLAIEE

SEQ ID NO: 22672 - protein, 901 aa, Hasora badra
MEDLRVKIGRLTEYMRGNTSPKLELHIEDIKKQYKIHTQHESENTNLSQFMDTLKQKLNLISNRLSRYKKTTERKNQNTQFVNNEKLFYRTLGLPQTKTQTHLDSQSHIPTAEELHKYWSNIWTIPIQHTEGEWIKIDKDTVKDIPEMQFKEIDIDLLRRVIGRTHSWKATGTDKLHNYWFKKFTSVHPHLLRHINDFIQSPETLPAHITKGITYMLSKDTTDTKNPEKYRPITCLQNIYKIITSCISELIYQHTENNHILAEQQKGCRKRSQGCKEQLTIDAVATKQALVRKRNIYTMYIDYKKAFDSVPHSWLLYILQHYKIHPTLIDFLKNSMSNWATTLKLNHLQTEEIVIRRGIFQGDSLSPLWFCLALNPLSNILNNSNKGYKITHDNRSYTLSHLMYMDDIKLYGSKLNDIHKLADITQSFSSDIQMEFGIDKCRIQSVQRGQLKYNTYQTNSGQIVEPVDCDDGYKYLGYQQSRQLHHKQIKEELINKFKDRLHKMLNSHLNARNTTKAINTFAISILTYSFGIINWSQTDLIKLQRIINTSMTKHRKHHPRTCTQRLTLPKIEGGRGLIDIQNMHNKQITTLRSFFHTRAQQSLLHNAVTQADNKHTPLNLHDRSIQTNQRITQPQQKLNDWLQKSLHGRHRRDLINPNVDKQASNEWLKRGELFPETEGFMLAIQDQVIETRNYKRFIVQDKTLVSDQCRHCHSSSETIQHITGACRSITQTDYKHRHDQVAAVIHQYLAIKYKLITAKTPYYKYTPQAVIDTEDFKLYWDRTILTDKTIYHNRPDITFHDKKNRSVFLIDIAVPNTHNLMNTHTDKMTKYTDLSIELKSQWKVRTVKTVPIIISSTGVIPRTLHESLSTLNIHRLAYILLQKAIIINTCRIVRKFLSIEE

SEQ ID NO: 22673 - protein, 1156 aa, Camptopleura auxo
MKNCNEISNINGSRSQHNSTQTLRTGNTNIGRIRWSNEVNEYIVRNYYKITKLENDRSAYRQPLFQAVIAQYPDLAHLSEQRISDQCRAIINNKMLSQERLQQLKDEVLEELHDRESQEIHRITQALNKTDTNTNMNFTNIAQHNTTKHSTHFEYITNENQTKIRDTFAKALTDFKYIEPTERPYIPKQKTNKKLAIITHFINNNLIPSFYTQHNDFENMQLTLYCAAYTASIHNGARIQTNSNNTPKIQNSIPKWQERLQRRIEELRVNIGRLTEYTRGNTSPRLKKHVEQIKKHYLVHAQFENKNNDTAQFMDTLKQKLNVLVNRLRRYKKTTLRKRQNNQFINNEKLFYRTLEHKENNTESNIPTSNQLHTFWSGIWGHAHDHIKNEKYEEEFVKDIPDMRFDKINIDLLKTIIARTHNWKAPGSDKLHNYWYKRFTNLHPHLLTHINKFIQNPTTLPAYVTKGITYMLPKDNNDTCNPEKYRPITCLQNIYKLMTACISELIYKHAESNSILTEQQKGCRRNSQGCKEQLTIDAVASKQALSKKRNIYTMYIDYKKAFDSIPHSWLIQVLKNYKIHPTLVHFLQNTMVKWSTVLKLKQIVTEEIAIRRGIFQGDSLSPLWFCLALNPLSNLLNNSRHGFLIKHNKTSYKLNHLMYMDDIKLYGRNLSEINNLADLTQQFSTDIKMEFGIDKCRIQSVNRGKLEANIYKTISRDTIQPVDLGNGYKYLGYAQSRQIHHKKIKQILTTNFRDRLHKILNTHLNSKNTTKAINTFAVPILTYSFGIINWSQSDLKKLQRVINITMTKYRKHHPRSCTQRLTLPTSEGGRGIIDIQNLHNRQITLLKTFFFTKAQQSPLHKAIVEADHKYTPLNLNNNTTQKNQIIIEPQQKLDEWLQKSLHGRHRKDLVNPNIDKSASNEWLKKGELFPETEGFMLAIQDQIIETANYRKFIIRDKNLVTDQCRNCHSNSETIQHITGACKTITQTDYKHRHDQVAAIIHQYIARKHKLSTEHCPYYKYKPKAVIDTLEFKLYWDRTILTDKTIHYNRPDITFYDKKNKIVYLIDIAVPNTHNLVATHSEKLKKYIDLSIEIKSQWKVQKVKTVPVIISSTGVIPYTLHDSLRTLNINSSTYILLQKAVIINTCRIVRKFLSIDE

SEQ ID NO: 22674 - protein, 1402 aa, Cycloglypha thrasibulus
MHGWGAPSLERSASVTGQPRRVFLPYLNMRGSVEMDFLIPSLLVGIKMDKSNIDIGTRVKTKVVDSVAEKRRYNLRPLSSRRQKHNEFAIDMSSSGLLTQENDSPTSRQSSPISSPHSLFQSPISSPHSFENPSMSRSTTVSPMSVDVVQEANADKPVPTTGTINVRKKWSDEMNTFILRTYYEETKMETDCSTYLVPLHTKFVDRFPNMQVSRQRLGDQRRAIIRNKLLSTQKIDLIRHEVEEQIKNCNQTSNINYITSQHNPTQPLRTNNTNIARMRWSSEVNEYIVRNYYKITMLEKDRSAYRQPLFQAVTAQYPDLAHLSEQRISDQCRAVINNKMISDERLQKLKDDVLEELHSRETLQIHIETQFLDRTDADNTNINSTNTAQYNQTKNPTHFEYTTNENQAKIRETFTKALADFKYVEPTERPYIPKQKSNKKLSVITNFINKNLLPSCLAEHNDFENVQLSLYCAAYTASVHNGAKIQIISDKTTEIQNSIPKWQERLQRRIEELRVKIGKLTEYTRGNNSQRLRKHVEQIKKHYLIHAQFENENSDLAQFLDTLKQKLNVLVNRLRRYKKTTLRKRQNAQFMNNEKLFYRTLEHKENNAVSNIPTPHQLHTFWSGIWGNAHDHVQSDRYEEEFVKDIPDMFFEEISIDLLKTIIARTHNWKAPGSDKLHNYWFKRFTYLHPLLLTHINNFIQNPSTLPAYVTKGITYMLPKDNTDTCNPEKYRPITCLQNIYKLMTACISELIYKHTESNSILAEQQKGCRRNSQGCKEQLTIDAVVSKQALTRKRNIYTMYIDYKKAFDSIPHSWLIQVLKNYKIHPTLVIFLQNTMFKWSTVLKLKQVVTEEISIRRGIFQGDSLSPLWFCLALNPLSNLLNNSRHGFIIKHNKTSYKLSHLMYMDDIKLYGRNLLEINKLADITQKFSSDIKMEFGIDKCRIQSVNRGKLEANIYRTSSRDTIQPVDLENGYKYLGYAQSRQIHHKKIKQILTTTFRGRLHKILNTHLNSKNTTKAINTFAVPILTYSFGIINWSQSDLKKMQRIINITMTKYRKHHPRSCIQRLTLPTSEGGRGIIDIQNLHNRQITLLKTFFFTKAQQSSLHKAIVEADLKYTPLNLNNNTTQKNQNIIEPQQKLDEWLQKSLHGRHRKDLVNPHIDKSASNEWLKKGELFPETEGFMLAIQDQVIETANYRKFIIRDKNLVTDQCRNCHSNSETIQHITGACKTITQTDYKHRHDQVAAIIHQYIARKHKLITEYCPYYKYKPKAVIDTLEFKLYWDRTILTDKTIHYNRPDITFYDKKNKTVYLIDIAVPNTHNLVTTHSEKLKKYVDLSIEIKSQWKVQKVKTVPIIISSTGVIPYTLHDSLRTLNINSSTYILLQKAVIINTCRIVRKFLAIDE

SEQ ID NO: 22675 - protein, 1365 aa, Cycloglypha thrasibulus
MTYKDTHETYSGKHTKNKNETLDCTENKRVYNLRPLSGGRRRNVEYTEKKFSRNQFVGPNTQEQPTPVTITLSNPSSPISSTHSLFETPSSSPHSFENPTISRSSTTSPMSVDVVREAFADYSAPATGIKSVRKKWSEDMNIFILRTYYRESKMGSDHSKYLIPLHKKFIERFPNMEVSRQRIGDQRRAILRNKLLTIDKINQIKQEIAEEFRKNSEGRSNTAQKQKNLNLTTEHNNTRMRWSCEINEYILKTYYRITNLESNRSAYRQPLFQAFITKYPHLAHLTEQRISDQCRAIINNKMLPLEKFQQIKDEIILELNAVKNDTGIFGETQHSQTLITYNSDTRTTNDTENHVTLRPMHNIHGVDDATVQNTFITALHDFRFIKPTDRPYIPKQKSSKNLAIISHYINSSILPLHLTENSDFETVQLILYCAAYTATTCNGIKIHSGDDGKLKISTRTVPKWQQRLQNRIENLRVKIGRLTEYIKGNTSHKLTKQIEEIKNHYKVHAQFESDNTSLPQFLDTLKQKLKLLANRLRRYKQTTLRKSQNAQYTNNEKLFYRNLEHTTLIDNNMPTSDRLHEFWSKIWGESKDHVEGEWSTLEKEFVKNIPEMEYENINLDLLKHVINKTHNWTAPGSDKLHNYWFKKFTTTHPHLLDHINNFIQKPTTLPSYVTKGITYMQPKDATDTQNPAKYRPITCLQNMYKIITACISELIYRHADSNNILTEQQKGCRRNSQGCKEQLVIDSVASKQALSRKRNIYTMYIDYKKAFDSVPHSWLIYILHNYKIHPTLVEFLKQCMTKWSTVLKLKHLETTDILIRRGIFQGDSLSPLWFCLALNPLSNILNNSKRGFSIKHNHTCHTLSHLMYMDDIKLYGTSFNDIKILADLTQQFSTDIQMEFGIDKCRIQSIRRGKLELNTYQTTSRDIIEPVDCDKGYKYLGYAQTTQLHHKTIKQTLTTRFQDRLRKILNTHLNSKNTIKSINTFAIPILTYSFGVIKWSQNDLKKLQRLINTTMTKHRKHHPRSCFQRLTLPKAEGGRGIIDIRNLHNTQITSLRKFFHSKAQHSTLHNATVQADLKYTPLNLHNNASQKNEEITKVEQKLDEWSQKSLHGRHRKDLLNPHVDKIASNEWLRKGELFPETEGFMLAIQDQVVETRNYRKFIIRDKNLATDQCRHCHSNSETIQHITGACKSITQSDYKHRHDQVASIIHQYIAYKYKLITHYTPYYKYKPQTVIDTVDYKLYWDRTILTDKTVYNNRPDITFYDKGKKTVYLIDIAVPNTHNLVTTHTEKITKYTDLSIEIKSQWRVQNVKTVPIILSSTGVIPQTLHNSLHTLNIHGLIYILLQKAVIINTCRIVRKFLAMEE

SEQ ID NO: 22676 - protein, 1055 aa, Parapoynx stratiotata
MANNMASEYLQNSYTETVSLSNTPNILTTTHNFYTSPPEALLPTDEESSSRIANIEETFSNAISKFKDRDPTLRPFIPRQKTSKNLAEIVNILNLSILPKYLQENADFYTLHNIIYCAAYTAAIHNKSKINDTNTPFDKNNITPLWQIRLQRRIDDLRTKIGRLTEFINGNRSESVKNHVDLIKKHYKIHTKHEEENTKLTHFLDTLKQKLSALASRLRRYKQTTLRKTQNKEFYFNEKTFYRKPNNNNTHTQPNTPTLLTSELPKVEQLHAFWSNLWSKPVDHQSNQWIEKDKQNLSSLPEMSYEDVTIDLLQSVIGKTHNWKATGSDKIHNYWYKKFYTLHPYLLIHVNKFIKSPETMPQFISTGITYMLPKTKNNLQNPANYRPITCLQNIYKLITSCLSRLIYSHTETNNILAEQQKGCRKHSQGCKEQLTIDSIVSRQAYRQKSNIYTMYIDYKKAFDSVPHSWLIYILQHYKIHPTIIQFLQHTMTQWSTIIKMNRMETEKISIRRGIFQGDSLSPLWFCLALNPLSTILNNSSIGYKLKYDNTCITLSHLMYMDDIKLFASSLSEIRDLAHITETFSAAIKMSFGIDKCKIQSVERGKVVSNPYHMETGENIDPVDDDFGYKYLGYHQTQRIHEKSSKAAITDKFKTRLHKILNSYLNSKNTTKAINTFAIPVLTYSFGVIHWSQSDLKKHQRTINTHMSKYRKHHPRSCTQRLPLPRHEGGRGLIDIQNLHNKQISTLRSFFHTRAQTSTLHQAVVQADIKHTPLNLKDRSLQRNEFITQPHQKLEAWLQKSLHGRHRHDLLNPIVDKKASNAWLRRGELFPETEGFMIAIQDQTIDTKNYRKHIIRDPTFHSDLCRHCHSAPETIQHITGACRSITQSDYKHRHDQVAAIVHHYLAYKYKLIKEKTAYYKYTPQTILENSKFKMYWDRTIITDKTIHHNRPDITLHDKSNKIVYLIDIAVPNTHNLASTHTEKLSKYTDLAIELKTQWHVDTVKTIPIILSSTGVIPITLHSSLNTLKIHPLTFLLLQKAAILNTCRIVRKFLSID

SEQ ID NO: 22677 - protein, 1360 aa, Choaspes benjaminii
MVRQWADYGMEKLKTKTKSHYNLRSLSSAHRSIRCNQNIKNKESNTQNTTTDKHINETITISNRSSLSSSHHSLFESPSISLASLGNPSLSLSSTSTSRSVDVVQEASAVISASATDVKRTRMKWSDNMNIFILQAYYEVTNMETDLRTYLTQLHTKFIERFPQIQVSKQRLGDQRRAIIRNNLLPTQTINKIREDVEAKLQTSSQSQNICNTPQNQIVYSGPNKSRMRWSNEINEFIVRNYFKITKLETNKTAYRQPLMQAVILKYPHLSHLSEQRIADQCRAIINNRMLTEQRIQQIKDEVIIELNITESSSLHSLKDSSYPLLETAQLNVVPKPTSDSVATNLTQELNIIPKNSTNIEDTFLKALQDYKPIDPTQRPFIPKQKSSKKLAIITHFINTTLIPKYLPPNCEYDLTQSVLYAAAFTAATCNGAKINISHINKPRIRNTPKWQKRLENRIHDLRSKISRLTEYINGNPSQKLKLHIEHIKKHYRFHAQHENENSGLSQFLDTLKQKLNLLSNRLRRYKLTTLRINQNMQFKNNQKHFYRTICPSNINTQTKSPTPTPTELHSFWSAIWANPKEHAEGKWVKKDEEYMKHIPKMQFEEISIDLLKSVIGRIQNWKATGTDKIHNYWYKKLTNLHPHLLTHINTFIRSPDTLPPYITKGVTYMLAKDKSDTKNPAKYRPITCLQNIYKITTACISELIYQHTEKNKILSEQQKGCRKKSQGCKEQLIIDAVATKQALTKKRNIYTMYIDYKKAFDSVPHSWLLYILKHYKIHPALIEFLRNAMRNWTTTLKLEQLETEEIMIKRGIFQGDSLSPLWFCLALNPLSSSLNNSNSGFKIKYNSSSYTLTHLMYMDDIKLYGSSLSEIQKLADITEIFSSDIQMDFGIDKCRMQSIQRGLLKHNTYKTRSGEIVEPVDCENGYRYLGYEQSRQLHHTKIKNTLTNKFKQRLHSILKTNLNAKNTIKAINTFAISALTYSFGIINWSQTDLIKLQRIINTHLTKYRKHHPRSCTQRLTLSNEEGGRGFIHIQNLHNRQITILRSFFHNLAEQSSLHKAVTQADIKYTPLNLYHYDTQKNETTIETQQKLDKWLQKSLHGRHRRDLINPHVDKNASNEWLKRGELFPETEGFMVAIQDQVIETRNYRKFIIQDRTMVTDQCRHCHSCSETIQHITGACRSITQTDYKHRHDQVAAIIHQYLAFKYKLINEQKPYYKYKPQSVIDTKHYKLYWDRTILTDKTVHHNRPDITLHDKTNKSVYLIDIAVPNTHNLVSTYTDKMTKYIDLSIELKSQWKVNTVKTVPIIISSTGVIPKTLHDSLSILNIHRLKYILLQKAVIINTCRIVRKFLSTQEFNCTK

SEQ ID NO: 22678 - protein, 1211 aa, Helias cama
MNIFILRTYFEETKLETDFSSYLMPLHRKFIQQFPNMLVSRQRLGDQRRAIMRNKLLSSEKINLIRQQVAGYLQNQPRPNEINKEKTSRMRWSSEVNEFIIQSYYRITNLETNKSGYRPLLFQLVTAEYPHLGHLSEQRISDQCRAIIYNKMIPDDKLQKIRDEIAIELDRTNNHSPHVETITLNTEDPSILNETNDIRITHVDNGTQNKTTDKNDTMIRNTFAEALEKFKYIEPTERPYIPKQISSKNLAMITNFINNEVLPSYLKEETDFESLHLLIYCAAYTASICNGVRIHTQTNNTASRTNIPKWQQRLLNRIQDLRSKIGKLTEYVRGNTSHKLHRSIEKIKLQYKTHAQFENDNCDMEQFLDTLKQKLNLLSNRLRRYKKTTLRKTQNTQFIYNEKRFYRSLEYNKPPKNNNYPPPDQLYTFWSSIWANAQEHQDGEWCKEIKEAAINLPEMQFDTVNAELLKVIISRTHNWKAPGSDKLHNYWLKKLTKTQPHLLKHINNFIRNPDTLPAYVTKGITYMLPKDDTDITDPNKYRPITCLQSIYKIITACISELIYKHTYTNNILAEEQKGCRKNSQGCKEQLVIDGVACKQAYSKKRNIFTMYIDYQKAFDSVPHSWLIYVLNNYKINPIIINFLETCMGKWTTVLQLEHEISKEIPIRRGIFQGDSLSPPLFCIALNPLSTLLNNSKKGFKIKHNSTYHTLTHLMFMDDIKLYGTNLQEIKILADITQRFSTDIHMKFGIDKCKIQSILRGKLQSNEYQTMTGDIVKPVDCDTGYKYLGYKQTHQIHHKEVKETLTTKFRNRLHKILNTHLNSRNTIKAINTFAIPILTYSFGIITWSQTDLNNLQRIVNTTMTKYRKHHPRSCIQRLTLPKSEGGRGIIDIKNLHNTQISLLRTFFYSKAEQSSLHKAVTHSDNRYTPLNLQNHSPQKNQNIIQTRDKIDVWIQKPLHGRHRRDLINPHVDKLSSNEWLKRGDLFPETEGFMLAIQDQVIETGNYRKFIIRDKNLVSDLCRHCHSNSETIQHITGACKSITQTDYKHRHDQVASVIHQYLARKYKLINEYTPYYKYIPKSVIDTGQYKLYWDRTILTDKTIHYNRPDITLLDKTKKIVYLIDIAIPNTHNLVSTYTDKIIKYRDLSIELKSQWKVETVTTVPIILSSTGVIPHSLHNSLKTLNINRSIYTLLQKAVIINTCRIVRKFLSID

SEQ ID NO: 22679 - protein, 1442 aa, Anastrus sempiternus
MEKVFVRKYNLRPLPGGRRGALGAGAECYSMRTIGDGGPSRRAPLEQHTTADIENSSSPSSPVSLFSSLPSSPPSYLDNILNLSPTSITSTTTSYSTTDDVVQVSRDANSTAPAEYNLRSMSRSHRRNPGTVGCRMQQMNVDTQKHQQVEKPRSGATSPISSTHTLFSSPISSPISRENPYLSRSTTINPMSVDVVQEAVAIEPAPATGIKFARKKWSDDMNIFILRTYFEETKLETDFSTYLIPLHVKFIEKFPNMQVSRQRVGDQRRAIMRNKLLPAEKIDLIRQEVATLIQNHTKILGGSYQPFSDEINKQTTTSRMRWASDINEFILRSYYRITHLETNRSGYRQLLFQSVIAEYPNLAHLSEQRISDQCRAIIYNKMLPEEKMQEIRDEIMLELSRAETHTSHTEKEILNTRNTTILNETSDINNIQIQNNILNTTDKNDTIIKNTFSAALENFKNVTATERPYIPKQTSSKNLAMIANFINNNLLPTYLKEDTDFETLHLLIYCGAYTASTCNGVKIHINRDKTANIKSIPKWQQRLNKRIEDLRSKIGKLTEYLRGNTSYKLRKSIEQIKVQYKTHAQFENENYDLEQFLDTLKQKLNLLSNRIRRYKKTTLRKTQNTQFANNEKRFYRSLDSRNNNTIKNSNTPSSEQLYTYWSSIWGNTQEHQEGQWCTEIKEAAINLPEMQFETISAELLKIIISRTHNWKAPGSDKLHNYWLKKFTNIQPQLLRHINNFIINPDTLPAYITSGITYMLPKDINNTSDPSKYRPITCLQSIYKIITACISELIYKHAETYNILTEQQKGCRRNSQGCKEQLVIDAVASRQAYSKKRNIFTMYIDYQKAFDSIPHSWLLYVLRNYKINPLIVSFLESSMDKWTTVLKLDDQVSEQIQIRRGIFQGDSLSPLWFCLALNPLSTLLNKSKSGFRIKHNSISYTLSHLMFMDDIKLYGTNLQEINTLADITQTFSTDIHMKFGIDKCKIQSILRGKLQFNKYQTISGEIVEPVDCDMGYKYLGYKQTRQIHHKEIKDNLIIKFRHRLHKILNTHLNSRNTIKAINTFAIGILTYSFGIITWSQTDLKKLQRIVNTTMTKYRKHHPRSCTQRLTLPKSEGGRGIIDIMNLHNNQITLLRTFFNSKAEHSPLHKAVTQSDIRYSPLNLHNDTKQKNENITQTQEKFNEWLQKPLHGRHRRDLINPHIDKLASNEWLKRGELFPETEGFMIAIQDQVIETGNYRKFIIRDKNLLSDQCRHCHSNSETIQHITGACKSITQTDYKHRHDQVASIIHQYLARKYKLINHYTPYYKYTPKSVIDTDQYKLYWDRTILTDKTIHCNRPDITLHDKKNKTVYLIDIAVPNTHNLVSTYTDKMVKYRDLSMELKSQWKVQHVKTVPIIISSTGIIPLSLHNSLRTLNIKRSTYILLQKAVIINTCRLVRKFLSLE

SEQ ID NO: 22680 - protein, 1370 aa, Erynnis brizo
MEKVQVRKYNLRPLPGGRRGALGAGAECHSMRTIGDGGLNRRAPLEQNTTADFENPSSPSSSISLFPSLPSSPSSYINNYHGIHSSSSSTHSTNLRSSPLSFEEDSITSPPTITSMAVDVVQKAPADKSAPATVTKSARKKWNDNMNIFILRTYFEITKLETDTRAYLFPLHSKFIEKFPEMQVSRQRLGDQRRAIVRNRLLSLDTIQQIREEVKTKLSIQESLGNTKTDDLDLCTGTQTTRMKWNNELNEFITRSYFKITALETNLTGYRPLLKQAVVSKYPHLSHLTEQRISDQNRTIINNKMIDDNRLQQIKDEIAVELHRINQETLHTQLSSTLVNETREVNYTREINDNLPLGTHTCNQIHISQELQDTSEIENIFVRALKEFSNTDPTQRPYIPKQKPSKKLTAIIQFVNTTLLPKYLTDVNEFTIVETILYSAAFTVCTSNGAKIKTTSEQRPRIKILPKWQIRLQKRVEDFRVMIGRLTEYMKGNRSYKLTRHIENIKLRYRIHSKHEQENSTLDHFMDTLKQKLNLLSHRLRRYKRTTLRKSQNAQFINNEKLFYRTLDSQNNNKQLDIDTPTSEELHTFWANIWANSGNHTEGEWIKPDNELVKNIKEMQFETIDINLLKKVIAKTHNWKATGSDKIHNYWFKVFTHIQPHLLKHINTFIKNPESMPQYITKGLTYMLPKDKSDRKNPAKYRPITCLQNLYKLITACITELIQKHTETNNILAEQQKGCRRGSQGCKEQLTIDAVVSKQALDRKRNIYTMYIDFKKAYDSIPHSWLIYILEHYKIHPTLIEFLKTTMTKWSTSLKLSHIETDEICINKGIFQGDSLSPLWFCLALNPLSTALNSSKAGYKIKNNNTLFTLTHLMYMDDIKLYGTNLKEIHKLADITQKFSLDIQMEFGIDKCKIQSVRMGRLEKNTYNTTTGEVIEPVDCENGYKYLGYQQSRQIHHKEIKNTLKSKFKERLHRILNSSLNGKNTVKAINTFAIPYLTYSFGIIRWTQTDLKNLQRIVNTSMTQHRKHHPRSCTQRLTLPKLEGGRGLTDIQNLHNSQIKTLRSFFHTQQSGLHEAIVQSDKKYTPLNLLQRSTQKNETITESKQKLDDWLQKSLHGRHRRDLINPHIDKQASNTWLKRGELFPETEGFMLAIQDQVIETRNYRKFIIRDNSINSDQCRHCHSASETIQHITGACRSISQTDYRHRHDQVAAIIHQYLAVKNKLISEKQPYYKYKPQAVIDTDKFKLYWDRAFLTDKTVHNNRPDMIFHDKVNKTVYLIDIAVPNTHNLTTTYTDKMTKYVDLSIELKSQWQAKVVKTVPIVLSATGVIPRTLHDSLKTLNIHHLTYILLQKAVIINTCRLVRKFLTIDS

SEQ ID NO: 22681 - protein, 1246 aa, Ebrietas anacreon
MSVDVVREANAINLTPATGNKNVRKKWSDDMNTFILRTYFEETKLEKDLSTYLFPLHSKFTQRFPNMHVSRQRVGDQRRAIIRNKLLSTEKINSIRQQVSEYLQNTEFDQTCSNEINKETNSSRMRWSSEVNEFIVRSYYRITNLESNRTGYRPLLFQLVTAEYPNLAHLSEQRISDQCRAIIYNKMIPEEKMQIIRDNIAIELDRIETHNPRIETEDINTADSFSGNETNDIQTTNQHNDIVNKTTDENETLIRDTFISALESFKCIDPTERPYIPKQTSNKKLDTITNFINNELLPSYLKEDSDFETVHLIIYCAAYTASTCNGVRIHTQTHNNTTNTTNIPKWQQRIENRIQDLRSKIGKLTEYVRGNTSHKLRKSIEKIKTQYKIHAQFENDNKDLEQFLDTLKQKLNLLSNRLRRYKKTTLRKTQNTQFTHNEKRFYRSLEHSNSFKSNNFPSSEELHKFWSSIWGNPQEHQEGEWCKEIKEAAMNLPEMQFDAISVELLKTVISRTHNWKAPGSDKLHNYWFKKFSNVQSHLLRHINIFIKNPNTLPAFVTKGITYMLPKDNTNMNDPRKYRPITCLQSIYKIITACISELIYKHTHTNNILAEEQKGCRKNSQGCKEQLVIDAVVCKQAYNNKRNIYNMYVDYQKAFDSVPHSWLIYVLNNYKINPTIVYFLKTCMSKWATALKIEHQISEEIQIRRGIFQGDSLSPLWFCLALNPLSTLLNNSKKGFKIRYNSTPYTLTHLMFMDDIKLYATNLREINILANITQRFSTDIHMKFGIDKCKIQSILRGKLQFNKYETMDGEIVEPVDNDTGYKYLGYKQTRQIHHKEIKVTLTMRFRDRLHKILNTHLNGRNTVKAINTFAIPILTYSFGIITWSQTDLRKLQRIVNTSMTKYRKHHPRSCVQRLTLPTAEGGRGIIDIRNLHNNQITLLRTFFYSKAKLSDLHKAITEADIRYTPLNLHNHSTQKNQNITQAQDKFDEWIQKPLHGRHRRDLVNPHVDKIASNEWLKKGELFPETEGFMLAIQDQVIETGNYRKFIIRDNLASDQCRHCHSNSETIQHITGACKSITQTDYKHRHDQVASIIHQYLARKYKLITQYTPYYKYTPKSVIDTDQYKLYWDRTILTDKTIHHNRPDITLHNKTNKIVYLIDIAITNTHNIVSTYTDKIVKYRDLTIELKSQWRVQNVKTVPIILSSTGVIPHSLHNSLQTLNINRSIYSLLQKAVIINTCRIVRKFLSIE

SEQ ID NO: 22682 - protein, 1259 aa, Coeliades ramanatek
MSVDVVQEASAAILAPAADIKRTRKKWSYDMNIFILRTYYEVTKMETDLRTYLTPLHAKFIHQFPEMQVSRQRLGDQRRAIIRNNLVSNQDINQIKEAVTAKLQTLTQSQNLTQTTQDQIVFSGQNNSRMKWSTEINEFILRNYFKITKLESNRSAYRQALKQATVTKYPHLSHLSEQRISDQCRAIINNKMLTDQRIQELKDEVTLELNSIEDLSLHTLNNPSSPIDTTRLNVTTENTIDIIDHNLETLNNEYNVTPKYASNIDDTFLKALQEYRSTDPTKCPYIPKQKSSKKLAVITHYINTKLIPKYLPPNSDFNLTQLVLYVAAFTAATCNGAKINLPNKNTPRKQNVPKWQTRLQNRIQDLRTKISRLTEYMKGNRSQKLILYVEQIQKHYKTHAQHELENSNLSQFLDTLKQKLNLLSNRLRRYKLTTLRKLQNKHFENNEKHFYRTLNTSNINSHKDTATPTPAELHSFWSDIWSKPKVHVEGEWIKKDQECINSISEMQFKEISMNLLKSVITRTHNWKATGTDKIHNYWYKKLTNIHPHLLTHINNFIRSPESFPTYITQGVTYMLPKDKTDTHNPAKYRPITCLQNIYKIITACISELIYQHVDENNILAEQQKGCRKKSQGCKEQLIIDSVATKQALTKKRNIYTMFIDYKKAFDSVPHTWLLYILEHYKIHPTLIKFLENAMTNWRTTLKLEQAETEELRIRRGIFQGDSLSPLWFCLALNPLSNLLNNSKNGFKIRYNNSSYTLTHLLYMDDLKLYGSNFSEIENLAHITETFSSHIHMDFGIDKCKIQSIQRGTLIHNTYNTRNEEIIEPVDCDNGYKYLGYEQSRQLHHKTIKDTLINKFKQRLHTILKTSLNSKNTIKAINTFAISTLTYSFGIINWSQTDLIKLQRIVNTHMTKYRKHHPRSCTQRITLPNTEGGRGLIHIQNLHNKQITTLRSFFHNLAQQSPLHKAVTHADIKHTPLNLHNFSTQKNQTIKQTQQKLDEWLQKSLHGRHRRDLINPNVDKHASNEWLKRGELFPETEGFMVAIQDQVIETRNYKKFIIQDRTVSDQCRHCHSCSETIQHITGACRSITQTDYKHRHDQTAAIIHQYLAFKYKLITEHTPYYKYKPQPVIDNKDYKLYWDRTILTDKTVHHNRPDITLHDKKNKSVYLIDIAVPNTHNLVSTYTDKMTKYIDLSIELKSQWKVTTVKTVPIIISSTGVVPQTLHNSLKSLNIHRLTYIQLQKAVIMNTCRIVRKFLSIQEF

SEQ ID NO: 22683 - protein, 1353 aa, Udranomia kikkawai
MKSFNLNSNTNKNHETSDSAVETRKYNLRPLTGARRRKYETTPRSSNLEEFIGLDNKPTTDSIKSPSNLSSPISSTHSLFQSPSSSIHSYENPSTSRYTTPSPMSIDVVQEAYADNPAPATGTKCARKKWNAEMNIFILRTYYKETKMETDTRTYLIPLHSKFIERFPNMQVSKQRVADQRRAIERNKLLPIETINQIKQEINTELRNQIDSSDITPQPQIDQILNTGSSTLRMRWSSEINEFIVRNYYKITNLESNKSAFRQLLLQAVITKYPHLSHLSEQRVSDQCRAVINNKMISAEKLQEIKDEVLLELNINKIHSPQQQSLSSNLNIETVNTDNSLIQHSTKDNFTNLHHTIKNTFDNALFDFKTIEPIERPYIPKQKPSKKLFFITHFINNLLPTYLTENCEFSKVQLTLYCAAYTAATCNGTKINFDVSRSNTHRSRTQNIPKWQKRLQLRIEDLRVKIGRLTEYMKGHASNKLIKHVEAIKSHYKVHAQFESENSDLTQFLDTLKQKLNLLSNRLRRYKQTTLRKTQNSQFINNEKLFYQTLEQNNTIPDISTPTADQLHSFWSSIWANSKEHKEGHWFKGEEDLTKNISEMQFENVTLDLLKSTINRTHNWKAPGSDKLHNYWYKKLTNIHPHLLRHINSFIQSPNTLPAYITKGVTYMLPKDNSDTQNPAKYRPITCLQNLYKIITSCISQLIYSHTDLNNILAEQQKGCRKNSQGCKEQLIIDAIVSKQAQQKKRNIYTMYIDYKKAFDSVPHSWLIRILENYKIHPTLVQFLKNTMSRWSTVLKLKNIQTDEIEIRRGIFQGDSLSPLWFCLALNPLSSLLNNSKNGFKIKYNNSSHTLSHLMYMDDIKLYGSSLKEINQLADITQIFSSDIQMEFGIDKCRIQSIHRGRLELNTYQTSSGEIVEPVDCENGYKYLGYEQTRLLHHKQIKETLTNKFKGRLHKILNTHLNARNTTKAINTFAIPILTYSFGVINWSQTDLRKLQCIINRAMTKHRKHHPRSCTQRLTLGKSEGGRGIIHLQNLHNSQITSLRTFFHSKGLQSPLHNAVNQSDIKHTPLNLHSSSTQKNQNIIGPQQKCDEWLQKALHGRHRRDLINPHVDKTASNEWLRRGELFPETEGFMLAIQDQVIETGNYRKFIIRDKNLLTDSCRHCHSSSETIQHITGACKSITQTDYKHRHDQVASIVHQQLALKHKLITEYIPYYKYKPKSVIDTKDFKLYWDRTILTDKTIHHNRPDITFHDKSNNTVYLIDIAVPNTHNLINTHTEKMAKYTDLCIEIKSQWKVAKVKTVPIILSSTGVIPHTLHDSLRTLDIHRSLYVLLQKAVIINTCRIVRKFLSIEE

SEQ ID NO: 22684 - protein, 1350 aa, Doberes anticus
MKSFNSNRKTNKTTIPDYTVETRKYNLRPLPGGRRRNPETAAECTNSKQTVGLNTDQQQLTKYRIITNSGPSSPMSSTYSLFQSPSSSPQSFENPSISRSTTVSPMSVDVVQEADANNPAPATGTKCVRKKWSDEMNIFILRTYYEESKMETDHSNYLIPLHSKFIKQFPNMQVSRQRVGDQRRAIIRNKLLSTHKINQIRQDVEAQLEDHPEVTRHNQSNDQILNTASNSMRMRWSNEINEFIVRNYYTITNLESNRSAYRQPLFQAVIAKYPHLSHLSEQRISDQCRAVIHNKMVSEEKLQKIKDEIIIELNTRETYNIPIEILDSDTQYRDTDVTNNIIQQNIHETIKNEPEIRNIFTKALEEFESVEPTERPHIPKQRSNKKLAVLTHFINCNLIPFYLTEASDFKTVQLTLYCAAYTASTCNGVRIQKTKDSTFITKNIPKWQQRLQRRIEDLRAKIGKLTEYIRGNTSYKLSKHVEEIKKQYKTHAQFDNENSDLAQFMDTLKQKLNLLSNRLRRYKQTTLRKTQNTQFINNEKQFYRTLQQQTTALTDTNIPTPTQLHTFWSNIWGDTKCHRENKWCKVVQESVKDISEMQFEKVSLDLFKSIVTKTHNWTSPGSDNLHNYWYKKFTNIHSHLLRHINKFIQEPDTLPAYVTKGVTYMLPKDKSDTQNPAKYRPITCLQNFYKIITGCITELIYKHTDSNKILAEQQKGCRKNSQGCKEQLIIDSVASKQALNKKRNIYTMYIDYKKAFDSVPHSWLLYVLNNYKIHPTIIHFLKNCMVKWSTVLKLNHLQTEEIAIRRGIFQGDSLSPLWFCLALNPLSILLNNSNKGFKIRHSNKSYTLSHLMYMDDIKLYGSNLSEINKLADITQQFSGDIQMEFGIEKCRIQCIKRGQLEFNNYQTNSGEIVEPVDCDEGYKYLGYVQTRQLHHKEIKQTLSDKFRDRLRKILNTHLNARNTTKAINSFAIPILTYSFGIINWSQSDLKKLQRIINTTMTKYRKHHPRSCVQRLTLPKSEGGRGLIDVQNLHNTQITSLRTFFHSKALQSILHNAIMKADIKHTPLNLHNIAIQKNQNITQPQQKFDEWVQKALHGRHRKDLISPHIDKVASNEWLKRGELFPETEGFMLAIQDQVIETGNYRKYIIRDKNLVTDQCRHCHSNSETIQHITGACKSITQTDYKHRHDQVASIIYQYLARKYKLITDYTPYYKYKPKAVIETKQYRLYWDRTILTDKTIHHNRPDITFYDKSCKTVYLIDIAVPNTHNLITTHTEKMTKYTDLSIEIKSQWKVQKVVTVPIVISSTGIVPHTLHQSLHNLKIHRLAFVLLQKAVIINTCRIVRKFLALDG

SEQ ID NO: 22685 - protein, 1140 aa, Ectomis asine
MRWSNEINEYILRSYFTITNLETNLSAYRKPLKLAVITKYPELSHLSEQRISDQFRAIINNKMINVNRLQEIKDEVLIELNRKEQERSESLHTTYIQQFSHTLVETNHIYPQTPINYTKLNSQSNSTTAVDSNNYNFNSLNSTEIEEIFLKALNNFTHVEPTQRPYIPKQKQSKALDTITDFVNCTLLPKYLTDVNNFSKLETIIYCAALTVSTYNGAKIFTRTQSTHNIQNTPKWQIRLQNRIRDLRAKIGRLTEYMKGNTSKKLKGQIEKIKLQYKIHSKYEDENNDLAQFMDTLKQKLNVFSNRLRRYKQTTLRKNQNKQFTYNEKLFYRKLNSSHCNNQTENNTPTQELLHTYWSNIWNNPQNHTEGDWIVQDKEIVSNIPEMPFKEIDIDLLKAVIAKTHNWKATGSDKIHNYWLKKFTHLHPHLLTHINSFINKPDTLPTYLTKGVTYMISKDKEDLKNPAKYRPITCLQNLYKIITACITELIYKHIDTNNVLAEQQKGCRRGSQGCKEQLTIDAVVTKQALTRKRNIYTMYIDYKKAYDSIPHSWLIYVLKHYKIHSSLTEFLKKIMINWCTVLKLNKVETQQINIRRGIFQGDSLSPLWFCLALNPLSTALNTSNIGYKIKNNDTSYTLSHLLYMDDIKLYGSNLTEIHKLADITQAFSSDIHMEFGVDKCRIQSVHRGRLENNSYYMVSGEEIEPVDNETGYKYLGYQQSRQIHHKKTKHLLTNNFKQRLHKILNTTLNSKNTIKAINTYAVPSLTYSFGIIKWSQTDLKKLQRILNTSMTKHRKHHPRSCTQRLTLPKMEGGRGFIDVQNLHNTLITKLRSFFHTRAQFSSLHQAVIQADIKYTPLNLHDNNIQKNQTITENHQKLDEWLQKSLHGRHRRDLINPHIDKQASNTWLKRGELFPETEGFMLAIQDQVIETRNYKKFIICDKNLRSDQCRHCYDASETIQHITGACRSISQTDYKHRHDQIAAVVHQCLAYKHKLVSEKIAYYKYSPQTVLESDKFKLYWDRTILTDKTIHHNRPDITLHDKINKTVYLIDIAVPNTHNLTKTYTEKISKYTDLAIELKSQWKVKIVKTVPIIISATGVIPKTLRDSLNALNIPYFTYTLLQKATIINTCRIVRKFLSINE

SEQ ID NO: 22686 - protein, 1370 aa, Ectomis octomaculata
MKSTVCNRTKNKTNCQKDSAVSSRTYNLRPIPGRRETKRSEEASYQTFARYKLPDTISITSNPSSPISSTHSLFESPTSSLHAFECLSTSRSTSITPMSVDVVQEANAWTPAPATGIKCARKKWSIDMNIYILRTYYEITKMETNIKDYLTQLHNKFIEKFPNMEVSKQRVGDQRRAIERNKLLPLQTINQIKAEVNQHLTKCSTIRQTHDQVTPATSCTSRMRWSNEINEYIIRSYFRITNLETNLSAYRQPLKCAVITKYSHLSHLSEQRISDQLRVIINNKMINENRIQEIKDEVLIELDRKAQERSQSLHTEQMLVKTIDHNHPQTLIKDTSLNVQSNSPTEVNKNNLDNSISNNLNCNQYNFNSLNSSEIEDIFIKALNNFTFVEPTQRPYIPKQKPSKYLETITNYVNSVLIPKYLTDANNFSKLETIIYCAALTVCTYNGAKIFTRSQCKTNSPGTPKWQIRLQNRIRELRAKIGKLTEYMRGNTSKKLKSQIENIKLQYKIHSKHEDENNDLTQFMDTLKQKLNVFSNRLRRYKQTTLRKYQNKQFTYNEKLFYRTLNTPHCNSQTENNAPTQEQLHTYWSNIWNNSRNHTEGEWIKQDKEIVRNIPEMPFEEIDIDLFKAVIAKTHNWKATGSDKIHNYWLKKFTYLHPHLLTHINNFIRKPDTLPTYLTKGITYMISKDKEDLKNPAKYRPITCLQNFYKIITSCISELIYKHIDTNEILAEQQKGCRRGSQGCREQLSIDAVVTKQAVTKKRNIYTMFIDYKKAYDSIPHSWLIYILRHYKIHPALIEFLEKIMVNWSTILKLNKVETQEINISRGIFQGDSLSPLWFCLALNPLSTALNISNIGYKIKNKNTSYTLSHLLYMDDIKLYGSNLKEIHKLADITQAFSSDIHMEFGVDKCRIQSVHRGRLEYNSYYMVTGEEVEPVDNETGYKYLGYQQSRQIHHKNTKILLTNKFKQRLHKILNTTLNSKNTVKAINTYAISLLTYSFGIIKWSQTDLKKLQRILNTSMTKHRKHHPRSCTQRLTVSKQEGGRGFTDIQNLHNTQITKLRSFFHTRAQFSSLHQAIIQADVKYTPLNLHDYSTQKNQTITETQQKLDDWLQKSLHGRHRRDLINPHIDKQASNTWLTRGELFPETEGFMLAIQDQVIETRNYKKYIIGDNTLNSDQCRHCHGSSETIQHITGACRSITQTDYRHRHDQIAAIIHQHLAFKHKLLTEKIAYYKYIPPSVIESDKFKLYWDRTILTDKTVHHNRPDITFHDKINKTVYLIDIAVPNTHNLTKTYTEKISKYTDLSIELKSQWKVKTVKTVPIVLSATGVIPRTLRDSLSALNIPYFTYILLQKATIINTCRIVRKFLSINE

SEQ ID NO: 22687 - protein, 1370 aa, Racta chiria
MKSSKSKNKFCLKPTVNLRSYNLRSRSESLRIMSGTDASCHPLQIGYREEVSNLEQSKQQKHHHQESDGGPINSNASSPISPTHTIFQSPSSSPNFSKNQSISPISVDVVQMANAKKPVPATGISRVRKKWSTEMNIFILRTYYEITKLETETSTYLLPLHNKFIERFPDMQVSRQRVGDQRRAIERSKLLPTDTINRIKEEVKAQLDTMHEESVNLPITGNLTQPLLNTTRMRWSTELNEFIIRSYLRITNLETNLSSYRLPLKQAVISRYPHLSHLSEQRISDQYRTLIKNKRIKDDRLQQIRHEVILDLHTRMQQENSVVNQPNISLEQIDVSDTQQNVHSLVLESAYTYNQSNDIHIEYLVVEETFLKALNDFKDVDPTNRPYLPKQKPTRNLTTTTNFVNTTLLPKYLEQMNDFSTFELMVYCAAFTVCKYNGAAISFIQNYRPRAQNIPKWQRRLQNRIKDLRKMIGRLTEYIKGNTSKKLSKHVEKIKEQYKIHSKHEHDNNNLTEYMDTLKQKLNLLANRLRRYNQTTLRKTQNIQFSHNEKLFYRTINASQVQSDINIPTSEELHSFWSSVWSDNITHIEGDWIKQDKETVRNIAAMEFEEVDANILRTVINKTHNWKAPGSDNIHNYWFKKFTCIHSYLLTHINNFIKNPNLLPPYITRGITYMLPKDMTESKNPAKYRPITCLQNIYKIITSCLTEIIQNHVETNKILAEQQKGCRRRSQGCKEQLTIDAVATKQALRKKRNIYTMYIDYKKAFDSVPHSWLIYILEHYKIHPTLIRFLRKTMEHWSTRLKLKQIESEEIRICRGIFQGDSLSPLWFCLALNPLSMLLNNTNKGFKIKHSNISYTLSHLMYMDDIKIYGSNLKEIQTLADITSTFSSDIRMEFGIEKCKIQSVHRGHIQNNRFITNTGVEIEPVDTDSGYKYLGYQQSRQIHHKQIKQTLTTKFRDRLHKILTTNLNSKNIIKAINTFVIPYLTYSFGIISWSQTDLQKLQCIINTSMTRYRKHHPRSCVQRLTLPKLEGGRGLIDIRNLHNKQITTLRNFFLTHAQNSSLHKAVTQSDIKYTPLNLHDTDVQKNQNIVEPHQKLNNWLKKSLHGRHRNDLLSPNVDKTASNFWLKRGELFPETEGFMVAIQDQVIETRNYKKFIIRDKNLVSDRCRHCHTTSETIQHITGACRSIAQTDYKHRHDQVAAIIHQYLAFKFKLITEKVSYYKYIPQAVLDSDKFKLYWDRTILTDKTIHHNRPDITLHDKINKIVYLIDVAVPNTHNLVNTHTEKMTKYTDLSIELKSQWRVRTVRTVPIIISTTGVIPQTLYDSLSVLNIHLMTYILLQKATIINTCRIVRNFYINKRINRAFTSTFIV

SEQ ID NO: 22688 - protein, 1244 aa, Asbolis capucinus
MKSSKSKNKLCSKSTVNLRTYNLRSQSKSRRIMSQTETSYDSMQIGYREEECYKEQTKLQQQEIDGVSINSYPSSPISFTHSLFQSASSSPNSFQSQYMSRSSTVSPISVDVVQKANAEEPVPATDIKCARKKWSTDMNIFILRTYYEITKMETETSNYLIPLHNKFLERFPDMQVSRQRVGDQRRAIERSNLLPIDMINRIKEEVKARLNMIDFSINSPTPEQITQPLLNNTRMRWSTELNEFIVRSYLTITNLETNIASYRLPLKQAVITKYPHLSHLSEQRISDQYRTLMKSKRIKDERLQQIRQEVIIELQRIQQENLGVNQSNSSSGNIEVNDAQPNDDCIVLDSDSFCQSIVSHIDGPIIEEMFLTAMKDFKPVHPTKRPYLPKQKSTRNISATTNFVNTTLLPRYLDQMNDFGTFELTIYCAAYTVCKYNGAKISLTRNYTSRNSNVPKWQRRLQNRLEDLRRMIGRLTEYMRGNRSKKLSNQIEKIKEQYKIHSKHEQDNNKLIEFMDTLKQKLNLLANRLRRYKQTTLRKTQNTQFFNNEKLFYRTINTTHDQNITNLPTTEELHAFWSRVWTENKTHTEGDWIKQDKELVKNIAAMEFKKVDSNTLKLVINKTHNWKATGSDKIHNYWFKKFTCIHSHLLTHINNFIENPNLLPPYITSGITYLLPKDIDDPKNPAKYRPITCLQNIYKIITSCITEIIQKHVETNKILAEQQKGCRRGSQGCKEQLTIDAVVTKQALCKKRNIYTMYIDYKKAYDSVPHSWLVYVLEHYKIHPTLVRFLRNIMAQWSTKLKLKEIESEEICIRRGIFQGDSLSPLWFCLALNPLSTTLNSTNKGFKIKYSNISYTLSHLMYMDDIKLYGSNLKELHTLANITNTFSSDIQMEFGIDKCKMQSIHRGHIECNNYYTNTGEEIEPLDTDNGYKYLGYQQSRQIHHRQIKQTLTTKFRDRLHKIFNTSLNSKNTIKAINTFAIPYLTYSFGIINWSQTDLQKLQCIINTTMTRYRKHHPRSCVQRLTLPKLEGGRGLIDIRNLHNKQISTLRNFFLSQAQNSLLHKAITQSDIKYTPLNLHDTGTQKNQNIVEPQQKLNTWLQKSLHGRHRQDLLSPCVDKQASNVWLKRGELFPETEGFMIAIQDQVIETRNYKKFIIHDKNLISDKCRHCHTTSETIQHITGACRSIAQSDYKHRHDQVAAIIHQYLAFKFKLIKEKTSYYKYIPQAVLDSDKFKIYWDRTILT

SEQ ID NO: 22689 - protein, 1210 aa, Thymelicus sylvestris
METDTCAYLIPLYNKFIECFPDMQVGRQRVGDQRRAIERNKLLPTNTINRIKDEVKTQLNSTEALFTSPTQQLATQPVPNTSRMRWSNELNEFIVRSYLTITNLETNISSYRLPLKEAVISKYPHLSHLSEQRISDQYRTVIKNKRIKEERLEQIKQEVLLQLNSVQQEKTALNQSPNISLDHIEINYTQHNTHNSVVELSHTLNQPNNTNVNSALIEDTFLKALNDFKAVDPTLRPYLPKQKPSKNLITATNFVNNTLLPKYLIDTHDFNTFETILYCAAFTVCKYNGAKILLTQNRPPSNQNIPKWQRRLQNRIQELRKIIGRLTEYVNGNKNKKLNTHIEKIKEQYKIHSKYEQDNSNTIEIMDTLKQKLNLLANRLRRYKQTTLRKTQNTQFTNNEKLFYRTIETSQHQTDVNTPTSEQLHSYWSNLWTESKTHLEGEWIEQDKERVKNITPMKFEDIDINTFRKVIAKTHNWKATGSDKIHNYWFKNFTYTHSYLLAHINNFIKNPTELPQYITKGITYMLPKDTTDSKNPSKYRPITCLQNIYKIITSCITELIHNYIETNKILSEQQKGCRRRSQGCKEQLTIDAVATKQALTKKRNIYTMFIDYKKAYDSVPHSWLIYILEHYKIHPTLIQFLKMTMEQWSTRLKLKQIETEEILIRRGIFQGDSLSPLWFCLALNPLSTILNNTNKGFKIKHNNTSYTLSHLMYMDDIKLYGSNLKEIHKLAKITHTFSLDIQMEFGIEKCKIQSIHRGHTENNNFFTASGEVIEPVDIDSGYKYLGYQQSRQIHHKQIKQTLTTKFKQRVHKILNTELNSKNIIKAINTFAIPYLTYSFGIINWSQTDLQKLQRIINTSMTRHRKHHPRSCVQRLTLPKLEGGRGLIDIQNLHNKQITTLRNFFYKQAHISSLHQAVTQSDIKYTPLNLHDTEKQKNENIIEPQQKLNDWLQKSLHGRHRSDLLNAHIDKQASNVWLKKGELFPETEGFMVAIQDQVIETRNYKKFIIRDKALVSDNCRHCHTTSETIQHITGACRSIAQTDYKHRHDQVAAIVHQYLAFKFKLITEKTSYYKYTPQAVLDSHKYKLYWDRTILTDKTIHHNRPDITVHDKINKVVYLIDVAIPNTHNLASTHTEKITKYTDLSIEIKSQWRVNTVKTVPIVVSATGVIPRTLHDSLKMLNIHPLTFILLQKATIINTCRIVRKFLSTAE

SEQ ID NO: 22690 - protein, 1223 aa, Lerema accius
MKWSVEMNIFILRTYYEITMMETDTSAYLIPLHNKFIERFPDMEVSRQRVGDQRRAIERSKLLPLNTINKIKAEVKAQLNIDEGNKAVTSTQNQDTQPVSNMTRMRWNTELNEFIIRSYLKITNLETNITSYRLPLQQAVIARYPHLSYLSEQRISDQYRTLIKNKRIKEDRLQQIRHEVMLELNSIGEENTVVSQPNIPIVAMEAYNNQLVAHNSTVDSAHNTHVDGSVIEDIFLKAFNDFKSVDPTKRPYLPKQKYTKNLISATNFVNNTLLPKHLKETDDFITFEAIVYCAAFTVCKYNGAKIFYNENYTPRTQNIPSWQRRLQKRIQDLRKMIGRLTEYMKGNTSRKLNSHIEKIKDQYKIHSKHEQDNSNLIEFMDTLKQKLNLLANRLRRYKQTTLRKTQNTQFLNNEKLFYRKIDTSEEASDTTIPTAEELHSFWSNIWAKPKTHVEGDWITHDKDIVKDITDMEFEEIDIYILKTVINKTHNWKATGSDKIHNYLLKKFTYIHSYLLTHINNFIKNPNLLPAYITTGITYMLPKDKNDPKNPSKYRPITCLQNIYKIITSCLTEIIYNHIEDNKILADQQKGCRKRSQGCKEQLTIDSVATKQALNKKRNIYTMYIDYKKAYDSVPHSWLVFILEHYKIHPTLIRFLKSTMENWSTRLKLKQIESEDIRIRRGIFQGDSLSPLWFCLALNPLSMLLNKTNKGFKIKHSNTSYTLSHLMYMDDIKLYGSNLKEIETLAEITNTFSSHIHMEFGIEKCKMQSIHRGHIENNSFLTNTGEQIDPVDSDSGYKYLGYEQSTQIHHKKIKQTLTTKFRQRLNKILNTSLNSRNIIKAINTFAIPCLTYSFGIIKWSQTDLKKLQCIVNTSMTRHRKHHPRSCVQRLTLPKVEGGRGLIDIRNLHNKQITTLRNFFFTQAQNSSLHKAVTQSDIKYTPLNLHDTVIQKNQNIIEPEQKLNNWLQKSLHGRHRHDLLNPHIDKQASNIWLKRGELFPETEGFMLAIQDQVIETRNYKKFIIRDKNLVSDKCRHCHTTSETIQHITGACRSIAQTDYKHRHDQVAAIIHQYLAFKFKLIKEKTSYYKYAPQAVLDSNKFKLYWDRTILTDKTIHYNRPDITLHDKLNKVVYLIDVAVPNTHNLTNTHTEKITKYTELSIELKSQWRVNTVKTVPIIISTTGVIPWTLHDSLKILNIHPLILNLLQKATIINTCRIVRKFLSLD

SEQ ID NO: 22691 - protein, 1370 aa, Thymelicus sylvestris
MKSSNKQNKNFKTKLFVNSTIQSRSYNLRSQSKSYQVIPQADASCNSMEIGYRDEISCQEQNGQRHYNNHKEIDIITTKSTPSSPISSTYSLFQSPSSSPHSFENQSISRSSSITSMSVDVVQEANAKGPVPAADNKSARKKWSIEMNIFILRTYYEITKMETDTCAYLIPLYNKFIECFPDMQVGRQRVGDQRRAIERNKLLPTNTINRIKDEVKTQLNSTEALFTSPTQQLATQPVPNTSRMRWSNELNEFIVRSYLTITNLETNISSYRLPLKEAVISKYPHLSHLSEQRISDQYRTVIKNKRIKEERLEQIKQEVLLQLNSVQQEKTALNQSPNISLDHIEINYTQHNTHNSVVELSHTLNQPNNTNVNSALIEDTFLKALNDFKAVDPTLRPYLPKQKPSKNLITATNFVNNTLLPKYLIDTHDFNTFETILYCAAFTVCKYNGAKILLTQNRPPSNQNIPKWQRRLQNRIQELRKIIGRLTEYVNGNKNKKLNTHIEKIKEQYKIHSKYEQDNSNTIEIMDTLKQKLNLLANRLRRYKQTTLRKTQNTQFTNNEKLFYRTIETSQHQTDVNTPTSEQLHSYWSNLWTESKTHLEGEWIEQDKERVKNITPMKFEDIDINTFRKVIAKTHNWKATGSDKIHNYWFKNFTYTHSYLLAHINNFIKNPTELPQYITKGITYMLPKDTTDSKNPSKYRPITCLQNIYKIITSCITELIHNYIETNKILSEQQKGCRRRSQGCKEQLTIDAVATKQALTKKRNIYTMFIDYKKAYDSVPHSWLIYILEHYKIHPTLIQFLKMTMEQWSTRLKLKQIETEEILIRRGIFQGDSLSPLWFCLALNPLSTILNNTNKGFKIKHNNTSYTLSHLMYMDDIKLYGSNLKEIHKLAKITHTFSLDIQMEFGIEKCKIQSIHRGHTENNNFFTASGEVIEPVDIDSGYKYLGYQQSRQIHHKQIKQTLTTKFKQRVHKILNTELNSKNIIKAINTFAIPYLTYSFGIINWSQTDLQKLQRIINTSMTRHRKHHPRSCVQRLTLPKLEGGRGLIDIQNLHNKQITTLRNFFYKQAHISSLHQAVTQSDIKYTPLNLHDTEKQKNENIIEPQQKLNDWLQKSLHGRHRSDLLNAHIDKQASNVWLKKGELFPETEGFMVAIQDQVIETRNYKKFIIRDKALVSDNCRHCHTTSETIQHITGACRSIAQTDYKHRHDQVAAIVHPYLAFKFKLITEKTSYYKYTPQAVLDSHKYKLYWDRTILTDKTIHHNRPDITVHDKINKVVYLIDVAIPNTHNLASTHTEKITKYTDLSIEIKSQWRVNTVKTVPIVVSATGVIPRTLHDSLKMLNIHPLTFILLQKATIINTCRIVRKFLSTAE

SEQ ID NO: 22692 - protein, 891 aa, Thymelicus sylvestris
MLGRLTEYMKGNTNKKLTTHIEKIKEQYKIHSKFEQDNNSLIEFMDTLKQKLNLLANRLRRHKQTTLRKTQNTQFSNNEKLFYRTLDNPQPHNHTDIDLPTADQLHSFWSSIWTEPKTHIDRDWTKQEKEIVNNIVEMKFEEIDINILKTVIGKTHNWKAAGSDKIHNYWFKKFTYIHSYLLIHINNFIRNPNTLPSYITRGITYMLPKDKADSKNPAKYRPITCLQNIYKIITSCITEIMQKHIETNQILSEQQKGCRRKSQGCKEQLTIDAVANKQAYSRKRNIYTMFIDYKKAYDSVPHSWLVYILEHYKIHPTIIQFLKNTMEQWSTKLKLNEIETEEIMIRRGIFQGDSLSPLWFCLALNPLSTLLNNTNKGFKIKHNSTSYTLSHLMYMDDIKLYGSNLKEIQTLAEITDAFSSDIKMEFGIDKCKLQSIRRGQIDNNSFFTSTGEEIVPVDVVSGYKYLGYQQSRHIHHKQIKHTLTTKFKERLHKILQTTLNSKNIVKAINTFAIPYLTYSFGIITWSQTDLQKLQRIVSTTMTRHRKHHPRSCIQRLTLPKLEGGRGLIDIQNLHNKQITTLRNFFFNRAQSSPLHKAVTQADLKYTPLNLHDTETQINQNITEPQQKLNNWLQKSLHGRHRADLLNANVDKQASNVWLKRGELFPETEGFMVAIQDQVIETRNYKKFIIRDKTLISDKCRHCHAASETIQHITGACRSIAQTDYKHRHDQVAAIIHQYLAFKFKLIKEKTSYYKYTPQAVLDSDKFKLYWDRTILTDKTVHHNRPDITLHDKVNKIVYLVDVAIPNTHNLSSTHTEKITKYTDLSIELKSQWRVNTVQTVPIILSTTGVIPRTLKDSLKILNIHPLTFILLQKATIINTCRIVRKFLSLAE

SEQ ID NO: 22693 - protein, 1365 aa, Thymelicus lineola
MKSLNKQSKIYKTKLFVNSTVLTRSYNLRSQSKSERVIPQADARCNPTEIGYRDEEQWTGQRHNNHQEIDINTTSSNPSSPISSTYSLFQSPSSSPHSFENQSISRSSSKTSMSVDVVQEANAKEPGPATDTKSARKKWSCEMNIFILRTYYEITRMETDTCAYLIPLYNKFIECFPDMQVGRQRVGDQRRAIERNKLLSTNTINKIKDEVKTRLNSTEALIISPTQELATQTVSNASRMKWSNELNEFIVRSYLTITNLETDISSYRQPLKEAVISKYPHLSHLSEQRISDQYRTLIKNKRIKEERLQQIKQEVILELNSGQQERIVLNQSSNISPDNIELHYTQPNTHNSVLELSHPLNQPNDTHVNSALIENTFLKALNDFKTVDPTMRPYLPKQKPSKDLTMTTHFVNTILLPKYLTDALDFNTFETILYCAAFTVCKYNGATILITQDRPSTQNVPKWQRRLQNRIRELRKIIGRLTEHIKGNTSKKLNTHIEKIKEQYKIHAKYDQDNSNTTEIMDTLKQKLNLLANRLKRYKQTTLRKTQNTQFTNNEKLFYRTIETSPHQTDINTPTPEQLHSYWSSLWTESKTHLEGEWIEQDKERVKNITPMKFENIDINTLKKIIAKTHNWKATGSDKIHNYWFKKLTYTHSYLLTHINNFIKNPAALPQYITKGITYMLPKDTTDSKNPSKYRPITCLQNIYKIITSCITELIHNYIETNNILSEQQKGCRRRSQGCKEQLTIDAVATKQALSKKRNIYTMFIDYKKAYDSVPHSWLIYILEHYKIHPTLIQFLKMTMQQWSTRLKLKQIETEEILIRRGIFQGDSLSPLWFCLALNPLSTILNNTNKGFKIKHNNTSYTLSHLMYMDDIKLYSSSLKQIQKLAEITETFSVDIQMEFGIEKCKIQSIHRGHTENNNFFTASGEVIEPVDIDSGYKYLGYQQSRQIHHKQIKQTLTTKFKQRVHKVLNTELNSKNIVKAINTFAIPYLTYSFGIINWSKTDLQKLQRIINTSMTRHRKHHPRSCVQRLTLPKLEGGRGLIDIQNLHNKQITTLRNFFYKQAQSSSLHLAVTQSDIKYTPLNLHNTEKQKNENIIEPQQKLNDWLQKSLHGRHRCDLLSAHVDKQASNVWLKKGELFPETEGFMVAIQDQVIETRNYKKFIIRDKALVSDKCRHCHIASETIQHITGACRSIAQTDYKHRHDQVAAIVHQYLAFKFKLITEKISYYKYTPQAVLDSHKHKLYWDRTILTDKTIHHNRPDITLHDKINKVVYLIDVAIPNTHNLSSTHTDKITKYTDLAIELKSQWRVNTVKTVPIIISTTGVIPRTLQDSLKILNIHPLTFILLQKATIINTCRIVRKFLSIVE

SEQ ID NO: 22694 - protein, 1362 aa, Hesperia comma
MESLKTQSKKSTTKIYLNSTVKTRSYHLRSQTGSHRAIPQTDARCNSLQVGYREEVLCQEQAIKQHCNDHQENNIVATNSRPSSPTSSSYSLFESPSSSPHSFENQDTSRSSTISPISVDVVQVANAEEPAPATDTKRARKKWSVEMNIFILRTYYEITKMETDTCNYLIPLYNKFIERFPDMQVGRQRVGDQRRAIERNKLLAIDTISKIKEEVKLNLTDSVSSPTQQLSNTSRMRWSNELNEFIVRSYLTITSLETNISSYRLPLKQAVISKYPHLSHLSEQRISDQYRTLMKNNRIKEERLQEIRHEVILELNRTQQENSVINQTSNISLEDIEVNYTQSNINNSVTESPQYNHQPNDTHINGTVIEDTFLKALNDYKAIDPTQRPYLPKQKPSKTLTTTTDFVNTTLLPKYLKDTNDFKTFETILYCAAYTVCKCNGAKILSSDVRPPTIQNIPKWQRRLQNRIEELRKMIGRLTEHMKGNTSRRLNKHIEKIKEQYKIHSKYDKDNNSIVEILDTLKQKLNLLANRLRRYKKTTLRKTQNTQFLNNEKVFYRTLNSIQQQTDINIPTPEQLHSYWATLWTDPKTHTETDLIKQDNEIGKNIDLMTFEKIDINMLKTVIGKTHSWKATGSDKIHNYWFKKFTHIHSYLLTHINNFIRNPDELPQYITRGLTYMLPKDIKDSKNPAKYRPITCLQNIYKIITSCIAEIIYSHIDRYKILSEQQKGCRRRSQGCKEQLIIDAVATKQALTRKKNIYTMFIDYQKAYDSVPHSWLIYILEHYKIHPTLVQFLQVTMRHWSTRLKLKHIETDEIPIRRGIFQGDSLSPLWFCLALNPLSTILNNTNKGFKIKQNNTSYTLSHLMYMDDIKLYGSNLKELHNLAEITQAFSSDIHMEFGIEKCRIQSINRGRTENNTFVTNNGEEIEPVDIVTGYKYLGYQQSRQIHHKQIKQTLTTKFKERVNKILNTSLNSKNTIKAINTFAIPYLTYSFGIIRWSQTDLHRLQRIINTSMTKHRKHHPRSCIQRLTLPNLEGGRGLIDIQNLHNKQISTLRNFFFKQSQISFLHKAVTQSDIKYTPLNLHDIETQKNQNIIEPQQKLDNWLQKSLHGRHRRDLLSPHVDKEASNAWLKKGELFPETEGFMVAIQDQVIETRNYKKFIVCDKTLISDKCRHCHTTSETIQHVTGACRSIAQTDYKHRHDQVAAIVHQYLAFKFKLITDKISYYKYTPQAVLDSDKFKLYWDRTILTDKTIHHNRPDITLHDKINKVVYLIDIAIPNTHNLTSTYTDKITKYTELSIELKSQWRVTTVKTVPIIISATGVIPRTLQDSLKILNIHPLTYILLQKATIINTCRIVRKFLNFEE

SEQ ID NO: 22695 - protein, 1289 aa, Carystus phorcus
MRGSAEVDHEISLASRGNNMKSSKTQNKNSRTFFFNTTPQIRPYNLRSQCESQRVLSQADARCSSTQTDHRDETRQEQASKHDHNHEDHQEGDIVSINSNPSSPTSSMYSLFQSPSSSPNSFDNQTTSRSSNISPISVDVVQVANAKEPAPATDIKSARKKWSSEMNIFILRTYYEITKMETETCTYLITLHNKFIERFPNMQVSRQRVGDQRRAIERNKLLPINVINKIKQEVETQLNLAEDPGSLPIQGLAAQPVSNTSRMRWSSELNEFIIRSYFKITNLETNMSSYRQSLKQAVISKYPHLSHLSEQRISDQYRTLINNKRIREERLQQIRHEVIVELNMCQQENLVLNQSSNMLIENTDINSTPSNDHNYVRESAHPNPQPHDIQVNGPGIEEIFSKALNDFKGMDPTLRPYLPKQKPSKNLTTTTNFVNTVLLPKYLSETNEFNAFEVIVYCAAFTVCKYNGAKIIFDVNRSPKTQNIPKWHKRLQNRIEELRKMIGRLTEHIRGNTNKKLNAHIEKIKNQYKVHSKHERDNNNVVEIMDTLKQKLNLLSNRLRRYKKSTLRKTQNTQFVNNEKLFYRTINTSQDHTGIHTPTPEQLHSYWSNLWNNPKTHLEGDWIKQDKEVVHNITRMEFEEINMSILKTVIKKTHNWKATGSDKIHNYWYKKFTYIHSYLLTHINNFIKNPTILPEYITKGVTYMLPKDTTDSKNPAKYRPITCLQNIYKIITSCIAEIICNHVETNKILSEQQKGCRKGSQGCKEQLTVDAVATKQALTRKRNIYTMFIDYKKAYDSVPHSWLIFILEHYKIHPALIDFLRNTMDHWSTRLKLKQIETEEIRIRRGIFQGDSLSPLWFCLALNPLSSILNNTNKGFKIKYNNTSYTLSHLMYMDDIKLYGSNLKDIHKLADITHTFSTDIQMEFGIEKCRMQSIHRGNIENNSFLTSNGEEIEPVDNDSGYKYLGYQQSRQIHHKQIKQTLTIKFKQRVHKILNTALNSKNTIKAINTYAIPYLTYSFGIINWSQTDLQKLQRIISTSMTKHRKHHPRSCIQRLTLPKLEGGRGVIDIQNLHNKQITTLRNFFFKQAQHSSLHRAVTQSDIKYTPLNLNNIETQRNQYIIEPQQKLNKWLEKSLHGRHRSDLLSAHVDKQASNIWLKRGELFPETEGFMIAIQDQVIETRNYKKFIIRDKNLISDKCRHCHTTSETIQHITGACRSIAQTDYKHRHDQVAAIIHQYLAYKFKLISEKTAYYKYIPQPVLDSDKVKLYWDRTILTDKTVHHNRPDITLYD

SEQ ID NO: 22696 - protein, 1346 aa, Duroca duroca
MKAVKSKNKLCINSTVNIRPYNLRSQSESHRVMSQADASCHSMQIGYREEERCQEQVRQRHDNNCQEIDVTTINSHPSSPISSTHSLFESPSSSSHSFENQTISRSSTISPISVDVVQEANAESLVPATDTKCARKKWSVEMNIFILRTYYEITKMETETSAYLIPLHNKFIEYFPDMQVSRQRVGDQRRAIERSNLLPINTINRIKEEVKSQLNIMEANIAVSPTQNHHTQLVSNTTRMRWSTELNEFIVRSYLTITNLETNITSYRLPLKQAVMSRYPHLSHLSEQRISDQYRTLIKNNRIKEDRLQQIRHEVMLELNRTREENTVVNEPNIPIEAIEVNYNQPDVDNSTVESVHDAHADVSVIEDIFLKALNDFKAVDPTRRPYLPKQKMSRNLISATSFVNNTLLPKYLIETNDFLTFEAIVYCAAFTVCKYNGAKIFFNQNYKPRTQNIPTWQRRLQNRVQDLRKMIGRLTEYMKGNTSKKLNIHIEKIKEQYKIHSKHEQDNSSLIEFMDTLKQKLNLLANRLRRYKQTTLRKTQNTQFLNNEKVFYRKIDTSLDQTDTNIPTPEELHSFWSNIWAEPKTHIEGDWITQDKNNVKNITEMEFKEVDINILKTVINKTHNWKATGSDKIHNYWLKKFTYIHSYLLTHINNFIKNPNILPHYITTGITYMLPKDKNDPKNPGKYRPITCLQNIYKIITSCLSEIIHNHIEKNKILAEQQKGCRRRSQGCKEQLTIDAVATKQALSRKRNIYTMYIDYKKAYDSVPHSWLVYILEHYKIHPILIQFLKNTMAHWRTKLKLKQIESEEIRIRRGIFQGDSLSPLWFCLALNPLSTILNNTNKGFKIKHSNTSYTLSHLMYMDDIKLYGSNLKEIRTLAEITNTFSSDIQMEFGIDKCKTQSIRRAHIENNSFLTSTGEEIEPVDTDSGYKYLGYQQSRQIHHKQIKQTLTIKFRQRLNKILTTSLNSKNIIKAINTFAIPCLTYSFGIIHWSQTDLHKLQRIINTSMTRHRKHHPRSCIQRLTLPKLEGGRGLIDIRNLHNKQITTLRNFFFTQAQNSLLHKAVTQSDIKYTPLNLHDTEIQKNLNIIEPHQKFNTWLQKSLHGRHRHDLLSPHVDKQASNVWLKRGELFPETEGFMIAIQDQVIETRNYKKFIIHDKSLISDKCRHCHTTSETIQHITGACRSIAQTDYKHRHDQVAAIIHQYLAFKFKLITEKTSYYKYTPQTVLDSDKFKLYWDRTILTDKTIHHNRPDITLHDKMNKVVYLIDVAVPNTHNLTNTHTDKITKYTELSIELKSQWRVNTVKIVPIIISSTGVIPRILQDSLKILDIHPLTMILLQKATCYN

SEQ ID NO: 22697 - protein, 1358 aa, Ochlodes sylvanus
MKPLNTQSKNSKTKTFLNSTVKSMSYNRRSQSRSHQVISQADASCYAKQVDYRQGQATQQHRNHHEENEIVATNSTPSSPLSSTYSLFQSPSSSPHSFENQTISRSSTTSPMSVDVVQVANAKGPVPAIDTKRARKKWSVEINIFILRTYYEITKMETETGNYLIPLHNKFIERFPDMQVSRQRVGDQRRAIERNKLLPVDTINKIKEEVKLNLTDSPTQEPTQQVSNTSRMRWSSELNEFIIRSYLLITNLETDISSYRLPLKQAVTEKYPHLSHLSEQRISDQYRTLIKNNRIKEERLQQIRHEVILELNRIHQENSVLNQSSNISLEDIGVNYTQANMHNSMPETTHYHHQLNNTHVNGSVIEDTFLKALSDFKAVDPTQRPFLPKQKSSKNLTTTTHYVNTTLLPKYLTDTNDFATFETMVYCAAFTVCKCNGAKILSNHIYSPVTQNIPKWQRRLQNRIDELRKMIGRLTDHMRGNTSRRLNAHIEKIKEQYKIHSKYEKDNNNSLEIMDTLKQKLNLLANRLRRYKQTTLRKTQNTQFSNNEKLFYRTMNTSQQQNETNIPTSEQLHSYWSSLWTDPKTHTETDWINHDKETVKNIDRMAFEKIDINSLKTVIGKTHSWKATGSDKIHNYWFKKLTYIHPYLLTHINNFIRNPAELPQYITKGITYMLPKDAKDSSNPAKYRPITCLQNIYKIITSCITEIIYSHIDTNKILSEQQKGCRRKSQGCKEQLIIDAVASKQALTRKRNIYTMFIDYKKAYDSVPHSWLIYILEHYKIHPTLIQFLKVTMRQWSTRLKLKQIETEEILIRRGIFQGDSLSPLWFCLALNPLSTLLNNTNKGFKIKHSNTSYTLSHLMYMDDIKLYGSNLKELHKLAEITDKFSSDIQMEFGIEKCRIQSIHRGHTENNTFFTSAGEEIEPVDIVSGYKYLGYQQSRQIHHKQIKETLTTKFKQRVNKILNTALNSKNTIKAINTFAIPYLTYSFGIIRWSQTDLQKLQRIVNTSMTRHRKHHPRSCIQRLTLPKLEGGRGLIDIQNLHNKQITTLRNFFFKQAQNSFLHKAVTQSDIKYTPLNLHDTEAQRNQNINEPQQKLNNWLQKSLHGRHRRDLLSPHVDKQASNAWLKKGELFPETEGFMVAIQDQVIETRNYKKFIICDKTLISDKCRHCHTTSETIQHITGACRSIAQTDYKHRHDQVAAIVHQYLAFKFNLITDRISYYKYIPQAVLVSDKFKLYWDRTILTDKTVHHNRPDITLHDKINKVVYLIDVAIPNTHNLTSTHTDKITKYTELSIELKSQWRVTTVRTVPIIISTTGVIPRTLQDSLKILNIHPLTINLLQKATIINTCRIVRKFLNLDE

SEQ ID NO: 22698 - protein, 1363 aa, Alychna victa
MKKSKSKNSTVNSTVNLRPYNLRSQSESHRIMSQTEASCDSVQSGYREKESCEEQARHRRHNRFQEIDVNTINTNPSSPISSTHSLFQSPSSSPHSFENQTISRCSTVSPMSIDVVQEANAEHPVPATDPKCARKKWSIEMNIFILRTYYEITRMETDTSAYLLPLHNKFLECFPDMQVSRQRVGDQRRAIERSRLLPIDTINRIKEEVKSHMNTTEVSAVLSTQEHATEPVSNMTRMRWSTELNEFIVRSYLTITNLETNMTSYRLPLKQAVISRYPHLSHLTEQRISDQYRTLVKNNRIKEDRLQQIRHEVVLEINRIREENTIVNQSNISIQAINVNHTKPDVHNSVVESVHPHPQSNNSDVDGPVIEKIFLKALNDFKAVDPTSRPYLPKQKPSINLSKTTNFVNDTLLPKYMIEANDFSTFEAIVYCAAFTVCKYNGAKIFCSQNYTPRIQNIPKWQKRLQNRIQDLRKMIGRLTEYMKGNTSKKLNIHIEKIKEQYKIHSKHEQDNSSLIEFMDTLKQKLNLLANRLRRYKQTTLRKTQNTQFLHNEKVFYRTLDTPQDQTETNSPTPQELYSFWSSIWEKPKTHVEGDWITQDKETVKHIAEMEFEGININILKTVIGKTHNWKATGSDKIHNYWLKKFTYIHSHLLTHINNFIKNPNTLPHYITTGISYMLPKDKNDTKNPGKYRPITCLQNIYKIITSCLTEIIHSHIETNKILAEQQKGCRRRSQGCKEQLTIDAVATKQALSRKRNIYTMYIDYKKAYDSVPHSWLVYILEHYKIHPTLIQFLKNTMEHWSTRLKLKQIESEEIRIRRGIFQGDSLSPLWFCLALNPLSTILNKTNKGFKIKHSNTSYTLSHLMYMDDIKLYGSNRKEIETLAEITNTFSSNIQMEFGIEKCKIQSICRGRIKNNSFFTSNGEEIEPVDVDSGYKYLGYQQSRQIHHKQIKQTLTTKFRQRLNKILSTSLNSKNIAKAINTFAIPYLTYSFGIISWSQTDLQRLQCIINTSMTRHRKHHPRSCIQRLTLPKLEGGRGLIDIRNLHNKQITTLRNFFFTRAQNSSLHKAVTQSDIKYTPLNLHDTEIQKNQNIIEPHEKLNNWLQKSLHGRHRHDLLSPHVDKQASNVWLKRGELFPETEGFMVAIQDQVIETRNYRKFIIHDKTLVSDKCRHCHTTSETIQHITGACRSIAQTDYKHRHDQVAAIIHQYLALKLKLITEKTSYYKYTPQAVLDSKNFKLYWDRTILTDKTIHYNRPDITLHDKLNKLVYLIDVAIPNTHNLTSTHTEKITKYTELSIELKSQWRVNIVKTVPIVISTTGVIPRTLHDSLKTLNIHPLTFILLQKAAILNTCRIVRKFLSRVN

SEQ ID NO: 22699 - protein, 1372 aa, Calpodes ethlius
MKTTNKKCKNSQNIISPNSAVKLRSYNLRSQSTSHLVRSQTDASCNSVQVGYREEASCQGQVRRQYNNSQEGDINNINANPSSPISSTCSLFESPVSSPYSFEMQTISRSSTISPMSVDVVQEAHADKPAPTTDTKRARKKWSVEMNIFILRTYYEITKMETETCTYLIPLHNKFMERFPNMEVSRQRVGDQRRAIERNKLLPTDMISKIKEEVKTHLHITKASAITSTQDTATQEVSNRSRMRWSNELNEFIIKSYLTITNLETNTSSYRLPLKQAVIAKYPHLSHLSEQRISDQYRTLMKNKRIKEDRLEQIRHEVILEINRAEQENSAINQVSNISQENFEISTIQSFSDSNIQNTVLETTHSIQQSYDTHKNASFIEDIFLKAVNDFKTVDPTLRPYLPKQKQSRNLTATTNFVNTILIPKYLVDTNDFKLFETIVYCAAFTVCKYNGAKIRYTQNSTPRSQNIPKWQRRLQNRIEDIRKMIGRLTEYMKGNTSKRLNRQIEKIKEQYKIHSKFEQDNNNLIEFMDTLKQKLNLLANRLRRYKQTTLRKTQNTQFSNNEKLFYRTLETPKNDTDTNLPTPEQLHSFWSSIWMEPKIHVENDWIQQDKEIAKNIVEMKFQEIDINILRTVINKTHSWKATGSDKIHNYWFKKFTYIHLHLLTHINNFIRDPNTVPHYITKGITYMLPKDKTDSKNPAKYRPITCLQNIYKIITSCITELIQNHIESNRVLAEQQKGCRRRSQGCKEQLTIDAVTIKQALSRKRNIYTMFIDYKKAYDSVPHSWLIFILEHYKIHPTLIQFLKNVMEHWSTKLKLKQIETDEIMIRRGIFQGDSLSPLWFCLALNPLSTILNNTNKGFKIKYNNTSYSLSHLMYMDDIKLYGSNLKEIQTLAEITNTFSSDIKMEFGIEKCKIQSIRKGQIENNSVFTSNGEEIEPLNNFNGYKYLGYQQSRQIHHKQIKQTLTTKFKERIHKILKTSLNSKNIIKAINTFAIPYLTYSFGIITWSQSDLQKLQRIINTSMTRHRKHHPRSCIQRLTLPKVEGGRGLIDVRNLHNKQITTLRNFFFKQAQNSSLHKAVTQSDIKYTPLNLHDTEAQINQNIIEPQQKLNKWLEKSLHGRHRRDLLSANVDKQASNVWLKKGELFPETEGFMIAIQDQVIETRNYKKYIIQDKSLITDKCRHCHSTSETIQHITGACRSIAQTDYKHRHDQVAAIVHQYLAFKFKLITEKTSYYKYTPQTVLDSDKFKIYWDRTILTDKTIHHNRPDITLHDKINKVVYLIDVAIPNTHNLSNTHTEKITKYTDLSIELKSQWKVNTVKTVPIVISATGVVPRTLHDSLKILDIHPLTFILLQKATIINTCRIVRKFLSLV

SEQ ID NO: 22700 - protein, 1362 aa, Hesperia comma
MESLKTQSKKSTTKIFLNSTVKTRSYHLRSQTRSHRAMPQTDARCNSLQGGYREEVLCQEQAIKQHCNDHRENNIVATNSRPSSPTSSSYSLFESPSSSPHSFENQDTSRSSTISPISVDVVQVANAEEPAPATDTKRARKKWSVEMNIFILRTYYEITKMETDTCNYLIPLYNKFIERFPDMHVGRQRVGDQRRAIERNKLLAIDTISKIKEEVKLNLTDSVSSPTQQLSNTSRMRWSNELNEFIVRSYLTITSLETNISSYRLPLKQAVISKYPHLSHLSEQRISDQYRTLMKNNRIKEERLQEIRHEVILELNRTQQENSVINQTSNISLEDIEVNYTQSNINNSVTESPQYNHQPNDTHINGTVIEDTFLKALNDYKAIDPTQRPYLPKQKPSKTLTTTTDFVNTTLLPKYLKDTNDFKTFETILYCAGYTVCKCNGAKILSSDVRPPSIQNIPKWQRRLQNRIEELRKMIGRLTEHMKGNTSRRLNKHIEKIKEQYKIHSKYDKDNNSIVEILDTLKQKLNLLANRLRRYKKTTLRKTQNTQFLNNEKVFYRTLNSIQQQTDINIPTPEQLHSYWATLWTDPKTHTETDLIKQDNEIGKNIDLMTFEKIDINILKTVIGKTHSWKATGSDKIHNYWFKKFTHIHSYLLTHINNFIRNPDELPQYITRGLTYMLPKDIKDSKNPAKYRPITCLQNIYKIITSCIAEIIYSHIDRYKILSEQQKGCRRRSQGCKEQLIIDAVATKQALTRKRNIYTMFIDYQKAYDSVPHSWLIYILEHYKIHPTLVQFLQVTMRHWSTRLKLKHIETDEIPIRRGIFQGDSLSPLWFCLALNPLSTILNSTNKGFKIKQNNTSYTLSHLMYMDDIKLYGSNLKELHNLAEITQAFSSDIHMEFGIEKCRIQSINRGRTENNTFVTNNGEEIEPVDIVTGYKYLGYQQSRQIHHKQIKQTLTTKFKERVNRILNTSLNSKNTIKAINTFAIPYLTYSFGIIRWSQTDLHRLQRIINTSMTKHRKHHPRSCIQRLTLPNLEGGRGLIDIQNLHNKQISTLRNFFFKQSQISFLHKAVTQSDIKYTPLNLHDIETQKNQNIIEPQQKLDNWLQKSLHGRHRRDLLSPHVDKEASNAWLKKGELFPETEGFMVAIQDQVIETRNYKKFIVCDKTLISDKCRHCHTTSETIQHVTGACRSIAQTDYKHRHDQVAAIVHQYLAFKFKLITDKISYYKYTPQAVLDSDKFKLYWDRTILTDKTIHHNRPDITLHDKINKVVYLIDIAIPNTHNLTSTYTDKITKYAELSIELKSQWRVTTVKTVPIIISATGVIPRTLQDSLKILNIHPLTYILLQKATIINTCRIVRKFLNLEE

SEQ ID NO: 22701 - protein, 1358 aa, Nastra julia
MKATNSKYKLSINSNVNFRPYNLRSQSKSQLVMSQTDVSCHSTQIGYREEESCAEQVRQHYNNHGPVIDIVTLNSHSSSPTSSTRSIFQSPCSSPHSFENQTISRSSTLSPISVDVVQEANAEDPLPATDTKCARKKWSVEMNIFILRTYYEITKMETDTSAYLIPLHNKFIECFPYMQVSRQRVGDQRRAIERSNLLPLNTINRIKDEVKAQLNVEETNIAVSLASNHNTQAVSNTKRMRWSTELNEFIVRSYLKITNLETNMSSYRLPLQQAVISKYPHLSHLSEQRISDQYRTLIRNQRIKEDRLQQIRHEVMLELNRIREENTVLNQSNMPIVDIEVHNNHPDAHNSTVESVPNTQLDGSVIEDIFLKAFRDFKAVDPIRRPYLPKQKLSKNLISATNFVNSTLLPKYLNDTNDFITFEAIVYCAAFTVCKYNGAKIFCNQNSMPRTQNIPKWQRRLQNRIKDLRQMIGRLTEYMKGNTSKKLNTHIDKIKEQYKIHSKHEQDNSSLVEFMDTLKQKLNLLANRLRRYKQTTLRKTQNTQFLNNEKLFYRQLDVSQDVANTTIPTVEELHSFWSNIWAEPKTHIGGDWITQDKDTVKNITEMEFKEVDISILKTVITKTHNWKATGSDKIHNFWLKKFTYIHSFLLTHINNFIKNPSLLPDYITTGITYMLPKDKNDPGNPGKYRPITCLQNIYKIITSCLTEVIYNHIEKNKILADQQKGCRRRSQGCKEQLIIDAVAMKQALNRKRNIYTMYIDYKKAYDSVPHSWLVYILEHYKIHPTLIQFLKSTMEHWSTRLKLKEIESEEIRIRRGIFQGDSLSPLWFCLALNPLSTLLNNTNKGFKIRYSNTSYTLSHLMYMDDIKLYGSSLKEIESLAEITNTFSSHIQMEFGIEKCKMQSIHRGHIKNNSFITSNGEKIDPVDTDSGYKYLGYEQSRQIHHKKIKHTLTTKFRQRLNKILTTCLNSKNTLKAINAFAIPCLTYSFGIINWSQTDLQKLQCIINTRMTGHRKHHPRSCVQRLTLPKLEGGRGLIDIRNLHNKQITTLRNFFFSQSQNSLLHQAVTQSDIKYTPLNLHDTGIQKNQNIIEPHEKFNNWLQKSLHGRHRHDLLSPHVDKQASNIWLKRGELFPETEGFMIAIQDQVIETRNYKKFIIRDKNLISDKCRHCHTTSETIQHITGACRSIAQTDYKHRHDQVAAIVHQYLAFRFNLITEKTSYYKYTPQAVLDSNKFKLYWDRTILTDKTIHHNRPDITLHDKINKVVYLIDVAVPNTHNLTNTHTEKITKYTELSIELKSQWRVNTVKTVPIIISTTGVIPRTLHDSLKTLNIHPSILILLQKATIINTCRIVRKFLSID

SEQ ID NO: 22702 - protein, 1367 aa, Notocrypta feisthamelii
MSLAYRGNNMKSSNIKNKFIGSTVKTRSYNLRSHSGQLTLNSDTSLHTMQNCHSTEAPCQEQTRQQHQNSDIITTNSNSSSPTSSTYSLFQSPSSSPHSFERLTRSRSSTVTPMPVDVVQMANAKQSAPDTGTKCVRKKWTPEINIFILRAYYETTRMETETNNYLTPLYNKFIEHFPDMQVSKQRLGDQRRAIERNKLVPIHTIRKIREEVESQISLTKSSITSPIQEFSSQMTSNTSRMRWSNEINEFIVRSYLTITNLEMNITSYRQPLKQAVISRYPQLSHLSEQRISDQYRAIIRSNRIKEDKLAQIKHEVILELNRIQEENIAANPYSNISPNNTDVENTQNDTDNFSVLESAHLHHSSDNTHTNKSVIEDLFLKALSDFRGVDPTNRPYLPKQKPSKNLTTTTNFVNTTLLPKYLVNTNDFSTFEVIVYCAAFTVCKYNGAKITLTPDYTARSINIPKWQTRLQNRILELRKMIGRVTEYMNGNTSKKLSSHVDKIKLQYKQHATYEQDNNSLMQILDTLKQKLNLLANRLRRYKKTTLRKLQNKQFTNNEKVFYRTLDTSHCQTDRNTPTAEQLHSFWSNIWSEPKTHTIGDWIKQDKEIVMNIQEMKFNEIDMDILKTVIAKTHSWKATGSDKIHNYWFKKFTYIHSHLLNYINNFIKNPDTLPTHITKGVTYMLPKDKEDTENPAKYRPITCLQNIYKIITSCITEIIYNHIDAYKILAQQQKGCRKRSQGCKEQLIIDAVATKQALSRKRNIYTMYIDYKKAYDSVPHSWLIFILQHYKIHPSLINFLTNTMEKWSTKLKLKQIETEEIHIRRGIFQGDSLSPLWFCLALNPLSTLLNKTNKGFKIKHNSIHYTLSHLLYMDDIKLYGSNLKDIHKLADITQTFSSDIQMEFGIEKCKIQSIHRGHLQNNNFITCTGEEIEPVDSDSGYKYLGFQQSRQIHHKEIKQTLIAKFKQRLHKILNTALNSKNIAKAINTFAIPLLTYSFGIIRWTQTDLTKLQRIVNTSMTKHRKHHPRSCIQRLTLPKLEGGRGLIDIQNLHNRQITILRNYFFQQAPSSPLHNAVIQSDVKYTPLNLHDTEIQKNQNIIEHQQKHDDWLQKSLHGRHRRDLINPHIDKQGSNIWLKKGELFPETEGFMVAIQDQVIETRNYKKFIVRDNTVSDQCRHCHATSETIQHITGACRSIAQTDYKHRHDQVAAIIHQYLAFKLKLITTKTAYYKYIPQAVLDSDKFKLYWDRTILTDKTVYHNRPDITFHDKINKAVYLIDIAVPNTHNLINTYTEKITKYTELSIELKSQWKVKTVKTVPIVISSTGIIPRTLHDSLKILNIHPLTFILLQKATILNTCRIVRKFLNMDM

SEQ ID NO: 22703 - protein, 1335 aa, Haemactis sanguinalis
MKSTKSFNTKNNIRDLGTRSKIYNLRPLSKTDKINTLAQNNDNSYNSNTNTNSPSSTSSLFESSILSLNSYEELSSRASRKTSRSDSVVQVANANNPTPVIGTSSVRKKWSNDMNIFILRTYYEVTKIETDIKNYLTPLYNKFIEKFPDMQVSKQRVGDQRRAIVRNGLLSVKIIDQIKNEVKITIKSNEYTLSTDNLEGQIGPKTARIRWSNEINEYILYSYYKITDLEKNVTGYRPLLKHAVITKFPCLSHLTEQRISDQYRVIIKNKMIDENIIQAIRDKIALESNFTDNENTQDTLQDVPFIALESSNSQTNSFNNSINVEKHNCAQMYTTPSNTLEIEEIFNTSLKQFSKTNPTQRPYIPRQKTSKMLTNITHYINTVILPKHLKDISDFQDLQTLIYCAAFTICTCNGSKMNFNAGRQPVAKIIPKWQLRLQNRVRDLRIMLGRLTEYIKGNKSKKLSYHVQKIRQQYKTHAKYEKDNTDLTQFMDTLKQKLSLISNRLRRYKNTTLRKTQNAQFNNNEKLFYRSLDSNDNKQNDIKTPTQEQLHTYWSKIWANPTYHTEGNWIKPDKILTQNISEMQFQKIDKNLLQNVISRTHNWKTPGSDNIHNYWFKKLTSLHPNLLIYVNKFIDNPESLPLYITKGVTFMLPKDKTDTQNPAKYRPITCLQTLYKIITACITELIHKHIEAHSILSEQQKGCRRGSQGCKEQLTIDAIASKQALTRKRNIYTMYIDYKKAYDSIPHSWLIFILEHYKIHPTIIRFLKNTMTKWNTVLKMNNIETEKIYIRRGIFQGDSLSPLWFCLALNPLSAALNNSNLGYKIKYNNTSYTLSHLMYMDDIKLYGSTSYQIDKLATITQTFSADIHMEFGIEKCKVLSVRRGHIISNSFNTLAGEVIEPVDFDCGYKYLGYQQSRQIHHKIIKLQILEKFKNRLKKILSTALNAKNITKSINTFAISYLTYSFGIIKWSQTELKTIQRIINTNMTKYRNHHPRSCMQRLTLPKVEGGRGILDIRNIHNSQITNLRKFFRIRAQNSPLHNAIVQSDQNFTPLNLHDNSNQKNETIVDSQQKLDDWLKKSLHGRHRRDLINPLIDKHASNAWLKRGELFPETEGFMLAIQDQVIETRNYRKFIIRDNSVSDQCRHCHIASETIQHITGACRSITQTDYKHRHDQVAAIIHQYLALKYTLISEKTSYYKYVPQSVLDSNSFKLYWDRTILTDKTVHSNRPDITLHDKINKIVYLIDIAVPNTHNLTSTYKEKTIKYTDLSIELKKQWKVKKVKTVPIVISATGVVPKTLRDSLEILNIPCLTYILLQKACIINTCRIVRKFLSLES

SEQ ID NO: 22704 - protein, 1441 aa, Cephise aelius
MDAWLRGSSVANGPSSKQGELEEYIALLQHAGLCWSRPSYSLANRGNNMKGNFKNKKDKNILHRDSAVPTRTYNLRPLTEGRRARIKTNIACSPKLSGDNAECDRQATEACNKQQNDVITTSNASSPIPSSHSLFESPRSSPQSFEYLPTSRSVTVTPMSVDVAQEANAIKPVPATATKCARKKWSVEMNIFILRTYYEVTKMETDISTYLMPLHNKFIEQFPHMQVSRQRVGDQRRAIERNHLLSLHTINQIKEEVKTKLNTIESLNNTSKYNQITSVGSGATRMKWNNEMNEFIIHSYFTITRLETNVTAYRQQLKQVFITKYPNLSHLSEQRISDQYRAIIKNKMIEDDRLQEIKDEVLIELNKIEQEQSQILSTQQPTHSSIENKLTQIHTSTYNHTATHTTTAPVTPINDAETSLQNVGNMETDNTSHNQMNFNHLNGSEIENIFVKALHNFKSIEPTHRPYIPKQRPSRKLVMITHYVNSELLPKYLIDVGEFNKFETILYSAAFTVCTYNGAKISSTSGETLYSSNIPKWQIRLQKRIKDLRAKIGRLTEYMRGNKSRKLNIHIEQIKLQYKIHSKYENENNDLVQFMDTLKQKLNLLSNRLRRYKQTTLRKCQNKQFINNEKLFYRSLDNVHRNSQTNTHTPTSEELHTYWSSIWTKPTNHTEGEWIKQDKKIVENIREMQFEEIDIDLLKNVIAKTHNWKAAGSDRIHNYWFKKFTQLHPHLLTYINNFIKTPNSLPNYLTEGVTYMLPKDKDDTKNPAKYRPITCLQNLYKIITACISELIHKHIHTYNILAEEQKGCRRGSQGCKEQLTIDAVVAKQALTRKRNIYTMYIDYKKAYDSIPHSWLVYILEHYKIHPAIVQFLKNTMSNWRTALKLNQIETAQISIRRGIFQGDSLSPLWFCLALNPLSNALNTSYIGYKIKHNNTYYTLSHLLYMDDIKLYGSNLKDIHKLADITQSFSSDIRMEFGIDKCRVQSIHRGRLENNSYYTVTGEEVEPVDAETGYKYLGYQQSRQIHYKETKKLLTDKFKGRLNKIFNTSLNSKNTIKAVNTYAVTLLTYSFGIIRWSQTDLKRLQRIINTSMTKHRRHHPRSCTQRLTLPKLEGGRGLIDLRNLHNKQITSLRSFFHTQAQQSPLHRAVTQTDMKYTPLNLHDNSMQKNQIIIEPTQKIDEWLQKSLHGRHRRDLINPHVDKRASNTWLDRGELFPETEGFMLAIQDQVIETRNYRKFIIHDNTLVSDQCRHCHGASETIQHITSACRSISQTDYKHRHDQVAAIIHQYLALKYKLVNEKLPYYKYTPQAVIESDKFKLYWDRTILTDRTIHHNRPDITLHDKINRIVYLIDVAVPNTHNLTSTYTEKITKYTDLSIELKSQWKVKTVKTVPIIISATGVIPITLRTSLNALNIHYLTYIILQKAVIINTCRIVRKFMSLDE

SEQ ID NO: 22705 - protein, 1385 aa, Cephise aelius
MKNNVKNKKDKNILHRDSAVPTRTYNLRPLRGGRRARIKSNTACSTIASDDNADSPETYKQQDVVSLISNPSSPIASSHSLFESPRSSPQSFEYPSTPRSATVTPMSVDVVQEANAIKPVPTTATKCARKKWSVEMNIFILRTYYEVTKMEKDIRTYLIPLHNKFLEQFPHMQVSRQRVGDQRRAIERNHLLPEHTINKIKEEVRTHLRSVEPVNDTSTSDQITPISLNTTRMRWNNEINEFIIRSYLTITKLETNLSAYRQPLKQAFIVKYPHLSHLSEQRISDQYRAILKNKMIKDDRLQEIRDEVLIELNKVEQEMSQISHTQQPTHSPIRNILTQPHTPVHAHTSTHNTITPMTHTESNVQNVGNTGTDITYHNQLNFHNLNGVEIEHIFVKALHNYKTVEPTKRPYIPKQRPSRKLAIITQYVNSELLPKYLIGVSEFSEFETILYSAAFTVCTYNGAKILTTTGNTVNSPNIPKWQIRLQNRIQDLRTKIGRLTEYMRGNTSRKLNTHIEKIKVQYKIHSKHENENSDLVQFMDTLKQKLNLFSNRLRRYKQTTLRKYQNKQFINNEKLFYRTLDTAHCNSQTDIDTPTPKELHTYWSNIWTNSRNHTEGEWLKQDKKIVENIPEMQFEEIDIDLLKAVISKTHNWKAPGSDRIHNYWFKKFTYIHPHLVTHINNFIKKPDSLPKYVTEGVTYMLPKDKNDTKNPAKYRPITCLQNLYKIITSCITELIHKHINTHNILAEEQKGCRRESQGCKEQLTIDAVATKQALTRKRNIYTMYIDYKKAYDSIPHSWLVYILQHYKVHPVLILFLKNIMANWRTALKLNRIETALINIRRGIFQGDSLSPLWFCLALNPLSTALNASNTGYKIKHNDSSYTLSHLLYMDDIKLYGGNLKDIHKLADITQSFSSDIHMEFGIDKCRIQSIHRGRLEHNSYYTVTGEEVEPVDNETGYKYLGYQQSRQIHYKETKKLLTDQFKGRLHKILNTALNSKNTIKAVNTYAVPLLTYSFGIIRWSQTDLKRLQRIINTSMTKHRKHHPRSCTQRLTLPKLEGGRGLIDLQNLHNKQITSLRHFFHKRAQQSPLHKAVTQADIKYTPLNLHDDSTQKNQTITEPKQKLDEWLQKSLHGRHRRDLINPHVDKHASNTWLKRGELFPETEGFMLAIQDQVIETRNYKKFIIRDNTLVSDQCRHCHGASETIQHITSACRAVSQTDYKHRHDQVAAIIHQYLALKFKLVHEKLPYYKYTPQAVIESDKFKLYWDRTILTDKTIHHNRPDITLHDKINRIVYLIDIAVPNTHNLTNTYTEKVTKYTDLSIELKSQWKVKAVKTVPIIISTTGIIPKTLHDSLNTLNINYFTYILLQKAVIINTCRIVRKFLSLDE

SEQ ID NO: 22706 - protein, 1175 aa, Sycophila sp.
MARNIDGEPATKVVEEGINIVVLLPVRDTDSLVCPACPSIRPGRYAGTRKVENLIRHIKEHHPSAEHTFRCWRCGFVADNNIKYPRKEVNKHTTGCVPEIAAGQPADAARRATIRRRIGATSSPPTTPMHRRQNIGRRAAPPPPVREVSPQPITEVAVPATTAVDSSDEEVFLSPTASPTATVHSGERRASPSSPSTPPSVPLGAPRVSPLSDELRPPEGTQDPSPEPTQTPPEPRTPVATAPRAVPPSSATPRPEAGQTRGQPGEATRPPAEVPGSRRRNNTERRRLVTQLNQVCSPEQLEEVTPGVMRYLARMAGRQPGGPQRASARRGPQRAENRHVPRARASDRMREATRLQRLFRNNRKRAVQEILAGPTTTCHIPLATIEQHFGALAAPRDAGEEWPNVFDQEAPTAASNEALSRPFTREEVMDRLKSRSNSAPGPDGLKYSDLRRADTGAHVLAALFNAIWRTEAVPTSWKESHTILLYKKGDPSDVSNWRPISLGDTVPKLFAAVFAERLKRWAVTNGRFSDTQKGFLEFEGCFEHNYVLQEVLRDAKRRRREVVVAWLDFSSAFTSVPHSSLFKALDRHGLPQRPMNILKALYSGMTTRFKVADALSGPILMRSGVRQGCPICPCAFNLALEVVLRGIAQSGRGYVIDDRLHNTLAYADDVAVMADSPEGMRILLDAAERGAEAIGLSYNPSKCATLHISAEGEVLSTCFAVQNQPVKALGPGESYEHLGIPTGFQIKQTPISTIAGLLNDIRAIDQSGLAPWQKLEAVGTFLLPRLDFILQGASVEKEYLSEADKVIKKLAKSWLNLPQRASAEMVFLPSHRGGGGLLPLADLGDLLTVAHAFKMLSAKDRTVRGLAESSLRRVTSERLRKRASNIDMARYLSEELQLPRSCSLTSYWSKVRSAVSRLNTKLRLRWLWSSREAEFWIQCGDPNSPGHTILEPQEARRTVSALRRCLVQYYEGTLLAKQDQGKVYEVTRRNAVSNHFLRTGRFTRFCDWRFIHRARLDVVPLNATKRWLIGNDKRCRRCGGDLETLPHVLNHCSSYSAARTKRHNSVQDRLVKAARCPGIVRVNRTVEGAHGPAAALRPDIVIRDDVSRRITLIDVAIPFENRLEGFHQARQRKLVKYQPLADQLTGLGYVVRVEAFIVGALGGWDPANDHLIWEA

SEQ ID NO: 22707 - protein, 1074 aa, Bostrychus sinensis
MDWLIVGQPTWADHPPGFVVLVTIDTNDEISPGVSTSEYSSTQEGRRSYACDICGKICKSGAGLSKHRTVHADDGRHDGVNSVVSRNFACSVCSRLFDTKVGLSQHLRLSHPVEDNTHKLSHMKISGTRWSKQECDSLLRIANELTASCSSQIQLYRALQPHFPGRSISSIKTRLLTLRRNASLVAAVNNAETTTNESVSSLMSPSNLHSAWFSRMVDFVVGQLESCDEPRLHSSELLSFAKGLQCGAFTQEQVLSLLNLHAINTFPHTWTMISRRRKRNAGRVLTNRKQIRRANYAALQTTYHHRRKDAALSVLSGSWKDGYKTDRGLPSDSYTYWCDILSKPAHDDKRPGRNVLPCNWDLVDPISGDEVKSALKCMGNTAAGLDKLLPKDLKNMNADVLAAYFNLLLLAEGCPPHLCRSRITLTPKVNQPASPSDLRPISVSSVIVRCFHKILASRWNASLKLPSLQFAFLQRDGCLEATSLLHALFRHSSSTASSLALAFIDVSKAFDSISHDTIIRSASAFGAPPPLLHYLTESYKHSVAILPNIEAKCQRGVKQGDPLSPLLFIMAMDEVISSARPELGYQFHESLVDGFAYADDLILMAENTTRLKEKLQSASTALEHAGMQINAKKTKIVTIAQNRKLHMTALNDEALILNDQTISSLAPTDQFTYLGIPFTWKGKAKINHRLELQRMLLEIRRAPLKPYQRMEILKFHLIPKLTHSLVLGQAHRNTIKRMDTCIRQAVRSWLRLPNNTPTSYFHAEILKGGIGVPCLATTVPFMKRSRFDKLLATECPVLRHVVNDQSFGPTLRNINVSVRVQNVSVSNKNEALATWTEKLYSSVDGRGLQDVVNSPLSYRWLTHPRSIYPRVYIRAIQLRCNLLRTKVRDARGRHGEVTTTCRGNCGQPEGISHILQSCWITHDGRCARHNRVAKQLAKKMRSAGYAVYEELRVPTAHSFMKPDLIAVKDEIATILDVSIVSDGRSATAWSEKVEKYGADAPLSAIQSALSSLGHQIKRISNQPVILSYRGICFHKSVRALILLGLPRHTIEDLSLMTIKGSLAIYDLFMRGTWR

SEQ ID NO: 22708 - protein, 1168 aa, Matsumurasca onukii
MAGSSTSSTNTVTFSYPWVASMCTLCPAWFTKAADMARHFSEEHVGVELKFKCAKCSGLYVSLRGVAIHHGKCLGPRADDPGPVQCPHCTRRFKTSRACTLHKNVAHPDARDEERLAPAQPPVRRGPYGSKGCLWSPEEDEILMRLYRDYDPAQGAGMGYGAFIALSLPRKTALQVRSRVRILKSNGSLAGGPGAPGDPDGGDSEGDSSSSDSAPASPAGPAGSSSSSDEGEPVGPPLGAVSALATPEVHIGAVHANVFSPDLNDLVSQILDDSQPAGEGSPVLPNVPLPAPSPPPPARPFAELWSDIMDQVRAVVGLCPIGVRLVELAGREGDITGDLNRLVCELQNAICDRQPPRVVVQRPRGSGGGRRLQRTQQRVARFARTQDMFKRNPSRLAELVVKNELDELNGQDAGVAAPPPGCVDLYEQLWGVGAPCSFQPDQLRPTALDSRVQPFRVDEVLRKVRGWAPGSAPGLDGVTKRGLMAYPHFAGTLSVLFNIVLFRGVYPACWLANRTTLIPKSGKDPLQPGNWRPITIAPLLARVYSSCVQHRILQFVELNERQKGFRPGNGCAANSKILAEVIRRGKRSSMVGVLLDVAKAFDTVSHEAIGRVLVAQGVPDVLCSTVAGMYTGAHTSLGGDSGSVVRLLRGVKQGDPLSPLLFNLVLDPLLRRLESGEVGFKIGNALLSALAYADDLVLFAADSKGMEQMLGQVSSYLSSVGMALSLPKCLAFGVERMGDAWVSRVPELSLDGQVLRGVRAAEPFTYLGVTFTLAKGFSNKQALLDLEGSAVRIARLSLKPQQKVTLLMQYVLPIFSHRLSIDPPSANDLSRVDRTLRGSVKRMLHLQECTADGLLYARKRDGGLGLPHLTTQLGVTALKVWLDFLSSADPVVGELRVDAGWDAQMRALAGRVGLRLPATARDVDQVKRRWKAKFHRDWSQLVWQGQGVEQFRDDPLGNSWLLDPDTLQPGLFIDALKMRSNTCGLRTSMRHADQTLPAFCRRCRVLPESLGHVLGQCTHGRQSRIGRHDALVRKVADALVDEGTVIAREQTFQTTDRGPLRPDLVVKKRDSVYVVDVTVRYENDASLAEAALEKSTKYQGLLPALRGEFQVTKGEVIPVVLGSRGAIPHATISGLRKLGLTRSGFLKSLSLTALRTSIELVRQHLDYG

SEQ ID NO: 22709 - protein, 1205 aa, Archegozetes longisetosus
MAGNDSCGEGPEKDLIRTVGMSSDDPEIMDLFGLSEGTVSTRVLEGATVVEREQDRRVSDNEYSVPAKGAARRCAELSGSYDESDMVVGTGRSDVAGGSSGYVRRNGVPTTTIVLAVEEEGSREDYKGTKRPQVPGAGQSQAGACGGANFGCTLCGKDFFSSRGLGVHTRSQHRDEWNRQKELRIQDHKPRNIWTEEELMRLAENVHGLSWSERRDKMASLLPLFPGRNQNSIDRACYDPGYKRAVEVLNRRLAQAKPVASHQGLTLETGGMGSSNDGSGVTEDEGDNADIFKHHLEGLLFEISLGEASAFSDVLRELINGGGTLDSLLEALTDLMPPKPTSKKTVSGGRRDDRPKPSRKRVILERGQRPHKSANERCRTHVSSARLRRQSDIKSSYAAHQQMWKKSKGTLWQYLETGFPGKVKVSLDAATQYWKAYFEKPSVTDDQLPMSLGDGSGVWRPLSEEEVTEAIRKQRGKAVGPDEVDYFQLRGVPINCVLAFLNACMWHKTVPERLKKNRTVLIPKKGESSDPADYRPITVGSTIVRVLHCVLASRLSSVLRFHHTQRGFVKADGCLENVTLLDWVIRNTCRRNKRLYILLLDIAKAFDTVSRHSIIRSCKCFGLHRDMTQYIDNVMTGSSTRLNIGGELSEEEIMMTVGVKQGDPLSPLLFNMVMDELLRTLPTNIGIDIGDGHKVCSQAFADDLALEAESEDEMNALIKFCVDFLERKGMSINPSKCVLMCRISAPGLQISALRKTHKIRINGSEPRCIFNQSDLFKYLGIQFNPNGKLSPCVATVRRKLGWIESAPLKPEQKLYFVRQHLIPSILHEAVLGRINARLLEQWDAEIRDFVKRCCYLPRWSIDGLFYMPVNKGGLGITNLRFAVPQMLLTRIDKLGRSDNPMILQWLRTEECRTLKRKLHALLNVTYKDQTYLLTSAQAACKYWSDRAGGTADGRGVAEYANCPVGNRWLLGYSKVLQGKVFNRAVQLRFNALPCGANARRHLRTARPNQSEGSFAPCRYRCNKNETIAHITQSCYYTKRCLTQERHDALVTDIVTYLSKRGFTVHKEKTFPSSQGRRRPDIVCVNGGKIYILDVTCPFERISPLSADGCFKRSYYAAEDFHSAVRNYVDMPEARVEAFGLVFGARGAVARETFEVLTRVFSVPAERVNLWAELTIFRTLKVYRHFMRGDNFHRTSGRAIYKNRDH

SEQ ID NO: 22710 - protein, 1214 aa, Archegozetes longisetosus
MAGNDSCGEGPGKDPIRRVGMSSDNPEIMDLFGLSEGTVSIRVSEGAHVSDRERKQLVFDDKYSVLAGGAARCAEPVGSYDESAKVVGAVDSDVVGGSSGYVRRNGVPTTTIVLAVEEEGSREDYVGTQRPQVPGAGQSQAGACGGGNFVCTLCGKDFSSSRGLGIHTRSQHKDEWNRQKELRIQHHKPRNIWTEEEFMRLAENVHGMSWSERRDKMASLLPLFPGRNQNSIDRACYDPGYKRAVEVLIRRLAQAEPVVLHQGLTLETGGMGSSNDGSGVTEDEGVNADTFKHHLEGLLFEISLEEASAFSDVLHNLINGGSTIDSLLEALIDLMPPKPASKKTVSGGRRDDRPKPSRKRVILERGQRSQKSANVRCRTHVSSARSRRQSDGKSSYAAHQQMWKKSKGTLWQYLETGFPGKVKVSLDAATQYWKSYFEKPSVTDDQVPMSLGDGSGVWRPLSEEEVTEAIRKQRGKAVGPDGLDYFQLRGAPTNCVLAFLNACMWLKTVPERLKKNRTVLIPKKGESSDPADYRPITVGSIIVRVLHCILASRLSSVLRFHHTQRGFVKADGCLENVTLLDWVIRNTCRRNKRLYILLLDIAKAFDTVSRHSIIRSCKCFGLHKDMIQYIDNVMTGSSTRLNIGGELSEEEIMMTVGVKQGDPLSPLLFNMVIDELLRTLPTNIGIDIGDGHKVCSQAFADDLALEAESEDEMNALIKLCVDFLERKGMSINPSKCVLMCRISAPGLQISALRKTHRIRINGSEPRCIFNQSDLFKYLGIQFNPNGKLSPCVATVRRKLGWIESAPLKPEQKLYFVRQHLIPSILHEAVLGRINARLLEQWDAEIRDFVKRCCYLPRWSIDGLFYMPVSKGGLGITNLRFAVPQMLLTRIDKLGRSDNPMILQWLKTEECRTLKCKLHALLHVTYKDQTYLLTSAQAACKYWSDRAGGTADGRGVAEYANCPVGNRWLLGYSKVLRGKVFNRAVQLRFNALPCGANARRHLRTARPDQSEDSFAPCRYRCNKNETIAHITQSCYYTKRCLTQERHDALVTDIVTYLSKRGFTVHKEKTFPSSQGRRRPDIVCVNGGKIYVLDVTCPFERISPLSADGCFKRSYYAAEDFHSAVRNYVDMPEARVEAFGLVFGARGAVARETFEVLTRVFSVPAERVNLWAELTVFRTLKVYRHFMRGDNFHRTGGRAIYKNRDHWFFLNPFHNS

SEQ ID NO: 22711 - protein, 921 aa, Lytechinus variegatus
MAQLRAEKKSLRRRWRQADEVERASLKELYEDLKKRYTDVRRAEYLNKKRKRREKQRKDFYRNPYKFAKRLFGEGASGNLEVPKEELERHLRETYCDERREEPFVELPGLVRPQEPEICFDLGELRLWEVDGVVKKARAGSAAGQNGLSYKLFKYCPRVRRVLWQILRVLWRKRIVPGSWCLAEGVYIPKEKDAKGIGQFRPISLLNVDGKILFSVLARRLTDFVMKNRFVDTSVQKAGVPGFPGCLEHVQMIWESIQRCKREKKDVDVIWLDLANAYGSVPHRYLSFALDIFWVPKVIQELVQSYYSQFKMRFTTRTYTTEWQALEVGIPMGCPVSPLLFVLGMEVLTRRVSSEIEGLTLAGEVVVPSVRAFMDDLTIVSSNESQVDKGLHRLEEMVGWTKMRFKAKKSRSVSLRKGKVVEKRFRIGNEDIPQVSEKGVKSLGRWYEDKLNDRHRGMQIYDKVVEWLKKVDRTLIPGNAKVWCCQYGLLPRIMWQLQVYEVAVSRVEKMQQKMNSFYRKWLGVPRMLTDVALYCRTGKLRLPMASVVEEYKAGKVRLVMMMRESKDQTIAESRPPIRTGRKWKAEEATDEAVAMAKWKEMRGAVQVGRSGIGYRPGMRWYSKQGRKGRRDLVVEAVKEKEEECRMAKAAQQGVQGAWTRWEEVEQKKVSWDQLRTMASGAVRFMISSTFDVLPTPVNLKRWGCAEDDICKVCRKARGSLEHVLSACGGLLQTYTWRHNQVLKEMGALARAAIEARKKNGPPRVRGIEFVKKGARCRKTRQRQGVGGLLAVADDWEVRVDEGNRTMPEEVVVTALRPDMVLVARSARKVVMVELTVPWETRIEEARERKMDKYASLKQECEQNGWGAEVHTVEVGCRGFAGVSARRWIRAMGFSGREGEKWVRRMCGAAETGSAWVIQKAV

SEQ ID NO: 22712 - protein, 921 aa, Lytechinus variegatus
MAQLRAENKSLRRRWRQADEVERASLKELYEDLKKRYTDVRRAEYLNKKRKRREKQRKDFYRNPYKFAKRLFGEGASGNLEVPKEELERHLRETYCDKRREEPFVELPGLVRPQEPEVCFDLGELRLWEVDGVVKKARAGSAAGQNGLSYKLFKYCPRVRRVLWQILRVLWRKRIVPGSWCLAEGVYIPKEKDAKGISQFRPISLLNVDGKILFSVLARRLTDFVMKNRFVDTSVQKAGVPGFPGCLEHVQMIWESIQRCKREKKDVDVIWLDLANAYGSVPHRYLSFALDFFWVPKVIQELVQSYYSQFKMRFTTRTYTTEWQALEVGIPMGCPVSPLLFVLGMEVLTRRVSSEIEGLTLAGEVVVPSVRAFMDDLTIVSSNESQVDKGLHRLEEMVGWTKMRFKAKKSRSVSLRKGKVVEKRFRIGNEDIPQVSEKGVKSLGRWYEDKLNDRHRGMQIYDKVVEWLKKVDRTLIPGNAKVWCCQYGLLPRIMWQLQVYEVAVSRVEKMQQKMNSFYRKWLGVPRMLTDVALYCRTGKLRLPMTSVVEEYKAGKVRLVMMMRESKDQTIADSRPPIRTGRKWKAEEATDEAVAMAKWKEMRGAVQVGRSGIGYRPGMRWYSKQGRKGRRDLVVEAVKEKEEECRLAKAAQQGVQGAWTRWEEVEQKKVSWDQLRTMSSGAVRFMISSTFDVLPTPVNLKRWGCAEDDSCKVCRKARGSLEHVLSACGGLLQTYTWRHNQVLKEMGALARAAIEARKKNGPPRVRGIEFVKKGTRFRKTRQRQGVGGLLAVADDWEVRVDEGNRTMPEEVVVTALRPDMVLVARSARKIVMVELTVPWETRIEEARERKMDKYASLKQECEQNGWGAEVHTVEVGCRGFAGVSARRWIRAMGFSGREGEKWVRRMCGAAETGSAWVIQKAV

SEQ ID NO: 22713 - protein, 1045 aa, Lytechinus variegatus
MRCGVMAVERDCTSAELGETVGGPGQVLDHSASDPQRALHAGLERKEPIAWPPANSDKWKLLDSKLGRVLEVELLGDVEKKMRMFEGLCYELCAEEFGIRPVGDSGERRGEDTNSKPETRRQRLMAQLRAEKKSLRRRWRQADEVERASLKELYEDLKKRYTDVRRAEYLNKKRKRREKQRKDFYRNPYKFAKRLFGEGASGNLEVPKEELERHLRETYCDERREEPFVELPGLVRPQEPEICFDLGEVRLWEVDGVVKKARAGSAAGQNGLSYKLFKYCPRVRRVLWQILRVLWRKRIVPGSWCLAEGVYIPKEKDAKGIGQFRPISLLNVDGKILFSVLARRLTDFVMKNRFVDTSVQKAGVPGFPGCLEHVQMIWESIQRCKREKKDVDVIWLDLANAYGSVPHRYLSFALDFFWVPKVIQELVQSYYSQFKMRFTTRTYTTEWQALEVGIPMGCPVSPLLFVLGMEVLTRRVSSEIEGLTLAGEVVVPSVRAFMDDLTIVSSNESQVDKGLHRLEEMVGWTKMRFKAKKSRSVSLRKGKVVEKRFRIGNEDIPQVSEKGVKSLGRWYEDKLNDRHRGMQIYDKVVEWLKKVDRTLIPGNAKVWCCQYGLLPRIMWQLQVYEVAVSRVEKMQQKMNSFYRKWLGVPRMLTDVALYCRTGKLRLPMASVVEEYKAGKARLVMMLRESKDQTIADSRPPIRTGRKWKAEEATDEAVAMAKWKEMRGAVQVGRSGIGYRPGMRWYSKQGRKGRRDLVVEAVKEKEEECRMAKAAQQGVQGAWTRWEEVEQKKVSWDQLRTMSSGAVRFMISSTFDVLPTPVNLKRWGCAEDDSCKVCRKARGSLEHVLSACGGLLQTYTWRHNQVLKEMGALARAAIEARKKNGPPRVRGIEFVKKGARCRKTRQRQGVGGLLAVADDWEVRVDEGNRTMPEEVVVTALRPDMVLVARSARKVVMVELTVPWETRIEEARERKMDKYASLKQECEQNGWGAEVHTVEVGCRGFAGVSARRWIRAMGFSGREGEKWVRRMCGAAETGSAWVIQKAV

SEQ ID NO: 22714 - protein, 1384 aa, Oechydrus chersis
MANGALVTCINMERRIINSCTQGPLPGGDRRGTSGADAGRLSMRTVSGSPLNRRAGVGESEFTTAEHNRNAEDTLQSGTQSQSFAGTSALSLTTTSLKHNDGRRKWSPEEQQELMFCYYKSKAEGPGYLKRLYNTFKQRNPNNPKIHRFDGNKLSNQAKTIISGKLISEDDLTQIKQSAEQSINSVMGLSLPTQNSQSANTSRSHTPTSCTLSPNNQINIQDDRRRKWTIEEQHELMFCYYKAKTLGIGYIKKLYDIFSERNPNNPKTHRLDGNKLSTQARNIITRKLVSTEVLAEIKLRAEQSTHTSTKIPLTSLAIPEDVENREEIINTPRPLTPTPDTQHGHLNSLSNENHTNLESQYVEINEDQDPLILQFLQNFAETKLKPIKERQFLPKPKFSKKFLENMRKINNYIPKLLNFDNTLRNLNDAIYAAAKTVIIANGQIPYTPPTKIKPKNDPPWKIRLKNKIEELRKEVGRLIDLKKGTQSKKMHKIKYKLFNKYNIFSDQDHDNVIETIKQRIKALAGRLRRYDDINKRKIQNKIFQENQHKFYKNLTDKSNTTITEIPTKEDIQEFWSSILSQPISYNKEASWVEETEELMNNTQENHFEEICIDKLVAAVKKTHNWKTPGIDKIQNYYLKYFTKAHKYMADLFTKIINKKEQIENWFTTGQVILIPKNSNTKEPKNWRPIACLPTMYKLMTSVIANELYAHCEVNDILAPEQRGCRRRARGCKDHLMINKAILEDAHQSQKNLSMGWIDYRKAFDSISHEWLLRVLDLYKCPSAIKRFLEIVMPTWNVIMTARGTNESVTTDPIFIRRGIFQGDSLSPLLFCLAINPLSQILNKYIDKGYKLKDNTQINHLIYMDDLKLYSNNKHNLRILIDSTEVFTKDIGMSFGLDKCNVLHLIAGRKTEQHGAGHVLLSGEEFEHLNKDQTYKYLGIHESGKIEHSVVRQHLQKEYFHRVKSITNSHLNSRNLIKAINTFAVPVLLYSFGVINFKLTDLKQIDVKTRKILCMHKAHQSKAAIERLYLPIEKGGRGLTNIESLYKTQIIKYTTYFESGNDYIIKAIIEHDKNKDKYSIHKEAEENKKEIGLQGKENCTGIEIKAAVIKQRLKKLKEKPLHGQFYRDVLDKENIDTVSSFNWVKKQNISPSLEASIFAFQDQAIITRQHERDILKKPVNGKCRLCGAKDETARHIVAGCEKLAGIYYTKRHNNVVQYLYWALLKKHHMESTSLWWKEHLTQPQVKENEDAKIMWEIPVQTDVTVTHNRPDVIYIDKKTNNTYLIDITIPSDYNIAAKEIEKLSKYHLLKTEITRLWKTTTHVVPIVIGTSGIIAKNLHTYCTMLDANINPQIMQKQAAIHTTIILSKVLGNTIFVEREADPPLP

SEQ ID NO: 22715 - protein, 1394 aa, Hypermnestra helios
MERKKRNLSLMPLPGGDRRGTSGAGAGRHSIRTASDSMLNRRARVGEPEYTTADHSSNIENTLPSGTVSQSLAGTSEDNLTMTSSREIAESRKWSLQENQELMFCYFKAKALGPRYIRRLYEIFSQRNPSSRKTHKLDGNKLANQARIIIARKILSENMLEQIKQRAEQNTCATDIISDASMTTAPLSEIVITNISRNNASPTDEITNNRSPNISPPNHQNMDSKRKWSVEEQHELMFCYYKAKILGPGYIKRLYDIFKERNPNNNKIQRFDAKTLSNQARTIVTRQFLSGEVLAQIKQKAEQSILTAEISSNNLMVLEHDNQDIPITDLSGDTVSILNTPVIEHHTNIVLSNISHEVNQINSPDINTCEGDINVNEDQEQIILDFLQILAEIKVIPIRDREYLPKPKFNKKFTENLNKINNFLPYLLSTDSTLRNINDVIYAAAKTLIISNGQMPYLQANSAKLKGEPPWKKRLKNKIEDLRKELGRLTEIKRGTNSKRIQRIQTKLFNKYNIFNEHDQEITIETIKQKVKALAGRLKRYDDMNKRKTQNILFKENEHKFYKKLSEKPNVVTEIPSKETIHDFWTSILSEPVSYNKNAMWINEIDQLMSRTKESTFNEITIDKLKTAIHKIHNWKAPGIDKIQNYYLKYFSSTNKYLAELFTRIINKRETIENWFTTGQVILIPKNTNTKDPKNWRPIACLPTMYKLLTSVIANELYDHCEINAILAPEQRGCRRQARGCKDHLMINKALLEDAHQSQKNLSMGWVDYQKAFDSVSHEWLLRVLDLYKCPRAIKDFLDLVMPSWNVVMTARGTDKFVTTEPIHIRRGIFQGDSLSPLLFCLAINPLSQILNKYKLKGYKLKDGTIINHLLYMDDLKVYANSKTNLRILIDSTEIFTQDIGMSFGLDKCNVVHLIAGRRNEQIGDGHILLSGGVFEHLKGDQKYKYLGINESGKIDHNEVRQQLQKEYLKRIKWLTNSNLNSRNLIKAINTFAVPVLLYSFGIINYKVTDLKHIDVRTRKILSMNRAHHQKADVERIYIPVEKGGRGLSNIEMLYKTQICKYKRYLEEARDYITKAIKEHDKNKEKYSIFKEAKENNREIGLQNNENYTDREVKLAVIKYRINKLKTKPLHGQFYKNVLERENIDTEFSFRWLTKQPVSPILEAIIFALQDQAIVTRQHERDVLKMPVDGRCRLCATKDESVQHIIAGCEMLAGTYYIKRHNNLVQYVYWALLKKHNLETTAFWWKENLTQPHVRENTYAKIMWEMPVQTDITVTHNRPDIIYINKEENKTYLIDLTVPSDYNIGGKEIEKLSKYNLLQKEVTRLWKTTTQIIPIVIGASGVVAKSIHKYCMQLNAHINIHILQKQAAIHTSVILTKVLGNNIYPERNPDLTLP

SEQ ID NO: 22716 - protein, 1264 aa, Hypermnestra helios
MELRSRDLSIGPLPGVNRQGAPGAVAGCNSMRSIGGGGLSRRVPPEKLFTAELFTEENSPDSVTRTKDVSQVVYSASQPATTKAGKPRVRMKWDDNLNTFIMRTYYFITKLETDMTMYREKLFDEFKLQYPAIKVTQQRIADQRRVIIRNRLLTDEKLEQIKHEVRQQLNNEDQVNLQPYPRSTLTTDIIQTASPTTNFLSPSDPQILNNLPAYSVSLSDNSTQTSAHQITQYSDISSDTDHHATVSLTTQNIQELTDELQTALTQYSGSDPTTRPKLPRLKNSKKLYDLIHVFNTNILHKFYSLDSDLNQIHTLIYCTALVINKQLGLKVQTERNSINNRKKSPNKLAWEKRLEDDIKKLRADIGRLTQYINNNKSPKVIRKVELIFKNFKTHSTHEKENFRPEEYLDTLKQKLALKAHRLARYKKSLQRKEDNRLFTSNEKFFYRTLNKDNSNSSDTTENVLLTETELKNYWAGIWENSLTHNETAEWIKEEEEYCENIEEMEFTEISVEDIQVVIRRMKNWKATGIDNVHNFWYKNLVSLHDILSKIITDLIKGSMNLPDFATTGLTHMISKGQDTTNPSKYRPITCLPTIYKLITSCITNKIVKHLEKNNIIAEEQKGCRRNHQGCKEQLLIDSTILKHAQIHNRNLNITYIDYQKAFDSVPHSWLIRVLEIYKINKSIRSFLKSTMNNWKTSLSLTNKCLKIRTDEIRIKNGIFQGDSLSPLWFCMALNPLSRLLSKPKHGYKLTKNTAITHLMYMDDIKLFGRSDKDMEKLIQITAKYSSDIKMIFGLDKCKTIHIKKGKIIPGDYCIDEEVNITAMDGKDLYKYLGVQEARTINHMEIKKNLTTEYISRINKLCKKQLNSKNLTNAINTYAVPILTYSFGVIKWSHTDIKNLEIKTRTTLTKYKYLHPKSAIERYNIKRRQGGRGILDLKILWENQLKNLRNFFFKKSENSNLHRAVVESDANYTPLNLKQLDKQYANSEEQNKEKLARWRSKELHGRHLHDLEQPHIDIDASNKWLQLGYLFPETEGFNMAIQDQVINTKNYKKYILKENIESDICRKCHRQAETIQHITGACSNLVQTDYSHRHNQVVNYIHQKLAMKYNLITAKIKPYYEYTPNVVLENTNAKLYYDRAILTDKTIHYNRPDITLINKFTKTAYLIDVTIPNTHNIQKSITEKINKYSDLKEEVTRIWNLDKTFIVPLVLSTTGVIPKHLHHSLRILELSPNTYITMQKAVILNTCRIVRKFLSTDDSQNSMTN

SEQ ID NO: 22717 - protein, 920 aa, Ampittia dioscorides
MQELLKGSPLTPSLQQQAVEDAEGEAPVEVEADVRPVSEPQIEPLVADQRHAETNDGSSHVSVIASLLEKATARLMRGTKRSMTRQSERPCTSNGHRNSLNQTEVKLTSKQRRRREYARVQELYRKCPGRAATEILDGQCRGVRHGLGEMEAYWRPIFGKVSDAPGPTPEALRALRLDGQYGGTLDPTGLGKLWAPITSVEVREASVDPRSAPGPDGIRPVDWRRVPAETQAEIFNSWMSQGEIPAPLRQSRTVFIAKKDEPAGPGDYRPISVASVPLRHMHAVLAKRLLACCPPDVRQRGFIHADGTLENSAVLDAVLGDCRKKLKECHIAVLDFAKAFDTVSHAALVDVLRRKGLPAAFCDYVATLYKSAHTILAVNDARSAPVAVARGVRQGDPLSPLLFNMVMDVVLASLPKGVGYRLDGELVSALAYADDLVLLAGSRVGMQEALESVEKTGAMMGLQLNLSKSSVLSMVPDGKRKKPHFVTARTFKLGRRWLRQVDNVEHWRYLGVEMSASGICLLEQDVMQALNNIKRAPLKPHQRLGVVRNHLIPRFLHGLVLGNISDDRLRMLDIQIRNSVRQWLRLPKDVPVAYFHASTKDGGLGIPSLRACVPDLIVRRFGKLGSSSWAVARIASKSERIRRKVKWAERQLRKFSSEIQGTEERSVRRFWSDKLYTSVDGYELRESTKVPASTKWINWSGGQSGRDFIQCVHTHINTLPSRVRNSRGRRQGDESSLLCRAGCMVKETTAHAIQACHRTHGGRILRHNCIADLLAGELERGGWSVEQEPRIETAVGFRKPDIIASRGREIGVIIDVQVVSGQRPLDDAHRDKRAKYGSHDELVDKIAKKLKVNRDNVVSTSCTISWRGVWSHGSYKEMKRLLKVKETVFEAIALRALKGSHMNWSRYNQMTTMLPRSGPE

SEQ ID NO: 22718 - protein, 936 aa, Morvina fissimacula
MKALPNLGRTLEAIKGVRRKEEYKEMVQRLLQGSTPTHTDKHPDKVERRADEELVIEVLDEVQPESRSEDAPPVADPRQAETVGEPECGSIVAELLERAAARRPLGGRKSMKARGKYRTRHTEVKLTSRKRRRMEYARVQELFRKFPSRAAAEVLDGQCRGVRHGLDVLEAYWRPVLETVSGAPGPTPEALRAMRRDEQHGGTLDVRRLWSPFTSEEVKQARIDLRSAPGPDGIRPEEWREVPAKTQAEIFNSWMNRGEIPEPLRQCRTVFVPKKEVPAGPGDYRPISIASVPLRHMHALLARRLEACCPPDVRQRGFIRADGTLENSAVLDAVLGDCRKKLRECHIAVLDFSKAFDTVSHTALVDVLREKGLPVGFCDYVARMYKSAQTTLAVHEQRSEPVVVGRGVRQGDPLSPLLFNMAMDVVLASLPKGVGYRLEGELVSALAYADDLILLAGSKVGMQEALGAVERTGEMMGLQLNREKSSVLSMVPDGKRKKPHYVTARTFKVRGRWLRQVDNVEHWRYLGVEMSASGAVTLEQDVKQALTNIKRAPLKPQQRLEVVRTYLIPRFLHGLVLGNITDDRLRMLDVQIRHSVRQWLRLPADVPVAYFHASVQDGGLAIPSLRTCVPDLVVRRFGKLDSSRWPVAKAASKSERIRRKLKWANRQLQKFSVEVPGAGERSVTRYWRDHLHSSVDGFELRESTKTPASTKWIRDKSMQYSGRDYVQFVHTHINALPSRVRSTRGQRGKGSALNCRAGCMVKETTAHTIQQCHRTHGGRIERHNCVANFLAEEMRNRGWSVVVEPKIKTAVGLRKPDIIASRGDEVGVIVDVQVVSGQRPLDEWHRGKRSKYGNHDELVEKVAERLGLAKDHIKTTSCTVSWRGVWSPGSYKEMKGLLGLKEHVYERIVGLALRGSHMNWSRFNRMTTMCHHGAPE

SEQ ID NO: 22719 - protein, 825 aa, Muschampia prometheus
MTARGNKSHTEVKLTSRKRRRMEYARVQELFRKFPGRAAAEILDGQCRGVRHGLDVLEAYWRPVLEKVSGAPGPTPEALRAVRSNGVDGGALDVQMLWAPFTSEEVKESGIDLRSAPGPDGIRPDEWRAVPAETQAEIFNEWMSRGEIPEPLRRCRTVFVPKREEPAGPGDYRPISIASVPLRHMHALLARRLEACRPPDVRQRGFIRADGTLENSAVLDAVLGDCRKKLRECHIAVLDFSKAFDTVSHAALISVLRGKGLPVGFCDYVARLYDSATTTLAALNEQSEPVVVGRGVRQGDPLSPLLFNMVMDVVLASLPKGVGYRLEGELVSALAYADDLVLLSGSTVGMREALGAVERVGEMMGLQLNQEKSSVLSMVPDGKRKKPHYVTSRTFKVRGRWLRQVDNVEHWRYLGVEMSASGVCTIEHDIKEALKNVTKAPLKPQQRLEIVRTHLVPRFLHGLVLGNITDDRLRMLDIQIRHSVRQWLRLPPDVPVAYFHASVQDGGLAIPSLRTCVPDLVVRRFGKLDSSRWSVARAASLSERIRRKLKWANKQLSKFSIEHPRTGEKSVKQFWRKSLHDSVDGVELRESTKTPASTKWIREKCMSITGRDYVQFVHTHINALPSRIRNSRGRRTGRESELNCRAGCMVRETTAHTIQQCHRTHGGRIERHNCVANYLAKELGNRGWRVESEPRIKTAVGLRKPDIIAARDDGVGVIVDVQVVSGQRPLDEWHRNKRSKYGSHDELVEKVADRLGLSKDHVRVTSCTVSWRGVWSSGSYKEMKELLGLKEYVYETIATLVLRGSHMNWSRFNRMTTMSHGRDSE

SEQ ID NO: 22720 - protein, 892 aa, Muschampia musta
MERVDERAGGESSEEDVVEVRPVSSGEGAPLVADLRQAETGRPTCKPIVEELLARASARRLQTAKRSMTARGNKSHTEVKLTSRKRRRMEYARVQELFRKFPGRAAAEILDGQCRGVRHGLDVLEAYWRPVLEKVSGAPGPTPEALRAVRSNGVDGGALDVQMLWAPFTSEEVKESGIDLRSAPGPDGIRPDEWRAVPAETKAEIFNEWMSRGEIPEPLRRCRTVFVPKREEPAGPGDYRPISIASVPLRHMHALLARRLEACRPPDVRQRGFIRADGTLENSAVLDAVLGDCRKKLRECHIAVLDFSKAFDTVSHAALISVLRGKGLPVGFCDYVARLYDSATTTLAALNEQSEPVVVGRGVRQGDPLSPLLFNMVMDVVLASLPKGVGYRLEGELVSALAYADDLVLLSGSTVGMREALGAVERVGEMMGLQLNQEKSSVLSMVPDGKRKKPHYVTSRTFKVRGRWLRQVDNVEHWRYLGVEMSASGVCTIEHDIKEALKNVTKAPLKPQQRLEIVRTHLVPRFLHGLVLGNITDDRLRMLDIQIRHSVRQWLRLPPDVPVAYFHASVQDGGLAIPSLRTCVPDLVVRRFGKLDSSRWSVARAASLSERIRRKLKWANKQLSKFSIEHPRTGEKSVKQFWRKSLHDSVDGVELRESTKTPASTKWIREKCMSITGRDYVQFVHTHINALPSRIRNSRGRRTGRESELNCRAGCMVRETTAHTIQQCHRTHGGRIERHNCVANYLAKELGNRGWRVESEPRIKTAVGLRKPDIIAARDDGVGVIVDVQVVSGQRPLDEWHRNKRSKYGSHDELVEKVADRLGLSKERVRVTSCTVSWRGVWSSGSYKEMKELLGLKEYVYETIATLVLRGSHMNWSRFNRMTTMSHGRDSE

SEQ ID NO: 22721 - protein, 851 aa, Muschampia antonia
MPNCKLIVEELFTRASARRLQTGKRSMTARGRKSHTEVKLTSRKKRRMEYARVQELFRKFPGRAAAEILDGQCRGVRHGLDVLEAYWRPVLEKVSGAPGPTPEALRAVRSNGVDGGALDVQMLWTPFTSEEVKEAGIDLRSAPGPDGIRPEEWRAVPAETQAEIFNEWMSRGEIPEPLRRCRTVFVPKREEPAGPGDYRPISIASVPLRHMHALLARRLEACRPPDVRQRGFIRADGTLENSAVLDAVLGDCRKKLRECHIAVLDFSKAFDTVSHAALISVLRGKGLPVGFCDYVARLYDSATTTLAALNEQSEPVVVGRGVRQGDPLSPLLFNMVMDVVLASLPKGVGYRLEGELVSALAYADDLVLLSGSTVGMREALGAVERVGEMMGLQLNQEKSSVLSMVPDGKRKKPHYVTSRTFKVRGRWLRQVDNVEHWRYLGVEMSASGVCTIEHDIKEALKNVTKAPLKPQQRLEIVRTHLVPRFLHGLVLGNITDDRLRMLDIQIRHSVRQWLRLPPDVPVAYFHASVQDGGLAIPSLRTCVPDLVVRRFGKLDSSRWSVARAASLSERIRRKLKWANKQLSKFSIEHPRTGEKSVKQFWRKSLHDSVDGVELRESTKTPASTKWIREKCMSITGRDYVQFVHTHINALPSRIRNSRGRRTGRESELNCRAGCMVRETTAHTIQQCHRTHGGRIERHNCVANYLAKELGNRGWRVESEPRIKTAVGLRKPDIIAARDDGVGVIVDVQVVSGQRPLDEWHRNKRSKYGSHDELVEKVADRLGLSKDHVRVTSCTVSWRGVWSSGSYKEMKELLGLKEYVYETIATLVLRGSHMNWSRFNRMTTMSHGRDSE

SEQ ID NO: 22722 - protein, 1050 aa, Cornuphallus albafascia
MENPDRCPSGLPQESEVASTPLPDAQAGAQAGPSTSTGWPCTVCARAFNTKTGLGVHMRRAHPVEANEQSAPPQVKRRWRDEELELLASTEALLTRGGTSCANVDLMRALPNLGRTLEAIKGVRRKESYKSRVKTLLGSPPTQTEHRNDPNIRNDPNNTNEVDKRAGRDPSVEVEVEVRPVSSGEDAPLVADRRQVETGDVPECMSVVAELLERAAARRQRGGRKSMTTRGSTHTEVKVSSRKRRRMEYARVQELFRKFPSRAAAEVLDGECRGVRHSLDELEAYWRPVLETVSTARGPKPEVLRAMRHNGQYGGALDVQGLWSPFTSEEVKEARIDMRTAPGPDGIRAEEWRAVPAEIQAEIFSHWMSQGEIPEPLRQCRTVFVPKKEVPAGPGDYRPISIASVPLRHMHALLARRLEACRPPDVRQRGFIRADGTLENSAVLDAVLGDCRKKLRECHIAVLDFSKAFDTVSHVALINVLREKGLPVSFCDYIARLYESATTTLAASDKQSDPVMVGRGVRQGDPLSPLLFNMAMDVVLASLPKGVGYRLEGELVSALAYADDLVLLAGSTVGMQEALSAVEKVGESMGLQLNREKSSVLSMVPDGKRKKPHYVTSRTFKVNGRWLRQVDNVEHWRYLGVEMSASGACTIEHDIKQALINITKAPLKPQQRLEVVRTYLVPRFLHGLVLGNITDDRLRMLDVQIRHSVRQWLRLPGDVPVAYFHASVQDGGLAIPSLRTCVPDLVARRFGKLDSSRWSVAIAASKSERIRRKVKWANRQLAKFSMENPRTGERSVKQYWREGLHASVDGVELRESTKTPASTKWIRDKSMHYSGRDYVQFVHTHINALPSRMRNSRGRRIGRESELNCRAGCMVRETTAHTIQQCHRTHGGRIERHNCVANYLAKEMGNRGWEVELEPRIKTAVGLRKPDIIASRDDGVGVIVDVQVVSGQRPLDEWHRGKRTKYGGHDELVEKVADRLGLTKDRIKVTSCTVSWRGIWSSGSYKELKTLLGLKEYVYETIVGLVIRGSHMNWSRFNRMTTMGQGRASE

SEQ ID NO: 22723 - protein, 915 aa, Pholisora mejicanus
MGSPPTQVRSLGTQDRQSNRHPIEEEVDDRAGEEPPVEAVEDVQLESRGEDAPLVADRRQAETGDVPECMSIVTELLERAAARRLHGGRRSMTARGRTHTEVKLTSRKRRRMEYARVQELFRKFPGRAAAEVLDGQCRGVRHGLETLEAYWRPVLEKVSGAPGPTPEALRALRRNGSDGGALDVRGLWAPFTSKEVKEAGIESRTAPGPDGIRPDEWRAVPAETQAEIFNYWMSRGEIPEPLRRCRTVFVPKKGEQTGPGDYRPISIASVPLRHMHALLARRLEDCRPPDVRQRGFIRADGTLENSAVLDAVLGDCRKRLRECHIAVLDFSKAFDTVSHAALISVLREKGLPVGFCDYIARLYESATTTLAASDKESAPVVVGRGVRQGDPLSPLLFNMAMDVVLASLPQGVGYRLEGELVSALAYADDLVLLSSSTVGMQEALRTVERVGEMMGLQLNREKSSVLSMVPDGKRKKPHYVTTRTFKVHGRWLRQVDCVEQWRYLGVEMSASGICTVEHDLKLALNNITRAPLKPQQRLEVVRTHLIPRYLHGLVLGNITDDRLRMLDVQIRHSVRQWLRLPKDVPVAYFHASVQDGGLAIPSLRTCVPDLVLRRFGKLDSSRWTAARAASKSERIRRKLKWAARQISKFSVENPRTGQGSVKQYWREGLHASVDGAELRESTLTPASTKWIRDKCGQISGRDYVQFVHTHINALPSRVRNSRGRRTGRESELKCRAGCMVRETTAHTIQQCHRTHGGRIERHNCVADYVAKEMGDRGWRVEMEPRIQTAVGLRKPDIIASRDDGVGVIVDVQVVSGRRPLDESHRAKRNKYGGHGELVEKVADRLGLARDHIRVTSCTVSWRGVWSSGSYKEMKELLGLKEYVFNTIVTLVLRGSHMNWSRFNRMTTMGCAGDSE

SEQ ID NO: 22724 - protein, 1125 aa, Muschampia plurimacula
MRNVFRSGRNPSGVRGGSTSNSPVGRRACSDKSIRFLRLGHYKSEGRTSVAGQHPSTTEDYLNAKGNDKGNKLNRCLSDLPQESEAASNPLPDAQAGAQAGPSTASEWTCDICARSFSTKTGLGVHKQRAHPVEANEQSAPPQVKRRWREEELELLARTEALLIRGGSACANVDLLNALPNLGRTIEAIKGVRRKETYKQRVQTLLLGSPPTQERSYEVSTQEQHNSSCQNDEMERVDERAGGESSEEDVVEVRPVSSGEGAPLVADLRQAETGRPTCKPIVEELLARASARRLQTAKRSMTARGNKSHTEVKLTSRKRRRMEYARVQELFRKFPGRAAAEILDGQCRGVRHGLDVLEAYWRPVLEKVSGAPGPTPEALRAVRSNGVDGGALDVQMLWAPFTSEEVKESGIDLRSAPGPDGIRPDEWRAVPAETQAEIFNEWMSRGEIPEPLRRCRTVFVPKREEPAGPGDYRPISIASVPLRHMHALLARRLEACRPPDVRQRGFIRADGTLENSAVLDAVLGDCRKKLRECHIAVLDFSKAFDTVSHAALISVLRGKGLPVGFCDYVARLYDSATTTLAALNEQSEPVVVGRGVRQGDPLSPLLFNMVMDVVLASLPKGVGYRLEGELVSALAYADDLVLLSGSTVGMREALGAVERVGEMMGLQLNQEKSSVLSMVPDGKRKKPHYVTSRTFKVRGRWLRQVDNVEHWRYLGVEMSASGVCTIEHDIKEALKNVTKAPLKPQQRLEIVRTHLVPRFLHGLVLGNITDDRLRMLDIQIRHSVRQWLRLPPDVPVAYFHASVQDGGLAIPSLRTCVPDLVVRRFGKLDSSRWSVARAASLSERIRRKLKWANKQLSKFSIEHPRTGEKSVKQFWRKSLHDSVDGVELRESTKTPASTKWIREKCMSITGRDYVQFVHTHINALPSRIRNSRGRRTGRESELNCRAGCMVRETTAHTIQQCHRTHGGRIERHNCVANYLAKELGNRGWRVESEPRIKTAVGLRKPDIIASRDDGVGVIVDVQVVSGQRPLDEWHRNKRSKYGSHDELVEKVADRLGLSKEHVRVTSCTVSWRGVWSSGSYKEMKELLGLKEYVYETIATLVLRGSHMNWSRFNRMTTMSHGRDSE

SEQ ID NO: 22725 - protein, 824 aa, Ernsta delagoae
MTARGKTRTEVKLTARIRRRMEYARVQELFRKFPGRAAAEILDGQCRGVRHSLDELEAYWRPVLEKVSGAPGPTPAVLRAVRREGQAGGELDVQQLWAPFTSQEVKESCVDLRSAPGPDGIRPDDWRTVPTDTQAALFNFWLSQGEVPEPLRRCRTVFVPKKEVPAGPADYRPISIASVPLRHMHAILARRLEACRPPDVRQRGFIRADGTLENSAVLDAVLGDCRKKLRECHIAVLDFSKAFDTVSHAALINVLRGKGLPGAFCDYVARLYDTATTTLAVSDKMSDPVVVGRGVRQGDPLSPLLFNMVMDVILASLPKGVGYRLEGELVSALAYADDLVLLSGSTAGMREALGAVERVGEMMGLQLNSEKSSVLSMVPDGKRKKPYYVTARTFKVKGRWLRQVDSVEHWRYLGVEMSASGICTLEHDIKQALTNITKAPLKPQQRLEVVRTFLVPRFLHGLVLGNITDDRLRMLDVQIRHSVRQWLRLPSDVPVAYFHASVQDGGLAIPSLRTCVPDLVVRRFGKLDSSRWSAAVAASKSERIRRKLKWANRQLSKFSIENPRTGERSVKQFWRKSLHDSVDGAELQESTKTPASTKWIREKCKSISGRDYVQFVHTHINALPSRVRNSRGRRTGRESELNCRAGCMVRETTAHTIQQCHRTHGGRIERHNCVANYLAKELGDRGWEVVVEPRIQTAVGLRKPDIIASRGDGVGVIVDVQVVSGRRPLDEWHRGKRAKYGNHDELVEKVADRLGLSKDHVRTTSCTVSWRGVWSSGSYKEMKELLGLKEYVFETIVNLVLRGSHMNWSRFNRMTTMRLGGSSE

SEQ ID NO: 22726 - protein, 853 aa, Dalla quadristriga
MSIVTELLEGAVARRLQGGRQSMTARGKKRRKPFITHTEVKLTSRKRRRMEYARVQELFRKCPSRAAAEVLDGQCRGVRHDLNALETYWRPVLESVSDAPGPTPEALRAVRRDGQYGGEWRVEGLWSPFTSEEVKEASIDLRSAPGPDGIRPEVWRTVPAKTKAEIFNYWMSRGEIPVPLRQCRTVFVPKKETPAGPGDYRPISIASVPLRHMHALLARRLEACRPPDIRQRGFIRADGTLENSAVLDAVLGDCRKKLRECHIAVLDFSKAFDTVSHAALVSVLRGLGLHVGFCDYIARLYETAETTLAVQNQRSEPVVVGRGVRQGDPLSPLLFNAALDVVLASLPKGVGYRLEGELVSALAYADDLVLLAGSTAGMQEALDAVERTGAMMGLQLNREKSSVLSMVPDGKRKKPHYVTTRTFKVKGRWLRQVDNVEHWRYLGVEMSASGTVTLEHDIKQALTNISKAPLKPQQRLEVVRTYLIPRYLHGLVLGNITDDRLRMLDVQIRHSVRQWLRLPPDVPVAYFHASVQDGGLAIPSLRTCVPDLVARRFGKLDSSRWSVAKAASKSERIRRKVKWARRQLQKFSVDDPKTGERTVARYWRDSLHASVDGLELRESTKTPASTKWIRQKCMQYSGRDYVQFVQTHINALPSRVRNTRGRRRGSERELLCRAGCMVRETTAHTIQQCHRTHGGRIERHNCVANYLAREMENGGWTVVLEPKIKTAVGLRKPDIIASRSDGVGVIVDVQVVSGQRPLDEWHRGKRSKYGSHGELVEKVADRLGLTKDHIKATSCTVSWRGVWSSGSYKEMKELLGVKESVFDTIVGLVLRGSHMNWSRFNKMTTMSPAGAPE

SEQ ID NO: 22727 - protein, 943 aa, Zopyrion sandace
MKALPNLGRTLEAIKGVRRKETYKEMIRNLLQGSTPTQTNEHLNEVDERAGGELPAEVAVEVQPESRSEDAPLVADRRQAETADVPECMSIVDELLERAAARRLQGDQRSMKARSKKHRNNRIERIRTEVKLTSKKRRRMEYARVQELFKKFPSRAAAEVLDGQCRDVRHGLDALEAYWRPVLEAVSDAPGPTPEALRALRRDEQYGGVLDVQRLWSPFTSEEVKQASIDLRSAPGPDGIRSEEWRAVPAKTKAEIFNHWMSQGEIPESLRQCRTVFVPKKEVPAGPGDYRPISIASVPLRHMHALLARRLEASCPPDVRQRGFIRADGTLENSAVLDAVLGDCRKKLRECHIAVLDFSKAFDTVSHAALVNVLREKGLPAGFCDYVARLYKSAHTTLAVRDQRSEPVVVGRGVRQGDPLSPLLFNMAMDVVLASLPKGVGYRLDGELVSALAYADDLILLAGSKVGMQEALGAVEKTGEMMGLQLNREKSSVLSMVPDGKRKKPHYVTTRTFKVRGRWLRQVDNVEHWRYLGVEMSASGAVTIEQDIKQALQNIKKAPLKPQQRLEVVRTYLIPRFLHGLVLGNITDDRLRMLDVQIRHSVRQWLRLPSDVPVAYFHASVQDGGLAIPSLRTCVPDLVVRRFGKLDSSRWSVARAASKSERIRRKLKWANKQLHKFSVENPNTGERSVSRYWRDTLYASVDGVELRETTKTPASTKWIRARSSQYSGRDYVQFVHTHINALPSRVRNSRGRREGRESQLNCRAGCMVRETTAHTIQNCHRTHGGRIERHNCILNYLAREMGNSGWSVVVEPNIRTTVGLRKPDIIASKGDGVGVILDVQVVSGQRSLDELHRGKRSKYGSHDELVERVADKLGLAKDHIRTTSCTVSWRGVWSPGSYKEMKGLLGLKEYVYETIPALAIRGSHMNWSRFNRMTTMGRCGAPD

SEQ ID NO: 22728 - protein, 937 aa, Mimia chiapaensis
MKTRYETDNQGNTRHETNNQMNTRFETNNERSYEDQEDLLKSMNTEGEADGRADGESPVEVVEDVRPVSSDEVVPPIADPRQAETGMPKCMSIVTDLLERAAARGQLKGPRSMTARGKHKHTEKLTSRRRRRIEYARVQELFRKFPGRAAAEVRDGQCRSVRHVLDALEAYWRPVLEKVSGASGPTAEIKRALRCRERHSGVEMNVEDLWAPFTPDEVKRAGIDLRTAPGPDGIRADEWRTVPASIRAEIYNSWLSRGEIPEPLRRCRTVFVPKTEEPAGPGDYRPISIASVPLRHMHALLARRLEACRPPDVRQRGFIHADGTLENSAVLDAVLGDCRKKLRECHIAVLDFSKAFDTVSHAALVEVLREKGLPVGFCDYIAQLYNSATTTLAVNEKQSDPVMVGRGVRQGDPLSPLLFNMAMDVVLASLPKGVGYRLDGELVSALAYADDLVLLAGSKVGMQEALGVVERVGEMMGLQLNREKSSVLSMIPDGKRKKPHYVTARTFKVRGRWLKQVDSVESWRYLGVKMSASGVGTIEHDIKGALNNIARAPLKPQQRLEIVRTHLLPRYLHGLVLGNITDDRLRMLDVQIRRSVRQWLRLPPDVPVAYFHAAVQDGGLAIPSLRTCVPDLVVRRFGKLDSSRWTVARVAANSERIRRKVRWANRQLSKFSIENPRTGEKSVKQFWREHLYASVDGVELRESNKTPASTKWIRDTCMKYSGRDYVQFVHTHINALPSRIRNSRGRRSGCESKLNCRAGCRVRETTAHTIQQCHRTHGGRIERHNCVADYLAKEMGNRGWTVEKEPHIKTAAGLRKPDIIAVKEGGVGAIIDAQVVSGQRPLDEWHRGKRTKYGGHDELVQKVADRLGLPKESVTVTTCTVSWRGVWSSRSYKEMKELLGLKEYVYETIVGLVLRGSHMNWSRFNRMTTMGQGRVPE

SEQ ID NO: 22729 - protein, 1054 aa, Spialia ferax
MHAKGHDKENNLSRCPSDLPQESEVASNPLSDARTGDQPGPSSSSGWTCDICARVFSTKTGLGVHKRRAHPVEANEQSAPPQVKRRWRDEELELLACTEARLTREGSSCANVDLLKALPNLGRTIEAIKGVRRKESYKQRVQTLLMGSTPTQERSYEVQGTQQSEKVDERAADEPPVEGVAEGQLVSSCEDAPLVADLRQAETGRPNCKLIVEELLERAAARKLQSGRRSMTARSKAHTEVKMTSRKRRRMEYARVQELFRKFPGRAAAEILDGQCRGVRHGLDALEAYWRPVLEKVSGAPGPTPEALRALRRNGPNGGELNVQALWAPFTSEEVKDAGIDVRSAPGPDGIRPDNWRVVPAETQVKIFNEWMSQGEIPEPLRRCRTVFVPKKEVPAGPGDYRPISIASVPLRHMHALLARRLEACRPPDVRQRGFIRADGTLENSAVLDAVLGDCRKNLRECHIAVLDFSKAFDTVSHAALISVLRGKGLPVGFCDYVARLYESATTTLAVSEKQSDPVVVGRGVRQGDPLSPLLFNMVMDVVLASLPQGVGYRLDGELVSALAYADDLVLLAGSAAGMREALGAVERVGEMVGLQLNQEKSSVLSMVPDGKRKKPHYVTSRTFKVRGRWLRQVESVEHWRYLGVEMSSSGVCTVEHDIKEALNNITKAPLKPQQRLEIVRTHLIPRFLHGLVLGNITDDRLRMLDVQIRHSVRRWLRLPADVPVAYFHASVQDGGLAIPSLRTCVPDLVVRRFGKLDSSRWSVARAAFKSERIRRKLKWANRQLSKFSIENPRTGERSVKQFWRKSLHDSVDGAELQESTKTPASTKWIKDKSTLITGRDYVQFVHTHINALPSRIRNSRGRRQGLESELNCRAGCMVRETTAHIIQQCHRTHGGRILRHNCVADYLAKEMGDRGWRVEKEPRIKTAVGLRKPDIIASRSDGVGVIVDVQVVSGRRPLDEWHRGKRSKYGSHDELVEKVADRLGLSKDHVKVTSCTVSWRGVWSSGSYKEMKELLGLKEYVYETIATLVLRGSHMNWSRFNQMTTMSRGWHSE

SEQ ID NO: 22730 - protein, 1086 aa, Pyrgus malvae
MTSRSAFFGWGTIKAEDAPLCGVSSPARRGIIIATESNREYEMSRCVSDLPQESEVASIPLPDARAGAVAGPSASSGWTCDLCARVFSTKTGLGVHKRRAHPVEANAQSAPPQVKRRWRDEELELLARTEARLIGEGTACANIDIMRALPNLGRTLEAIKGVRRKETYKQRVKDLLQGSTPTHNTNPYQVDEVDGRAGGDLPAEAVVEVRPESQSEDAPRVADPRQAETEDVPVSMSIVTELLERAAARRLHGGPKSMTARGKTRTRQTRTEVKLTSRKRRRIEYARVQELFRKCPGRAAAEVLDGQCRGVRHGLEVLEAYWRPVLEAVSDAPGPTPEALRALRRNEQYGGLLDVQKLWSPFTPEEVKEAGVDLRSAPGPDGIRPEEWRAVPAQSKAEIFNHWMSQGEILEPLRLCRTVFVPKKEVPAGPGDYRPISIASVPLRHMHALLARRLEACCPPDVRQRGFIRADGTLENSAVLDAVLGDCRKKLRECHIAVLDFSKAFDTVSHKALVDVLRKKGLPGGFCDYIARLYESAHTTLAVQNQQSEPVVVGRGVRQGDPLSPLLFNMAMDVVLASLPKGVGYRLEGELVSALAYADDLILLAGSTVGMQEALGAVERVGEMMGLQLNREKSSVLSMVPDGKRKKPHYVTSRTFKVRGRWLRQVDNVEHWRYLGVEMCASGAVTLEHDIKMALNNIKKAPLKPQQRLEVVRTYLIPRFLHGLVLGNITDDRLRMLDVQIRHSVRQWLRLPSDVPVAYFHASVQDGGLAIPSLRTCVPDLVARRFGKLDSSRWSVARAASKSERIRRKLKWANRQLRKFSVENPKNGDRSVAMYWREHLHNSVDGVELRESLKVPASTKWIRDKSMQYSGRDYVQFVQTHINALPSRVRNSRGRRNGRESELNCRAGCMVRETTAHTIQQCFRTHGGRIKRHNCVADYLAKEMGDRGWSVVKEPNIKTTVGLRKPDLIASRGDGAGVIIDVQVVSGQRPLDEWHRGKRSKYGSHGELVEKVADKLGLAKDDIKTTSCTVSWRGVWSAGSYKEMKALLGLKEHVFATISALALRGSHTNWSRFNRMTTMVHAGASE

SEQ ID NO: 22731 - protein, 940 aa, Heliopetes ericetorum
MKALPNLGRTIEAIKGVRRKETYKDRVKALLQGSTPAQTNIITTNETDEPAGRDLPVEVVVEVQPESRSEDATSVAGRRKAETEDVPSSLSIVAELLERAAARRRQGSRRSMKARGKYRTRHTRTEVKLTSRKRRRIEYARVQELFRKCPSRAAAEVLDGQCRGVRHGLEELEAYWRPVLEAVSDAPGPTPEALKAVRREGQYGGVLDFQRLWSPFTPEEVKQASVDLRSAPGPDGIRPEEWRAVPAHSKAEIFNFWMSQGEIPEPLRLCRTVFVPKKEVPAGPGDYRPISIASVPLRHMHALLARRLEACCPPDVRQRGFIRADGTLENTAVLDAVLGDCRKKLRECHVAVLDFSKAFDTVSHKALVDVLRRKGLPVGFCDYVARLYESAHTTLAVQNNQSEPVVVGRGVRQGDPLSPLLFNMAMDVVLASLPQGVGYRLEGDLVSALAYADDLILLAGSTVGMREALKAVEGVGEMMGLQLNREKSSVLSMVPDGKKKRIHYITTRTFKVRGRWLRQVNNVEHWRYLGVEMCASGAVMLEQDVKMALNNITKAPLKPQQRLEVVRTYLIPRFLHGLVLGNITDDRLRMLDIQIRHSVRQWLRLPSDVPVAYFHASVQDGGLAIPSLRTCVPDLVVRRFGKLDSSRWSVARAASKSERIRRKLKWANRQLRKFSVENPKNGERSVAQFWRENLHKAIDGVELREANKTPASTKWIRDKSMQYSGRDYVQFVQTHINAIPSRIRNSRGRRIGRESELNCRAGCMVRETTAHAIQQCYRTHGGRILRHNCVADYLAKEMGDRGWTVVKEPKIKTAAGLRKPDIVASRGDGVGVIVDVQVVSGQRPLDEWHRGKRSKYGNHGELVEKVADILGLSKDDITTTSCTVSWRGVWSPGSYKEMKGILGLKEYVYETIPGLVLRGSHINWSRFNQLTTRTRVGASE

SEQ ID NO: 22732 - protein, 925 aa, Pellicia arina
MVQTLLMGSPPTQDRSYEASTNPADDAKAGDTNKVDGRAGEGSPEEDVVEVRPMSSGEDAPLVAGPRQEETGDGPECSPIVAELIERAAARGRRGGRRSMKARGKRMQTEAKLTSRKRRRMEYARVQELFRKFPGRAAAEVMDGECRGVRHDLEALEAYWRPVLEKVSGARGPTPETLRNLRRNGRWDGCDLEAHGLLAPFSSQEIRDAGVCPRSAPGPDGIRADDWSAVPVEIQAETFNSWLTQGEIPVTLRQSRTVFVPKKEEPAGPGDYRPISIASVPLRHMHALLARRLEACQPPDERQRGFIRADGTLENSAVLDAVLGDCRKKLRECHIAVLDFSKAFDTVSHAALISVLRGKGLPVHFCDYIARLYDSATTTLAAKGKQSEPVILGRGVRQGDPLSPLLFNMVMDVVLASLPKGVGYRLEGELVSALAYADDLVLLAGSTVGMQESLRAVEKVGEMMGLQINREKSSVLSMVPDGKRKKPHYVTTRTFKVGGRWLRQVDNVEHWRYLGVEMSASGACTIEHDIKQALVNITKAPLKPQQRLEIVRTHLIPRYLHGLVLGNITDDRLRMLDVQIRHSVRQWLRLPSDVPVAYFHASVQDGGLAIPSLRTCVPDLVVRRFGKLDSSQWSVARAASKSERIRRKLKWAHRQLSKFSIENPRTGERSVKQYWREGLHASVDGYELRESTKTPASTKWVREKSAQYSGRDYVQFVHTHINALPSRVRNSRGRRTGEGSELNCRAGCMVRETTAHTIQQCFRTHGGRILRHDCVADYLARAMGDRGWRVTQEPRIQTAVGLRKPDIIASRDDGAGVIVDVQVVSGQRPLDEWHRGKRSKYGGHDELVGKVADILGLAKDRVKVTSCTVSWRGVWSSGSYKEMKGLLGLKESVYETIVGLVLRGSHMNWSRFNQMTTMSFGRAPD

SEQ ID NO: 22733 - protein, 918 aa, Polyctor polyctor
MGSPPSQERSYEVSTHVTTNQTEVDQRERVDERADEGLPEEVVADVRPESSGEDALLVADRRQVEIDDGTEGASIVAELIKRAEARRLRGAQRSMKTRRCTNMKVKLTSRLRRRMEYARVQELFRKFPGRAAAEVLNGQCRDVCHELEALEAYWRPVLEKVSGASGPTPEVLRALRHKGLNGGNLDVQGLLAPFTSQEVKEARVCLRSAPGPDGIRSEDWSAVPAEIQAETFNDWLSRGEIPLPLRQSRTVFVPKKDEPAGPGDYRPISIASVPLRHMHALLARRLEACCPPDERQRGFIRADGTLENSAVLDAVLGDCRKKLRECHIAVLDFSKAFDTVSHAALVSVLREKGLPGAFCDYIARLYNSATTTLAAKGKQSEPVVVGRGVRQGDPLSPLLFNMVMDVVLASLPKGVGYRLEGELVSALAYADDLVLLAGSTVGMQESLKAVERVGEMLGLQLNREKSSVLSMVPDGKRKKPHYVTARTFRVNGRWLRQVDNVEHWRYLGVEMSASGACTIEHDIKQALVNVTKAPLKPQQRLEIVRTYLIPRYLHGLVLGNITDDRLRMLDLQIRHFVRQWLRLPSDVPVAYFHASVQDGGLAIPSLRTCVPDLVLRRFGKLDSSRWSVARAASVSERIRRKVKWARKQVSKFSIENPRTGERSVRQYWRESLHASVDGFELRESTKTPASTKWIKERSSQYSGRDYVQFVHTHINALPSRVRNSRGRRTDEGSELNCRAGCMVRETTAHTIQQCHRTHGGRIERHNCVADFLAKAMGDRGWRVLKEPHIKTAVGLRKPDIIASREDGAGVIIDVQVVSGQRPLDEWHRGKRSKYGNHDELVEKAADKLGLTKDRVKVTSCTISWRGVWSSGSYKEMKGLLGLKEYVYETIVGLVLRGSHMNWNRFNRMTTMRHVRDPV

SEQ ID NO: 22734 - protein, 1046 aa, Jera tricuspidata
MRNMGRCPSGLPQESEEASNPLPDARAGAAAGPGGSSEWTCDICARAFSTKTGLGVHKRRTHPVEANAQSAPPQVKRRWREEELELLASAEARLTREGTSNMNIDLMKALPTIGRTLEAIKGVRRKESYKTLVMTLLQGSTPTRSETKITERVDGSAGGRSPVEVVSEARPGGSRENTPLVADRRQAEIGDVPKCMSVVEELLERAKTRGQRGGRRSMRAGGKVIPCSTPTEVKMTSRRRRRMEYARVQELFKKCPSRAAAEVLDGQCRGVRHGIDALEAYWRPVLETVSSATGPTPEALRAMRRNGQYGGQLDARRLWLPFTPEEVKAVGVDSKSAPGPDGIRPGEWRQVPAETKAEIFNYWMVRGEIHETLRQCRTVFVPKKEVPEGPGDYRPISIASIPLRHMHALLARRLEACCPPDIRQRGFIRADGTLENSAVLDAVLGDCRKKLRECHVAVLDFSKAFDTVSHAALVSVLREKGLPVGFCDYVARLYDTAHTTLAVNEKRSEPVAVGRGVRQGDPLSPLLFNMAMDVVLASLPKGVGYRLEGELVSALAYADDLILLAGSTVGMREALAAVERTGAMVGLQINREKSSVLSMVPDGKRKKPHYVTTNLFKMRGRWLRQVDNVEHWRYLGVEMSSSGTVTLEHDIKQALMNITKAPLKPQQRLEVVRTYLIPRFLHGLVLGNITDDRLRMLDVQIRHSVRQWLRLPPDVPVAYFHASVQDGGLAIPSLRTCVPDLVSRRFGKLDSSQWSVARAASKSERIRRKIKWANRQLQKFSVENPRNGERTVVRYWRDNLHASVDGIELRESTKTPASTKWIREQSVQYSGRDYVQFVHTHINALPSRVRNSRGRRTGRESELNCRAGCMVRETTAHTIQQCHRTHGGRIQRHDCIAKYLAKEMGDRGWTVALEPRIKTAVGLRKPDIIASNGDGAGVIVDVQVVSGQRPLDECHRDKRRKYGSHGELVEKVADILGLTKECIKTTSCTISWRGVWSSGSYKELKALLGLKEQVFEVIVGLALRGSHMNWSRFNRMTTMGHDGAPE

SEQ ID NO: 22735 - protein, 1041 aa, Calpodes ethlius
MPPGLPQEPGTALPLPDRRSGAPAGPGTSSGYICTTCARVFSTKTGLGVHVRRTHPVAANAQSAPPQAKRRWLEEELEILASTEARLVKEGSVHVNADLLKALPQFGRTLEAIKGVRRKESYKAKVMALLKGSPITPGDISDQVGDGVAEDLPVEEVAEVQPVIELESEPLVAGLCIEETDERSPSVSVVADLIERATARMTQGSRRSMRPRGNSRKTLAMLMPKDKLNARRKRRMEYARVQELFRKYPGRAAAEVLDGRCRGVRHQLVELEAHWRPVFEKVSDATGPTPEVLRALGSNGRYGGDTNRDQLLKLWSPFTEEEVKVAKIDLRSAPGPDGIRPEEWRAVPAKIQAETFNSWMSQGEIPDPLRQCRTVFVPKKEEPAGPGDYRPISIASVPLRHMHALLARRLEACRPHDARQRGFVRADGTLENSAVLDAVLGDCRKKLRECHIAVLDFAKAFDTVSHAALVNVLREKGLPVGFCNYIARLYDTAKTTLAVGNDRSDPVAVGRGVRQGDPLSPLLFNMVLDVVLASLPEEVGYRLDAERVSALAYADDLVLLAGSKVGMQAAIDAVERTGGMMGLQLNREKCSVLSMVPDGKRKKPHYVTARSFKLGRRWLRQVDSVEHWRYLGVERSASGSTMIELDIKEALNNITRAPLKPHQRLEVVRNHLIPRYLHGLVLGNISDDRLRMLDIEIRKSVRQWLRLPKDVPIGYFHAATKDGGLAVPSLRTCVPDLIVRRFGKLDSSRWSVARAASKSERIRRKVKWAEKQLRKFSVTVPRTGEKSITQFWREKLHSSVDGIELAESQKVPASTRWLNKKGDLSGRDYIQCVHTHINALPSRVRNTRGRRVGRESELNCRAGCAVRETTAHTIQQCHRTHGGRILRHNCVADFLARELGQGGWSVEQEPRIETAVGLRKPDLIASRDGGGVLIDVQVVSGRRPLDDAHRDKRNKYASHDELVERVADRLRLTKDRVSVTSCTVSWRGVWSLGSYKEMKRLLGLKEWAYERITTLVLRGSHANWSRFNRMTTMVPRGASGR

SEQ ID NO: 22736 - protein, 1000 aa, Panoquina ocola
MPPGLPQEPGPAFPRSDGRSGAPDGPGPSSGFKCVTCGRVFTTKTGLGVHVRRAHPVAANVESAPPQAKRRWREEELDILASTEARLVREGSVQVNADLLKALPNLGRTLEAIKGVRRKEEYKAKVATLLAGSPPSPVRDISPGISVVGRVGTDGDPPIGAVSEVQPVVRPEDAPLVAGLCPVETDDRSTCVSVVADLLERARTRMTQGSRRSMKTRGKSKKTRTLHTQTGKPNGRQRRRMEYARVQELFQRYPGRAAAEVLDGRCRVVRHQLVDLEAFWRPVFEKVSDARGPKPEVLRALRSKGQYGGCINRTRLSELWSPFTPEEVKGIKVDLRSAPGPDGIRPEDWREVPAKIQAETFNSWMSQGEIPEPLRQCRTVFVPKKDEPAGPGDYRPISIASVPLRHMHALLARRLEACCPHDARQRGFVRADGTLENSAVLDAVLGDCRKKLRECHIAVLDFAKAFDTVSHAALISVLRETGLPGAFCDYIARLYDTAQTTLAVGNDRSDPVAVGRGVRQGDPLSPLLFNMVLDVVLASLPQEVGYRLEGERVSALAYADDLVLLSSSRAGMQEAIDAVEEVGSVMGLQLNREKCSVLSMVPDGKRKKPHYVTDRSFKLGRRWLRQVDSVEHWRYLGVDMSASGAVTLEQDVKQALINITRAPLKPRQRLEVVRNHLIPRFLHGLVLGNVSDDRLRMLDVQIRQSVRQWLRLPKDVPIGYFHAATRDGGLAVPSLRTCVPDLIVRRFGKLDSSRWSVARAASKSERIVRKVRWAEKQLRKFSAAVPRTGERTVAQYWREKLHNSVDGAELQECSKVPASTRWLVNKGGLSGRDYIQCVHTHINALPSRVRNTRGRRVGSESELNCRAGCMVRETTAHTIQQCHRTHGGRILRHNCIADLLARELGQGGWSVEQEPRIETAVGLRKPDIIAASGDGSVGVIIDVQVVSGRRPLDDAHRDKRSKYGSCEELVAKVAGRLTSQRPLRGHLHRLMVRRLEPRIV

SEQ ID NO: 22737 - protein, 915 aa, Choranthus vitellius
MGSPLTPKDVSAIGGGDSDGEPLVEEVTEVQPVTESVIEPLVAGLRQEQTDDRSSCAAVVADLIERARTRLAQGSRRSMKPRGRRNKTRALHTQAGKQLSSRQKRRNEYARVQELFRRYPGRAAAEVLDGQCRSVRHPLGELEAYWRPVFERVSDASGPTPEVLRALVSDGQHGGTLDRDQMLKLWSPFTAEEVKGTRVDLRSAPGPDGIRSEDWRTVPARIQAEIFNSWLSQGEIPEPLRQCRTVFVPKKDVPAGPGDYRPISIASVPLRHMHALLARRLEACCPPDARQRGFIRVDGTLENSAVLDAVLGDCRKKLRECHIAVLDFAKAFDTVSHAALVSVLRGKGLPVAFCDYVARMYDTAKTTLAVANDRSDPVAVGRGVRQGDPLSPLLFNMVLDAVLASLPKGVGYRLDGELVSALAYADDLILLAGSKAGMQEAIGAVERVGEMMGLQLNLGKSSVLSMVPDGKRKKPHYVTARSFKLGRRWLRQVDSVEHWRYLGVEMAAAGAVTLEQDIKTALNNISRAPLKPLQRLEVVRNYLIPRYLHGLVLGNITDDRLRMLDVQIRQSVRQWLRLPKDVPTAYFHAATRDGGLAVPSLRTCVPDLILRRFGKLDSSRWSVARAASKSERIRRKLKWAEKQLRKFSVVVPRTGDKTVAQFWRAKLHSSVDGHELAESSKVPASTKWLTKKGDLSGRDYIQCVHTHINALPSRVRNTRGRRVGRESELNCRAGCRVRETTAHTIQQCHRTHGGRILRHDCVANFIARELGQGGWTVEQEPRIETAVGLRKPDIIARREDGVGVILDVQVVSGRRPLDDTHRDKRSKYGSHGELVERVADRLGITKDHVEVTTCTVSWRGVWSLGSYKDMKRLLGLKEAVYERIAVLALRGSHMNWSTFNRMTSMTSYTNDYSLF

SEQ ID NO: 22738 - protein, 833 aa, Racta chiria
MKTRGKGYKTQANHTQTVKLSSKQRRRSEYARVQELFRKYPGRAAAEVLDGQCRSVRHPLGELEAYWRPVFEKVSDAPGPTPEVLRALGSDGQYGGTLDRGQLPKLWSPFTVEEVKGTKVDLRSAPGPDGIRSEDWRTVPAKIQAEIFNTWMSQGEIPEPLRQCRTVFVPKKDVPAGPGDYRPISIASVPLRHMHALLARRLETCCPPDVRQRGFVRVDGTLENSAVLDAVLGDCRKKLRECHIAVLDFAKAFDTVSHAALVSVLRGKGLPGAFCDYVARMYNTAKTTLAVSNNRSDPVAVGRGVRQGDPLSPLLFNMVLDAVLASLPKGVGYRLDGERVSALAYADDLVLLAGSRVGMQEAIDAVGKVGAMMGLQLNLGKSSVLSMVPDGKRKKPHYVTARSFKLGRRWLRQVDSVEHWRYLGVEMSAVGAVTLEQDVKGALNNITRAPLKPLQRLEVVRHYLIPRYLHGLVLGNISDDRLRMLDVQIRQAVRQWLRLPKDVPIAYFHAATKDGGLAIPSLRTCVPDLILRRFGKLDSSRWSVARAASKSERICRKVKWAEKQLRKFSVVVPRTGEKSVTQFWREKLHSSVDGVELAESNKVPASTKWLTKKGDLSGRDYIQCVHTHINALPSRVRNTRGRRVGRESELNCRAGCRVRETTAHTIQQCHRTHGGRILRHNCITEFVAREMEQGGWTVEQEPRIITAVGLRKPDIIARRDDGVGVIIDVQVVSGRRPLDDTHRDKRTKYGSHVELVEKVADKLRLTKDHVEVTSCTVSWRGVWSLGSYKDMKRLLGLKETVFERISALALRGSHMNWSTFNRSTTVVPRGAHD

SEQ ID NO: 22739 - protein, 964 aa, Nastra julia
MLACAEARLVREGSVNINADLLKALPQLGRTLEAIKGVRRKEEYKGKVRSLLLTGSPPTPSGDIRNNRVGADGDGVPPDGVVADDLPASEPEDVPLVAGLQDETDEGSPSVSVVADLLERARTRMTQGSKRSMKSRGKRKKTRALPTQTGKLSSKQRRRMEYARVQELFKTYPGRAAAEVLDGQYRGVRHQLVELEAYWRPVFEKVSDASGPTPEVLRALKPEGSGGQLNREQLLKLWSPFTVEEVKETKIDLRSAPGPDGIRSVDWRAVPAEIQAETFNLWMSQGEIPEPLRQCRTVFVPKKDEPAGPGDYRPISIASVPLRHMHALLARRLEACCPPDARQRGFVRADGTLENSAVLDAVLGDCRKKLRECHMAVLDFAKAFDTVSHAALVNVLRGKGLPVGFCDYVARLYSTAKTTLAVGNDRSDPVAVGRGVRQGDPLSPLLFNMVLDAVLASLPTGVGYRLEGELVSALAYADDLVLLAGSRAGMQSAIDAVMEVGRSVGLQLNHEKCSVLSMVPDGKRKKPHYVTTRSFKLGRRWLRQVESVEQWRYLGVEMAVTGTATFEQDVKRALDNISRAPLKPQQRLEVVRNYLIPRFLHGLVLGNISDDRLRMLDVQIRQFVRQWLRLPKDVPIGYFHAATSDGGLAVPSLRTCVPDLILRRFGKLDSSRWSVARAASKSERIRRKLKWAEKQLRKFSVVVPRTGDRTVKQYWREKLHNSVDGVELAESSKVPATTKWLTKKGGLTGRDYIQCVHTHINTLPSRVRNTRGRRVGGESELNCRAGCMVRETTAHTIQQCHRTHGGRILRHNCIADFISRELGQGGWTVEQEPRIETAAGLRKPDIIAANERGVGVVLDVQVVSGRRPLDDAHREKRSKYASNGELVEKVADKLRLSKDHVAVTSCTVSWRGVWSPASYKEMKGLLGLKESVYERIPSLALRGSHTNWSRFNRMTTVAPRGALV

SEQ ID NO: 22740 - protein, 935 aa, Telemiades fides
MSSGYSCDLCGRSFTTKSGLGVHVRRAHPDVANARAAPPQVKRRWRDEELELLARTEARLLREGSANVNIDLAKALPNLGRTFDAIKGVRRKENYKEMVAKLLIGSPSSSTSTKEHIGQVDGDDERIPPEEAVTEVRPVSGSEDVPLVADLGGDYRSTCVSIVADLLERANERLMRGTENKCKRKMAEVKMTSRRRRRMEYARVQELFRKFPSRAAAEVLDGRCRGVRHELDELEAYWRPILEKVSDAPGPTPEALRALGRDGQHGGRTDRSQLLQLWSPFTADEVKAVKVDPRTAPGPDGIRPVDWREVPAETQAEIFNSWMNQGEIPLTLRQCRTVFVPKRDEPAGPGDYRPISIASVPLRHMHALLARRLEACCPPDARQRGFVRADGTLENSAVLDAVLGDCRKKLRECHIAVLDFAKAFDTVSHTALVGVLRGKGLPVGFCNYIARMYETAETTLAVGNDRSDPVVVGRGVRQGDPLSPLLFNMVLDVVLASLPKGVGYRLEGELVSALAYADDLVLLAGSKAGMQAAIDAVADTGATVGLQLSREKTSVLSMVPDGKRKKPHYVTTRSFKLGRRWLRQVDSVEQWRYLGVEMSSSGSVTIEHDIKQALNNIKKAPLKPQQRLEVIRTYLIPRYLHGLVLGNITDDRLRMLDIQIRHSVRQWLRLPKDVPTGYFHASTSDGGLGIPSLRACVPDLIVRRFGKLDTSQWSVARAAFKSDKIKQKLKWAKKQLRKFSAEVPRTGEETVKQFWRLKLHHSVDGHELRESSKVPASTKWLTKVRDLNGRDYIQGVHTHINALPSRVRSTRGRREGRESELNCRAGCMVRETTAHIIQQCCRTHGGRILRHNCVADFVAKELERAGWAVEQEPRIETAVGLRKPDIIAARGGEVGVIVDAQVVSGQRPLDDAHRDKRAKYGGHGELVQKVADRLG

SEQ ID NO: 22741 - protein, 1051 aa, Atrytonopsis hianna
MPPDLPQESGSAFPRSDAQPGASAGPGPSSGWTCTICARVFSTKTGLGVHVRRAHPVAANAQSAPPQAKRRWRDEELELLASTEARLIREGSVSVNSDLLKALPNLGRTLEGIKGVRRKETYKPMVARYLEDQPPTPQGDISPNGDNHKSSPKIGVGDGGDHNGEDGAEVRPTGKPENVPLVAGLENVETDDRSCGVSVVADLLERATARMTQGSRRSMKARGKRHKTRTLRTQTGRLNAKGRRRMEYARVQELFRRYPGRAAAEVLDGQCRSVRHQLVELEAYWRPVFEKVSDAPGPKPEVLRALGIQRPYGGTLDRDRLLKLWSPFTEEEVKEAKVDLRSAPGPDGIRSEDWRTVPARVQAETFNSWMSRGEIPRPLRQCRTVFVPKKDEPAGPGDYRPISIASVPLRHMHALLARRLEACCPPDARQRGFIRADGTLENSAVLDAVLGDCRKKLRECHIAVLDFAKAFDTVSHAALVSVLRGKGLPVGFCDYVARLYSTAETTLAVGNDRSDPVAVGRGVRQGDPLSPLLFNMVLDVVLGSLPKEVGYRLDGERVSALAYADDLVLLAGSTAGMQAAIDAVEEAGTMMGLQLNREKCSVLSMVPDGKRKKPHYVTARSFKLGRRWLRQVDSVEHWRYLGVDMTASGAATLEQDVKRALDNITRAPLKPQQRLEVVRNHLIPRFLHGLVLGNISDDRLRMLDVQIRHAVRQWLRLPKDVPIGYFHAATRDGGLAVPSLRTCVPDLIVRRFGKLDSSRWSVARVASNSERIRRKVKWAEKQLRKFSVTVPKTGERSVAQFWREKLHSSVDGAELAESTKVPASTKWMSRRGDLNGRDYIQCVHTHINALPSRVRNTRGRRVGRESELNCRAGCMVRETTAHTIQQCHRTHGGRILRHNCVVDLLARELGQGGWTVEQEPRIETAVGLRKPDIIASRADGIGVILDVQVVSGRRSLDDAHRDKRRKYGCHGELVERVADRLRLPKDHVEVTSCTISWRGVWSLGSYKEMKRLLGLKESVYERIAGLVLKGSHMNWSRFNRMTTMMPRGASS

SEQ ID NO: 22742 - protein, 937 aa, Astraptes apastus
MKALPNLGRTLEAIKGVRRKESYKSLVTNLLMGSPSTPNKTTERVDGDERRGPPEETVAEDRPVSGSEDAPLVADLRVDDRSTCDSVVADLLERATERMTRGSVRSKKNKKKTLVVTPNTEVKLTSKQRRRMEYARVQELFRKYPGRAAAEVLDGECRGVRHRLDELEAYWRPVLEAVSDASGPTPEALRAARRNGQYGGTLDRLQMLKLWSPFTEEEVKEAKLDPRSAPGPDGIRPEDWRAVPAKTQAEIFNLWMSRGEIPLPLRQCRTVFVPKRDEPAGPGDYRPISIASVPLRHMHALLARRLEACCPPDARQRGFVRADGTLENSAVLDAVLGDCRKKLRECHIAVLDFAKAFDTVSHAALIGVLREKGLPVGFCDYIARLYETAQTTLAVGNDRSEPVVVGRGVRQGDPLSPLLFNMALDVVLASLPKEVGYRLEGEQVSALAYADDLVLLAGSKAGMQAAITAVAETGASLGLQLSREKSSVLSMVPDGKRKKPHYVTTRSFKLGRRWLRQVDSEEHWRYLGVDMSVSGTVTIEQDVKRALENIKKAPLKPQQRLEVVRNYLIPRFLHGLVLGNISDDRLRMLDVQIRHSVRQWLRLPKDVPLAYFHASTRDGGLAVPSLRTCVPDLITRRFGKLDSSRWSVARAASKSERIRRKMKWAERQLRKFSADVPRTGERTVVQYWRDKLHNSVDGYELRESTKVAASTKWIYKKGDLNGRDYIQCVHTHINALPSRVRNTRGRRMGRESELICRAGCMVRETTAHTIQQCHRTHGGRILRHNCIADLVAKELGLAGWSVEQEPRIETAVGLRKPDIIASRGDGAGVIVDVQVVSGQRPLDDAHRDKRSKYGGHDELVKKVADRLGLAKDRVGVTSCTVSWRGVWSLGSYREMKKLLGLKETVYERIAALALKGSHINWSRFNRMTSRYPVEAPD

SEQ ID NO: 22743 - protein, 900 aa, Erynnis brizo
MVVGVDAVGKPADGDVAEVRPADEPEDAPLVAGLTNEETSDWARSVSVVAELLERATTRMTQGSKRSMRSRGSSSKTRTLHTQTGRLNAKRRRRREYARVQELFKKYPSRAAAEVLDGQCRSVRHQLGELEAYWRPVFEKVSDAPGPTPEVLRALGLDGQYGGQLDRDQLPKLWAPFTAGEVKEAKVDLRSAPGPDGIRSEDWRAVPAETQAEIFNSWMSRGEIPDPLRQCRTVFVPKKDEPAGPGDYRPISIASVPLRHMHALLARRLEACCPPDVRQRGFVRVDGTLENSAVLDAVLGDCRKKLRECHIAVLDFAKAFDTVSHAALVSVLRGKGLPAAFCDYVARMYDTAKTTLAVANDRSDPVAVGRGVRQGDPLSPLLFNMVLDVVLGSLPKEVGYRLDGELVSALAYADDLVLLAGSKVGMQAAIDAVVEAGTMVGLQLNPGKCSVLSMVPDGKRKKPHYVTARSFKLGRRWLRQVDSVEHWRYLGVDISTAGAVTLEQDVKGALHNISRAPLKPHQRLEVVRTYLIPRFLHGLVLGNISDDRLRMLDVQIRQAVRQWLRLPKDVPTAYFHAATRDGGLAVPSLRTCVPDLILRRFGKLDSSRWMVARAASNSERIRRKVKWAEKQLRKFSVSVPNSGERSIAQYWREKLHSSVDGAELAESSRVPASTKWITNRAGMSGRDYIQCVHTHINALPSRVRNTRGRRVGRESELNCRAGCMVRETTAHTIQTCHRTHGGRILRHNCVVDLLARELGQGGWTVEQEPRIETAAGLRKPDIIASNGNGAGVIIDVQVVSGRRPLDDAHRDKRRKYGGHGELVERVADRLRLPKDHVGVTSCTLSWRGVWSPGSYKEMKRLLGLKEHVYERIVSLVLRGSHMNWSTFNRMATMAPRGALD

SEQ ID NO: 22744 - protein, 1043 aa, Proteides mercurius
MVNKEKQPLLDLPQESGRAVNISSGRQPGASDGPGAPTGFGCDICDRTFKTKTGLGVHVRRAHPVEANTRSAPPLVKRRWRDEELELLASTEARLTREGSANLNIALAKALPNLGRTFEAIKGVRRKEKYKEIVTKLLEGSPSSPNTNDNDIEPVSVEAEREPPGEEVTDVRPESGSEDAPLVADERVVERSSCAAVVADLLERATKRMARGSARPKKRHGIHDQSETKLTSKRRRRIEYARVQELFKKFPSRAAAEVLDGQCRGVRHRLDELEAYWRPILEKVSEAPGPTPDALRALRRDGQDGGTLDRSQLLQLWLPFTEEEVKAGRVDLRSAPGPDGIRPVDWRAVPAKTQAEIFNSWMSQGEIPLQLRQCRTVFVPKKDEPAGPGDYRPISIASVPLRHMHALLARRLEACCPPDARQRGFVRADGTLENSAVLDAVLGDCRKKLRECHIAVLDFAKAFDTVSHAALVGVLREKGLPVGFCDYIARMYESAQTTLAVGNDRSEPVVVGRGVRQGDPLSPLIFNMVLDVVLASLPKGVGYRLEGELVSALAYADDLVLLAGSKAGMQAAIDAVAETGESVGLQLSREKTSVLSMVPDGKRKKPHYVTTRSFKLGRRWLRQVDSVEHWRYLGVEMSAAGSVTIEQDIKQALHNITRAPLKPQQRLEVVRTYLIPRFLHGLVLGNITDDRLRMLDLQIRHSVRQWLRLPKDVPTGYFHASARDGGLAIPSLRTCVPDLIVRRFGKLDSSRWSVARAASKSDRIRKKLKWAGKQLRKFSAEVPRTGDRTVMQFWREKLHQSVDGHELRESTKVPATTKWITNYRDRCGRDYIQAVHTHINALPSKVRNTRGRREGRESELNCRAGCTVRETTAHVIQQCHRTHGGRILRHNCIANYVAGELERAGWTVEQEPHLKTAVGLRKPDIIAARGAEAGVIVDVQVVSGQRPLDDAHRDKRSKYGGHDELVEKVADRLRLPKSCVDVTSCTVSWRGVWSLGSYKEMKRLLGLKEGVFEKISVMAIKGSHMNWSRFNRSTGMRPEEAPD

SEQ ID NO: 22745 - protein, 1058 aa, Lychnuchoides ozias
MEDNMNAKGSNINSMPPDLPQESGSASNPPPDPQPGASAGSGGSSGWKCTVCARIFSTKTGLGVHVRRAHPVEANEQSAPPQVKRRWREEEIDLLASTEARLVRGGSVFTNIDIMKALPNIGRTLEAIKGVRRKETYKAKVAALLEGSPPTPEKDTERDVDVSPDGEPDVEEVSEGRPGGITEDTPLVADLRETKSENINDERPVADSVIADLLRNANERMTRGSKRTNKKGNYKHLRTCTEKKMNSKQRRRSEYARVQELFRKCPSRAAAEVLDGRCRGVRHRLEELEAYWRPVIETVSDAPGPKPEALKALRSDGRHGGTIDRDRMLKLWSPFTEEEVKGTKVDSRSAPGPDGIRSGDWRIVPARIQAEIFNSWLSRGAVPEPLRQCRTVFVPKKDEPAGPGDYRPISIASVPLRHMHALLARRLEACCPPDVRQRGFVRADGTLENSAVLDAVLGDCRKKLRECHIAVLDFAKAFDTVSHAALVGVLREKGLPVGFCDYIARLYETAQTTLAVGNDRSDPVAVGRGVRQGDPLSPLLFNMAMDVVLASLPKEVGYRLDGERVSALAYADDLVLIAGSKAGMQAALDAVAETGASMGIQLNREKSSVLSMVPDGKRKKPHYVTARSFKLGRRWLRQVDSVEHWRYLGVEMSSSGIVTLEQDVKQALTNIQKAPLKPQQRLEVVRTFLIPRFLHGLVLGNVSDDRLRMLDVQIRSSVRQWLRLPKDVPTAYFHASTRDGGLAIPSLRTCIPDLIVRRFGKLDSSRWSVARAASNSERIRRKVKWAEKQLRKFSSVTQRTGERSVVQYWREKLHQSVDGCELAESTKVPASTKWITKRMGDLTGRDYIQSVHTHINALPSRVRNSRGRRVGRESELNCRAGCMVKETTAHTIQQCHRTHGGRILRHNCVVDFLTREMEQGGWSVEQEPRIETAAGLRKPDIIASREGAGIVIDVQVVSGRRPLDDAHRDKRAKYGSHGELVERVADRLGLAKDRVEVTSCTISWRGVWSLGSYRDMKRLIGVSESVYERIAVLVLRGSHMNWSRFNRVTTMTPGRALS

SEQ ID NO: 22746 - protein, 1042 aa, Hesperia comma
MPPDLPQESGSASPRSDGQPGASAGPGPSSGWTCERCARVFSTKTGLGVHVRRAHPVAANAQSAPPQVKRRWRDEEIDLLASTEARLVREGSASINADLIKALPNLGRSLEAIKGVRRKESYKEKLSALLFSGSPFTPHGDHMGIGIDAVGKPADEDVAEVRPADEPEDAPVVAGLATEETDDWSRSVSVVAELLERATTRMTQGSKRSMRSRGRSSKTRTLHTQTGRLSAKRRRRIEYARVQELFKKYPSRAAAEVLDGQCRSVRHQLGELEAYWRPVFEKVSDAPGPTPEVLRALGLEGQYGGQLDRDQLPKLWAPFTAGEVKEARVDLRSAPGPDGIRSEDWRAVPAETQAEIFNSWMSRGEIPEPLRQCRTVFVPKKDEPAGPGDYRPISIASVPLRHMHALLARRLEACCPPDVRQRGFVRVDGTLENSAVLDAVLGDCRKKLRECHIAVLDFAKAFDTVSHAALVSVLRGKGLPAAFCDYVARMYDTAKTTLAVANDRSDPVAVGRGVRQGDPLSPLLFNMVLDVVLGSLPKEVGYRLDGELVSALAYADDLILLAGSKVGMQAALDAVVETGTMVGLQLNPGKCSVLSMVPDGKRKKPHYVTARSFKLGRRWLRQVDSVEHWRYLGVDLSTSGTVTLEQDVKGALDNISRAPLKPHQRLEVVRTYLIPRFLHGLVLGNISDDRLRMLDVQIRQAVRQWLRLPKDVPTAYFHAATKDGGLAVPSLRTCVPDLIVRRFGKLDSSRWMVARAASNSERICRKVRWAEKQLRKFSVSGPNTGERSIAQFWREKLHSSVDGAELAESSKVPASTKWLRNKTGMSGRDYIQCVHTHINALPSRVRNTRGRRVGRESELNCRAGCMVRETTAHTIQQCHRTHGGRILRHNCVVDLLARELEQGGWSVEQEPRIETAAGLRKPDIIASNGNGAGVIIDVQVVSGRRPFDDAHRDKRRKYGGHGELVERVADRLRLPKDHVGVTSCTLSWRGVWSLGSYKEMKRLLGLKETVYERIVSLVLRGSHMNWSRFNRMTTMAPRGALD

SEQ ID NO: 22747 - protein, 906 aa, Codatractus cyledis
MGGAPPEEVVAEVRPVSGCEDMPLVADQRKTNDGPSCVSVIADLLERAKARMMQGIRRSRRAGGRSNKFERKGNRCDKTERKANRKHTEVKLNAKQRRRAEYARVQELYRKCPSRAAAEVLDGQCRGVRHRLEVLEAHWRPILEAVSDAPGPTPEALRALGRDGQYGGTLDQSQLPTLWSPFTEEEVKAVKLNLRTAPGPDGIRPEDWRGVPVKTKAETFNLWMSQGEIPLPLRQCRTVFVPKKDEPAGPGDYRPISIASIPLRHMHAVLARRLEACCPPDVRQRGFIRVDGTLENSAVLDAVLGDCRRKLRECHIAVLDFSKAFDTVSHAALISVLRGKGLPVGFCNYIARLYDTAETYLAVENDRSDPVVVGRGVRQGDPLSPLLFNMALDVILASLPKGVGYRLDGELVSALAYADDLVLLAGSKAGMQEALGVVGEVGASVGLQLNLEKSSVLSMVPDGKRKKPHYVTTRSFKLGRRWLRQVDSVEHWRYLGVDMSASGAVTLEQDVKQALVNIQRAPLKPQQRLEVVRTYLIPRFLHGLVLGNISDDRLRLLDVQIRHSVRQWLRLPKDVPVAYFHASTRDGGLAIPSLRTCVPDLIVRRFGKLDSSRWSVARAASKSERIRRKLKWANRQLRKFSVAAPRTGDRSVAQFWREKLHKSNDGIELCESTKVAASTKWITKRLDNLNGRDYIQCIHTHINAIPSRVRTSRGRRAGRESELNCRAGCMVRETTAHAIQSCHRSHGGRILRHNCVVDFVAGELERGGWSVELEPRIETAHGLRKPDIIASKGSDAGVIIDVQVVSGRRPLDEAHRDKRTKYGGHDELVEKVADRLGVTKDHVGVTSCTVSWRGVWSLGSYREMKRLVGLKEHAFETISVLALRGSHMNWSRFCRMTTVVSCGAPD

SEQ ID NO: 22748 - protein, 1043 aa, Perichares adela
MPPGLPQESGPASIPRPDDQPGPSAGPGRSAGFECVTCARVFSTKTGLGVHVRRAHPVAANAQSAPPQVKRRWRDEELELLARTEARLVGGGSVHINDDLFKALPNLGRTIEAIKGVRRKESYKARVAELLLGSPPTPTQGNRTVVASVDGDPSELAVSDVGQGNEQPAAPLVADLRQEEADERPLVVSVVADLLERARTRMTQGAKRPVNTRGKRKRNSALHTQVEKKLSSRQRRRSEYARVQELFRKCPGRAAAEVLDGQCRGVRHSLGELEAYWRPVFETVSDAPGPKPEALKAVKPDGSRVGTLDDHQVLKLWSPFTVEEVKGAKVDLRAAPGPDGIRSEDWRTVPAEIQAEIFNSWMSQGEIPAPLRQCRTVFVPKKDEPAGPGDYRPISIASVPLRHMHALLARRLEACCPPDVRQRGFIRADGTLENTAVLDAVLGDCRKRLRECHIAVLDFSKAFDTVSHGALVSVLRGKGLPVGFCDYIARLYDTAQTFLAVGNDRSDPVVVGRGVRQGDPLSPLLFNMALDVVLASLPEGVGYRLDGELVSALAYADDLVLLAGSRVGMQAAIDAVGEAGASVGLQLNREKSSVLSMVPDGKRKKPHYVTTRSFKLGRRWLRQVDNVEHWRYLGVDMTAAGTVTLEHDIKLALTRITRAPLKPQQRLEVVRAHLVPRYLHGLVLGNISDDRLRMLDVLIRHSIRQWLRLPKDVPTAYFHASTKDGGLAVPSLRTCVPDLILRRFGKLDSSRWLVARAASNSERIRRKVRWAEKQLRKFSHNAPRTGERSVRQFWREKLHTSVDGIELAESTKVPASTKWIAHNTGEMTGRDFIQCVQTHINALPSRVRNTRGRRIGRESELNCRAGCMVRETTAHTIQQCHRTHGGRILRHNCIADFLAGELVRGGWSVEQEPRIETAVGLRKPDIIATRNGAGVIVDVQVVSGRRPLDDAHRDKRTKYGSHVELVEKVADKLGLTKDHIDVTSCTVSWRGVWSLGSYRDMKRLFGLKETVYERIAARALRGSHTNWSRFNRLTTMAPRGGMS

SEQ ID NO: 22749 - protein, 1043 aa, Codatractus imalena
MKVPPDLPQESGSAPIPRSDAQPGASTGPGMSSGSICSICSRVFSTKTGLGVHVRRAHPVAANEQSAPPQVKRRWREEELELLACTEARLVGEGSVNINADLLKALPHLGRTLEAIKGVRRKESYKSNVNQKLLHKGSPSPNKHTERIGIDVGGAPPEVVVAEARPVSGCEVTPLVADQRKTNDGPSCVSVIADLLERAKARMMQGTRRSRRAGGRSDKTERKHTEVKLNAKQRRRAEYARVQELYRKCPSRAAAEVLDGQCRGVRHRLEVLEAHWRPILEAVSGAPGPTPEALRALGRDGQYGGTLNQSQLPTLWSPFTEEEVKAVKLNLRTAPGPDGIRPEDWRGVPAKTKAETFNLWMSQGEIPLPLRQCRTVFVPKKDEPAGPGDYRPISIASVPLRHMHAVLARRLEACCPPDVRQRGFIRVDGTLENSAVLDAVLGDCRRKLRECHIAVLDFSKAFDTVSHAALVSVLRGKGLPVGFCNYIARLYDTADTYLAVENDRSDPVVVGRGVRQGDPLSPLLFNMALDVILASLPKGVGYRLDGELVSALAYADDLVLLAGSKAGMQEALGVVEGVGASMGLQLNLEKSSVLSMVPDGKRKKPHYVTTRSFKLGRRWLRQVDSVEHWRYLGVDMSASGAVTLEQDVKRALVNIQRAPLKPQQRLEVVRTYLIPRFLHGLVLGSISDDRLRLLDVQIRHSVRQWLRLPKDVPVAYFHASTRDGGLAIPSLRTCVPDLIVRRFGKLDSSRWSVARAASKSERIRRKLKWAYRQLRKFSVAAPRTGEESVAQFWREKLHTSNDGIELCESSKVAASTKWITKRLEKLNGRDYIQCVHTHVNAIPSRVRTSRGRRAGRESELNCRAGCMVRETTAHAIQSCHRTHGGRILRHNCVVDFVAGELERGGWSVELEPRIETAHGLRKPDIIASKGGDAGVIIDVQVVSGRRPLDEAHRDKRTKYGGHDELVEKVADRLRVTKDHVGVTSCTVSWRGVWSLGSYREMKRLVGLKEHAFETISVLALRGSHMNWSRFCRMTTVVPRGAPD

SEQ ID NO: 22750 - protein, 915 aa, Codatractus imalena
MVTNLLMGSTPPPEDTMKSTMATDEGADRVLVDEVVTEVQPVSGPEDAPLVAGRRIDERSACVSIVEDLLERATERMMRGSVKSRGRKRKTLFTLETEGKLTSKQKRRREYARVQELFRKHPGRAAAEVLDGECRGVRHQLSELEAYWRPVLEQVSDAPGPTPEAMRALGRDGQHGGTLDRSKMIELWLPFTPQEVKATKVDLHSAPGPDGIRPDEWRAIPADTQAEIFNYWMSQGEIPLPLRQCRTVFVPKKDVPAGPGDYRPISLASVPLRHMHAILARRLMACCPPDMRQRGFICADGTLENSAVLDAVLGDCRKKLRECHIAVLDFSKAFDTVSHAALVSVLRKKGLPVGFCDYVARLYETAQTTLAVGNDRSDPVVVGRGVRQGDPLSPLLFNMALDVVLASLPKGVGYRLDGELVSALAYADDLVLLAGSKVGMQAAIDAVAEVGASLGLQLNREKSSVLSMVPDGKRKKPHYVTARSFKLGRRWLRQVESVERWRYLGVDMEASGVATLEHDLKQALDNIKKAPLKPQQRLEVVRLHLIPRFLHGLVLGNISDDRLRMLDVQLRHSVRQWLRLPKDVPTAYFHASTRDGGLAIPSLRTCVPDLVLRRFGKLDSSRWSVARAASRSERICRKLKWAERQLRKFTAETPRTGEGTVAQFWRNKLHNSVDGYELRESTKVPASTKWITKKLGDMNGRDYIQCVHTHINALPSRVRNSRGRRVGRGSELNCRAGCMVKETTAHTIQQCHRTHGGRILRHNCVADLLAKELGNSGWDVELEPRIETAAGLRKPDIVAARGCEAGVIVDVQIVSGQRPLDDAHRDKRAKYGGHGELVEKVADKLGVSKERVAVTSCTISWRGVWSLGSYREMKKLLGLKESVYERIAALAIKGSHMNWSRFNRLTTMGRHEPPD

SEQ ID NO: 22751 - protein, 914 aa, Urbanus sp.
MVTNLLMGSPSTQNKDTERVVEDVEREVPEAVVAEVRPESGSEDAPLVADLRVDDRSTCVSVVEDLLERATQRLMRGSVTSKKRYRRHKTCQKTPTEVKLNSKQRRRMEYARVQELFRKFPGRAAAEVLDGQCRGVRHRLDELEAYWRPVLEKVSDAPGPTPEALRAVRRNGQYGGTLDRLQMLKLWSPFTEEEVKEAKLDLRSAPGPDGIRPEDWRSVPARTQAEIFNCWMSQGEIPLPLRQCRTVFVPKKDEPAEPGDYRPISIASVPLRHMHALLARRLEACCPPDTRQRGFIRADGTLENSAVLDAVLGDCRKKLRECHIAVLDFAKAFDTVSHAALVSVLREKGLPVGFCDYIARLYDTAQTTLAVGNDRSEPVVVGRGVRQGDPLSPLLFNMALDVVLASLPKGVGYRLEGEQVSALAYADDLVLLAGSKVGMQAAIDAVAETGASLGLQLSREKSSVLSMVPDGKRKKPHYVTTRSFKLGRRWLRQVESEERWRYLGIELSVSGTVTLEQDVKRALENIKKAPLKPQQRLEVVRTYLIPRFLHGLVLGNITDDRLRMLDLQIRHSVRQWLRLPMDVPIGYFHASTRDGGLAIPSLRTCVPDLIQRRFGKLDSSRWSVARAASKSDRIRRKVKWAERQLRKFSADVPRTGERTVVQYWREKLHQSVDGFELRESTKVPASTKWITKKMGDLKGRDFIQCVHTHINALPSRVRNTRGRRMGRESELNCRAGCMVRETTAHTIQQCHRTHGGRILRHNCIADFIAKELGQAGWTVELEPRIETAVGLRKPDIIAAKGDGVGVIVDAQVVSGQRPLDDAHRDKRSKYGGHDELVELVADRLGLSKERVSVTSCTVSWRGVWSLGSYREMKKLLGLKEPVFERIAALALKGSHMNWSRFNRMTTRYLDEAPD

SEQ ID NO: 22752 - protein, 894 aa, Spathilepia clonius
MERSGDVDEDVVQGPPEGDVAEGRPMSGAEDAPLVAGLRDEERATSVSVVDELLERASVRMARRPAKNNLKRTHGTEGKLTSKRRRRMEYARVQELFRKFPGRAAAEVLDGQCRGVRHRLDELEAYWRPVLEKVSDAPGPTPEALRALRLNGQHGGSQDRLDMLKLWSPFTEEEVKEAKIDLRSAPGPDGIRPEDWRAVPARIQAETFNSWMSQGEVPLPLRQCRTVFVPKKDEPAGPEDYRPISIASVPLRHMHALLARRLVDCCPPDARQRGFVRADGTLENSGVLDAVLGDCRKKLRECHIAVLDFAKAFDTVSHAALVDVLRGKGLPVGFCDYIARLYDTAQTTLAVRNDRSEPVVVGRGVRQGDPLSPLLFNMALDVVLASLPKGVGYRLEGELVSALAYADDLVLLAGSKVGMQEAIDAVASTGASMGLQLSYAKTSVLSMVPDGKRKKPHYVTTRSFKLGRRWLRQVDNVEHWRYLGVEMSASGSVTMEQDVKQALDNIKRAPLKPQQRLEVVRTYLIPRFLHGLVLGNISDDRLRMLDIQIRHSVRQWLRLPKDVPIAYFHASTRDGGLAIPSLRTCVPDLILRRFGKLDSSRWSVARAASKSDRIRRKVKWAEKQLRKFSADVPRTGNRTVIQFWREKLHKSVDGFELRESTKVPASTKWISKRLGGQSGRDFIQSVHTHINALPSRVRNTRGRRTGVESELNCRAGCMVRETTAHTIQQCHRSHGGRILRHNCVANYLTRELEQAGWAVEQEPRIETAVGLRKPDIIASKGGEAGVIVDVQVVSGQRPLDDAHRDKRSKYGSHGELVEKVAGRLGLAKDHVVTTSCTVSWRGVWSLGSYREMKKLLGLSEHVYETIAALVLKGSHLNWSRFNRMTTMGRYGAPD

SEQ ID NO: 22753 - protein, 907 aa, Telegonus cellus
MGSPSTPDVTTEEINEDGGREPLDEEVAEVRPVSGSEDAPLVADLRVDDRSTCVSVVADLLERATERMMRGSVKSRRNKRNNTLLTLKSEVKLTSKRRRRMEYARVQELFRKCPGRAAAEVLDGQCRGVRHRLDELEAYWRPVLETVSDASGPTPEALRAVRRDGQYGGTLDRLQMLKLWCPFTEEEVKDAKLDPRSAPGPDGIRPEDWRTVPARTQAEIFNSWMSQGEIPLPLRQCRTVFVPKKDEPAGPGDYRPISIASVPLRHMHALLARRLEACCPPDARQRGFIRADGTLENSAVLDAVLGDCRKKLRECHIAVLDFAKAFDTVSHAALVSVLREKGLPVGFCDYIARLYDTAQTTLAVGNDRSEPVVVGRGVRQGDPLSPLLFNMALDVVLASLPKEVGYRLEGEQVSALAYADDLVLLAGSKAGMQAAIDAVAETGASLGLQLSREKSSVLSMVPDGKRKKPHYVTTRSFKLGRRWLRQVESEEHWRYLGVDMSVSGAVTIERDIKQALENIKKAPLKPQQRLEVVRTHLIPRFLHGLVLGNISDDRLRMLDVQIRHSVRQWLRLPMDVPVGYFHASTRDGGLAIPSLRTCVPDLILRRFGKLDSSRWSVARAASQSERIRRKVKWADRQLRKFSADVPRTGERTVVQYWREKLHNSVDGHELRESTKVPASTKWIAKKMGDLKGRDYIQGVHTHINALPSKVRNSRGRRMGRESELNCRAGCMVRETTAHTIQQCHRTHGGRILRHNCIADFLAEELGRAGWSVEQEPRIETAVGLRKPDIIASRGDGAGVIVDVQVVSGQRPLDDAHRDKRAKYGGHGELVEKVADKLGLTKDRVDVTSCTVSWRGVWSLGSYREMKKLLGLKETVYERIAVLALKGSHMNWSRFNRMTTMRLAESPD

SEQ ID NO: 22754 - protein, 1025 aa, Polygonus leo
MKAVGEPSVGGLQPATLREKFKAKRPNKENKGPPDRPQASGSALNFHSVARPGASEEPGTSTGFPCSECARVFTTKTGLGVHVRRAHPVTANAQSAPSQVKRRWRDEELEVLARAEARLTREGTGNMNIGLMNALPQLGRTLEAIKGVRRKETYKILVTKFLTGSPPTPERTERTDGSVVGKPPGEVVVNVRPVSEPEDAPLVADQRLDESSTCVSVIADLLERAKKRSMRGSGKSRGKNKTLRTQETEVKLTSKKRRRMEYARIQELFRKYPGRAAAEVLDGECRGVRHQLTELEAYWRPVLETVSDASGPTPEAIRALRREGQYGGKLELLKLWSPFTEDEVKAIKIDLRSAPGPDMIDPRDWYAVPAHIQAETFNTWMRQGEIPKPLRQCRTVFVPKKDVPAGPGDYRPISIASVPLRHMHAVLARRLEACCPPDVRQRGFIRADGTLENSAVLDAVLGDCRKKLRECHMAVLDFSKAFDTVSHAALVGVLREKGLPVGFCDYIARLYETAETTLAVGNDRSDPVVVGRGVRQGDPLSPLLFNMALDAILASLPKGVGYRLDGELVSALAYADDLVLLAGSKVGMQEALDAVERVGASLGLHLNREKCSVLSMVPDGKRKKPHYVTARSFKLGRRWLRQVDSVEHWRYLGVEMSASGAVTIEQDVKQALENIKKAPLKPQQRLEVVRTYLIPRFLHGLVLGNISDDRLRMLDVQIRHSVRQWLRLPKDVPVAYFHASVRDGGLAIPSLRTCVPDLVLRRFGKLDSSRWSVARAASKSERIRRKVKWAERQLRKFSADVPRTGERTVVQFWREKLHKSVDGYELRESTKVPASSKWITQKMGDLNGRDYIQCVHTHINALPSKVRNTRGRRMGRESELNCRAGCMVRETTAHTIQQCHRTHGGRILRHNCIADYLTKELEQAGWVTELEPRIETAVGLRKPDIIASRGGSVGVIVDVQVVSGQRPLDDAHRDKRSKYGGHDELVEKVADRLGLAKDRVDVTSCTVSWRGVWSLGSYREMKKLL

SEQ ID NO: 22755 - protein, 1047 aa, Astraptes hopfferi
MPPNLPQELGSVSLKNLPVVRPGDSTGPGTSSGYGCGFCGRVFSTKTGLGVHVRRGHPTVANEQSAPPQVKRRWRDEELELLASTEARLVREGAANINIGLLKALPNLGRTLEAIKGVRRKENYKNKVADLLMGSPSTPKDSSGRSTEQVDGDDERGTPDEEVADVRPESGSEDAPLVADLRRDDRSSCVSVVADLLERATERLMRGSVISKRKNKNKTLLTQKNTPKTEVKLTSKRRRRMEYARVQELFRKCPGRAAAEVLDGQCRGVRHRIDELEAYWRPLLETVSDAAGPTPEALRAARLNGQYGGTLDPLQMLKLWSPFTEEEVKEAKLDPRSAPGPDGIRPEDWRLVPAKTQAEIFNSWMSQGEIPLPLRQCRTVFVPKKDEPAGPGDYRPISIASVPLRHMHALLARRLEACCPPDARQRGFIRADGTLENSAVLDAVLGDCRKKLRECHIAVLDFAKAFATVSHAALISVLRGKGLPVGFCDYIARMYDTAQTTLAVGNDRSEPVVVGRGVRQGDPLSPLLFNMALDVVLASLPKEVGYRLEGEQVSALAYADDLVLLAGSKVGIQAAIDAVAETGASLGLQLSREKSSVLSMVPDGKRKKPHYVTTRSFKLGRRWLRQVDSEEHWRYLGVDLSVSGTVTIEQDIKRALENIKKAPLKPQQRLEVVRTHLIPRFLHGLVLGNISDDRLRMLDTQIRHSVRQWLRLPKDVPIGYFHASTRDGGLAVPSLRTCVPDLIKRRFGKLDSSRWSVARAASKSERIRRKVKWAERQLRKFSADVPRTGERTVVQYWREKLHNSVDGYELRESTKVPASTKWITKKMGDLNGRDYIQGVHTHINALPSKVRNSRGRRVGRESELNCRAGCTIRETTAHTIQQCHRTHGGRILRHNCIADYLAKELGQAGWAVEQEPRIETAVGLRKPDIIASRGDGAGVIVDVQVVSGQRPLDDAHRDKRAKYGGHGELVEKVADKLGLTKDHVNVTSCTVSWRGIWSLGSYQEVKKLLGLKETVYERIAVLALKGSHMNWSHFNRMTTRLSEGPPG

SEQ ID NO: 22756 - protein, 835 aa, Notocrypta feisthamelii
MTLRGGNKTKNPKYTRTDKMPNSRQRRRMEYAKVQELFRKSPGRAAAEILDGYSRGVRHSIEELEAYWRPILETVSDAPGPTPEALRALGRSGQYGGPLDAVKLSTLWSPFTVEEVKEARIDLRSAPGPDGIRPEEWRAVPVKTKAEIFNSWMNRGEIPEPLRQCRTVFVPKKDEPAGPGDYRPISIASVPLRHMHALLARRLEACCPPDVRQRGFVRADGTLENSAVLDAVLGDCRKKLRECHIAVLDFSKAFDTVSHAALVSVLRKKGLPVGFCDYVARLYNTAQTTLAVNNDRSEPVSVGRGVRQGDPLSPLLFNAVLDVVLASLPKEVGYRLEGERVSALAYADDLVLLAGSKVGMQEAIGAVGEVGASVGLQLNLEKSSVLSMVPDGKRKKPHYVTTRSFKLGRRWLRQVDSVEHWRYLGVEMSASGAVTLEQDVKRALDNIKKAPLKPQQRLEVVRNHLIPRFLHGLVLGSVSDDRLRMLDVQIRQSVRQWLRLPKDVPVAYFHAATRYGGLAIPSLRTCVPDLIVRRFGKLDSSRWPVAKAAAKSERIRRKVKWANKQLRKFSADVPRTGERTVAQYWSEKLYTSVDGIELKESTKVPASTKWIAKRVGGMSGRDYIQCVHTHINALPSKVRNTRGRREGRESELNCRAGCMVRETTAHTIQQCHRTHGGRILRHDCVANLIAEELGRGGWSVEQEPRIETAVGLRKPDIIASRGDGAGVVIDVQVVSGRRSLDDAHREKRAKYASHGELVERVADRLNATKDHVVVTSCTLSWRGVWSLGSYKDMKRLLGLNETVYELIASLVLRGSHMNWSRFNRMTTMKPGGVSD

SEQ ID NO: 22757 - protein, 908 aa, Codatractus alcaeus
MGSPPTPKESNKSTIATDGGADRGPLDEIAAEVLPVSGPEDAPLVAGRRIDERSTCVSIVEDLLERATERMMRGSVKSRGKKRNLVTHKTEEKLTSKQKRRREYARVQELFRKHPGRAAAEVLDGECRGVRHQLSELEAYWRPVLEQVSDAPGPTPEAFRALGRDGQHGGTLDRSKMLELWSPFTPQEVKETKVDLHSAPGPDGIRPDEWRAIPAETQAEIFNYWLNQGEIPSPLRQCRTVFVPKKEVPAGPGDYRPISIASVPLRHMHAILARRLMACCPPDTRQRGFICADGTLENSAVLDAVLGDCRKKLRECHVAVLDFSKAFDTVSHAALVSVLRKKGLPVGFCDYVARLYETAQTTLAVGNDRSDPVVVGRGVRQGDPLSPLLFNMALDVVLASLPKGVGYRLDGELVSALAYADDLVLLAGSKVGMQAAIDAVGEVGASLGLQLNREKSSVLSMVPDGKRKKPHYVTARSFKLGRRWLRQVESVERWRYLGVDMEASGVATLEHDLKQALENIKKAPLKPQQRLEVVRSHLIPRFLHGLVLGNISDDRLRMLDVQLRHSVRQWLRLPKDVPTAYFHASTRDGGLAIPSLRTCVPDLVLRRFGKLDSSRWSVARAASRSERICRKVKWAERQLRKFTVETPRTGERTVAQFWREKLHNSVDGLELRESTKVPASTKWITKKLGDMNGRDFIQCVHTHINALPSRVRNSRGRRVGRGSELNCRAGCMVKETTAHTIQQCHRTHGGRILRHNCVVDLVAKELGNAGWDVELEPRIETAAGLRKPDIIAARGGETGVIVDVQVVSGQRPLDDAHRDKRGKYGGHGELVEKVADKLGLSKERVVATSCTISWRGVWSLGSYREMKKLLGLKESVYERIAALAIKGSHMNWNRFNRLTTMNRHEPPD

SEQ ID NO: 22758 - protein, 786 aa, Cecropterus dorantes
MDGECRGVRHQLHELEAYWRPVLEKVSDASGPTPEALRAARRDGQYGGTLDRLQMLTLWSPFTEEEVKGAKLDLRTAPGPDGIRPEDWRTVPARIQAEIFNSWMSQGEIPRPLRQCRTVFVPKRDEPAGPGDYRPISIASVPLRHMHALLARRLEACCPPDARQRGFIRADGTLENSAVLDAVLGDCRKKLRECHIAVLDFAKAFDTVSHAALVGVLRGKGLPVGFCDYIARLYDTAETTLAVGNDRSEPVVVGRGVRQGDPLSPLLFNMALDVVLASLPKGVGYRLEGELVSALAYADDLVLLAGSKVGMQEAIDAVARVGESLGLQLNRDKSSVLSMVPDGKRKKPHYVTTRSFKLGRRWLRQVDSVEHWRYLGVEMSVSGTATIELDIKRALENIKKAPLKPQQRLEVVRTYLIPRFLHGLVLGNISDDRLRMLDTQIRHSVRQWLRLPKDVPIGYFHASTRDGGLAIPSLRTCVPDLIVRRFGKLDSSRWAAARAASKSERIRRKVKWAERQLRRFSADAPRTGERTVTQYWREKLHNSVDGFELRESTKVPASTKWITKKMGDLNGRDYIQSVHTHINALPSRVRNTRGRRVGRESELNCRAGCMVRETTAHTIQQCHRTHGGRILRHNCIAGFLAEELERAGWTVEQEPWIETAVGLRKPDIIASRGGEAGVIVDVQVVSGQRPLDDAHRDKRSKYGSHGELVEKVADRLGLTKDHVDVTSCTVSWRGVWSLGSYREMKTLLGLKETVYERIAVLALKGSHMNWSRFNRTTTMIPHGAPD

SEQ ID NO: 22759 - protein, 950 aa, Cupitha purreea
MKALPNLGRTLEAVKGVRRKESYKARVEEIVKSLMETPPTPSHISDSLDKTGGNGDSEDPELVVAEDRPVSEASEGALLVADQRIGEADEGPAYVPALANLLRKASARVTYESKRPMRPGGKVTTKYPSLHSERKLTSRQKRRMEYTRVQDLFRKCPGRAAAEVLDGRCRSVRHGLEEMESYWRPILEARSSATGPTPEARKALRLDGQYGGEVDRSGLPKLWSPFTVEEVKETRVDPGTAPGPDGIRPDEWRTVPAEIQAETFNLWMSQGEIPELLRQCRTVFVPKVDEPAGPGDYRPISIASVPLRHMHAFLARRLEACCPPDVRQRGFIRADGTLENSAVLDAVLGDCRSKLRECHVAVLDFSKAFDTVSHAALVGVLREKGLPEGFCAYIARMYDTAQTTLAVEKYRSDPVGVGRGVRQGDPLSPVLFNMVLDVVLAALPKGVGYRLDGELVSALAYADDLVLISGSRMGMQEAIDAVGRAGEMMGLQLNLGKSSVLSMVPDGKRKKPHFVTARSFKLGRRWLRQVDNVEHWRYLGVEMTAAGVDMLELDVKQALINVSRAPLKPQQRLEVVRTYLIPRFLHGLVLGRITDDRLRMLDIQIRLSVRQWLRLPKDVPVAYFHAATRDGGLAIPSLRTCVPDLILRRFGKLDSSRWSVARAASKSERIRRKLKWADRQLRKLSVDVPAAGERSVVWFWRNKLHASVDGTELTEAKRVPASTKWIYGKIGGLNGRDYIQCVHTHINALPSRVRNSRGRRDGRESSLNCRAGCMVSETTAHCIQSCHRTHGGRILRHDRIVGLLAGELERGGWSVEQEPRIETAVGLRKPDLIAKKEGRAGVIIDVQVVSGRRPLDDAHREKRRKYANSDGLVEEVAGRLGLAKDHVEVTSCTVSWRGVWSLGSYKDMKRLLGLKESVFEAIAVLALRGSHMNWSRFNRMTTMAPCGAVG

SEQ ID NO: 22760 - protein, 906 aa, Autochton zarex
MGSPSTPSKDTEEVVGGDEREPPGEEVTEVQPVSGPEDMPLVADLRADDRSSCVSVVEDLLARATERMMRGSVKPAKRRRHNTIRNYTEVKLNSKRRRRMEYARVQELFRKYPGRAAAEVLDGECRGVRHSLQELEAYWRPVLEEVSGASGPTPEALRAARRNGHYGGTLDRLQMLKLWSPFTEEEVKEAKLDLRSAPGPDGIRPEDWRSVPARSKAEIFNSWMSQGEIPLPLRQCRTVFVPKRDEPAGPGDYRPISIASVPLRHMHALLARRLEACCPPDARQRGFICADGTLENSAVLDAVLGDCRKKLRECHIAVLDFAKAFDTVSHAALVGVLREKGLPVGFCDYIARLYDTAQTTLAVGNDRSEPVVVGRGVRQGDPLSPLLFNMALDVVLGSLPKEVGYRLEGELVSALAYADDLVLLAGSKAGMQAAIDAVARAGESLGLQLNREKSSVLSMVPDGKRKKPHYVTTRSFKLGRRWLRQVDSVEHWRYLGVEMSVSGAATIEQDVKKALENIRKAPLKPQQRLEVVRTYLIPRFLHGFVLGNISDDRLRMLDVQIRDSVRQWLRLPKDVPIGYFHASTRDGGLAIPSLRTCVPDLIKRRFGKLDSSRWSVARAASKSERIRRKVKWAEKQLRRFSADAPRTGERTVTQYWREKLHKSVDGFELRESTKVPASTKWITKKMGDLNGRDYIQCVHTHINTLPSRVRNTRGRRMGRECELNCRAGCMVRETTAHTIQQCHRTHGGRILRHNCIAGYLTEELEQAGWSVEQEPRIETAVGLRKPDIIASLGGEAGVIVDVQVVSGQRPLDDAHRDKRSKYGGHDELVEKVADKLGLAKDRVDVTSCTVSWRGVWSLGSYRDMKKLLGLKENVYERIATLALKGSHMNWSRFNRTTTMVPLGTPD

SEQ ID NO: 22761 - protein, 1038 aa, Cecropterus phalaecus
MNKGASRLPQESGEASNFYSDVRPGDPSGPGMSSAWRCEVCGRDFTTKIGLGVHVRRAHPAVANAHSAPPQAKRRWQSEELELLASTEARLVRAGSANVNIDLLKALPNLGRTLEAIKGVRRKETYKETVNAKLLMGSPSTPNKDTEQVVEDVVRGTPEEEVAEVQPVSGSENVPLVASLGVDDRSTCDSVLEDLLERANERLLRGSVKSKRCRKPERKTGVKLNSKRRRRMEYARVQELFRKFPGRAAAEVLDGECRGVRHQLHELEAYWRPVLEKVSDASGPTPEALRAARRNGQYGGTLDRSQMLTLWSPFTEEEVKGTRPDLRSAPGPDGIRPEDWRTVPARIQAEIFNSWMSRGEIPRPLRQCRTVFVPKRDEPAGPGDYRPISIASVPLRHMHALLARRLEACCPPDARQRGFIRADGTLENSAVLDAVLGDCRKKLRECHIAVLDFAKAFDTVSHAALVSVLREKGLPVGFCDYIARLYDTAETTLAVGNDRSEPVVVGRGVRQGDPLSPLLFNMALDVVLGSLPKEVGYRLEGEQVSALAYADDLVLLAGSKAGMQAAIDAVAGAGESLGLQLSREKSSVLSMVPDGKRKKPHYVTARSFKLGRRWLRQVDSVEHWRYLGVEMSVSGAATIEQDIKQALENIKKAPLKPQQRLEVVRTHLIPRFLHGLVLGNITDDRLRMLDVQIRHSIRQWLRLPKDVPIGYFHASTRDGGLAIPSLRTCVPDLIVRRFGKLDSSRWSVARAASKSERIRRKVKWAEKQLRKFTADAPRTGERTVTQYWREKLHNSVDGIELRESTKVPASTKWITKKMGDLNGRDYIQSVHTHINTLPSRVRNTRGRRMGRESELNCRAGCMVRETTAHTIQQCHRTHGGRILRHNCIAGFLAEELERAGWSVEQEPRIVTAVGLRKPDIIASRGGEAGVIVDVQVVSGQRPLDDAHRDKRSKYGGHGELVEKVADRLGLTKDRVDVTSCTVSWRGVWSLGSYREMKKLLGLKETIYERIAVLALKGSHMNWSRFNRMTTGYPLGTPD

SEQ ID NO: 22762 - protein, 868 aa, Autochton pseudocellus
MPLVADLRGDDRSTCVSVVEDLLVRATERLMRGSVKSNSINRKRNTRARTEVKLTSKRRRRMEYARVQELFRKFPGRAAAEVLDGECRGVRHQLHELEAYWRPVLETVSDASGPTPEALRAARRNGQYGGTLDRLQMLKLWSPFTEEEVKGAKLDLRSAPGPDGIRPEDWRTVPARIQAEIFNSWMSQGEIPSQLRQCRTVFVPKRDEPAGPGDYRPISIASVPLRHMHALLARRLEACCPPDARQRGFIRADGTLENSAVLDAVLGDCRKKLRECHIAVLDFAKAFDTVSHAALVSVLREKGLPVGFCDYIARLYDTAQTTLAVGNDRSEPVVVGRGVRQGDPLSPLLFNMALDVVLASLPKEVGYRLEGELVSALAYADDLVLLAGSKAGMQAAIDAVAGAGESLGLQLNREKSSVLSMVPDGKRKKPHYVTTRSFKLGRRWLRQVDSVEHWRYLGVDMSVSGAATIELDIKQALENIQKAPLKPQQRLEVVRTYLIPRFLHGLVLGNITDDRLRMLDVQIRHSVRQWLRLPKDVPIGYFHASTRDGGLAIPSLRTCVPDLILRRFGKLDSSRWAAARAASKSERIRRKVKWAERQLRKFSADAPRTGERTVTQYWREKLHNSVDGFELRESTKVAASTKWITKKMGDLNGRDYIQSVHTHINALPSRVRNTRGRRVGRESELNCRAGCTVRETTAHTIQQCHRTHGGRILRHNCIASFLAEELERAGWSCEQEPRIETAVGLRKPDIIASRGDGAGVIVDVQVVSGQRPLDDAHRDKRSKYGGHGELVEKVADRLGLTKDRVDVTSCTVSWRGVWSLGSYREMKKLLGLKETVFERIAVLALKGSHMNWSRFNRTTTMSPHGAPD

SEQ ID NO: 22763 - protein, 937 aa, Polygonus savigny
MNIGLMNALPQLGRTLEAIKGVRRKETYKMLVTKFLKGSPPTPERTEQTDGNVVGKPPGEVVVNVRPVSEPEDAPLVADQRLDEPSTCVSVIADLLERAKKRSMRGSGKSRGKTKTLRTQETEVKLTSKKRRRMEYARIQELFRKYPSRAAAEVLDGECRSVRHRLTELEAYWRPVLETVSDASGPTPEAISALRREGQYGGKLELLKLWSPFTEDEVKAIRIDLRSAPGPDMIDPRDWYAVPAHIQAETFNTWMRQGEIPKPLRQCRTVFVPKKDVPAGPGDYRPISIASVPLRHMHAVLARRLEACCPPDVRQRGFIRADGTLENSAVLDAVLGDCRKKLRECHMAVLDFSKAFDTVSHAALVGVLREKGLPVGFCDYIARLYETAETTLAVGNDRSDPVVVGRGVRQGDPLSPLLFNMALDAILASLPKGVGYRLDGELVSALAYADDLVLLAGSKVGMQEALDAVERVGASLGLHLNREKCSVLSMVPDGKRKKPHYVTARSFKLGRRWLRQVDSVEHWRYLGVEMSASGAVTIEQDIKQALENIKKAPLKPQQRLEVVRTYLIPRFLHGLVLGNISDDRLRMLDVQIRHSVRQWLRLPKDVPVAYFHASVRDGGLAIPSLRTCVPDLVLRRFGKLDSSRWSVARAASKSERIRRKVKWAERQLRKFSADVPRTGERTVVQFWREKLHKSVDGYELRESTKVPASSKWITKKMGDLNGRDYIQCVHTHINALPSKVRNTRGRRMGRESELNCRAGCMVRETTAHTIQQCHRTHGGRILRHNCIADYLTKELEQAGWKTELEPRIETAVGLRKPDIIASRGGSVGVIVDVQVVSGQRPLDDAHRDKRSKYGGHDELVRKVADRLGLAKDRVNVTSCTVSWRGVWSLGSYREMKKLLGLKEFVYERIAALALKGSHMNWSRFNRLTTSTPHEPPD

SEQ ID NO: 22764 - protein, 1042 aa, Euphyes dion
MPPDLPQESGPAFPLSDAQPGTSAGPGLASGWTCVTCGRVFSTKTGLGVHVRRAHPVAANEQSAPPQAKRRWREEELDMLASTEARLVREGSACVNADLLKALPNLGRTLEAIKGVRRKESYKDKVQKLLSGSPPHTSDVSPGDTIGGDVVGELPDGDGAEVRPAGEPEAAQLVAGLRTEEANDRSPCVSIVADLLERATMRMTQGSRRSMKPRGQNRKTRTLHTQTGKPNARQRRRSEYARVQELFRKCPGRAAAEVLDGQYRGVRHQLSELEAYWRPVFEKVSDAPGPTPEVLRGLSHDGRYGGLLDREQLLKLWSPFTEGEVKEVKVDQKTAPGPDGIRPEDWRTVPAKIQAEIFNSWMSQGEIPEPLRQCRTVFVPKKDEPAGPGDYRPISIASVPLRHMHALLARRLEACCPPDARQRGFVRVDGTLENSAVLDAVLGDCRKKLRECHIAVLDFAKAFDTVSHAALVSVLRGKGLPVGFCDYVTRMYSSAKTTFVVGNDRSDPIAVGRGVRQGDPLSPLLFNMVLDVVLGALPKEVGYRLEGERVSALAYADDLVLLSGSTAGMQAAIDAVGETGAMVGLQLNREKSSVLSMVPDGKRKKPHYVTARSFKLGRRWLRQVESEEHWRYLGVDISASGAVTLEQDVKRALENITRAPLKPRQRLEVVRNHLIPRFLHGLVLGRVSDDRLRMLDVQIRQSVRQWLRLPKDVPIGYFHAATRDGGLAVPSLRTCVPDLIVRRFGKLDSSRWSVARAASKSERIVRKVKWAEKQLRKFSIAAPRTEERSVVRFWRSKLHSSVDGAELVESNKVPANTEWLRKGDISGRDFIQCVHTHINALPSRVRNSRGRREGRESELNCRAGCMVRETTAHTIQQCHRTHGGRILRHNCIADLLVRELEQGGWTVEQEPRIETAAGLRKPDIIASRGDGVGVIIDVQVVSGRRPLDDAHRDKRNKYGCDAGLVERVADRLRLAKDHVGVTSCTVSWRGVWSLGSYKEMKRLLGLKEAVYERIALLALRGSHMNWSRFNRMTTMVPCGALD

SEQ ID NO: 22765 - protein, 1010 aa, Epargyreus clarus
MSSGYGCDGCGRSFATKTGLGVHVRRAHPVMANAKSAPPQVKRRWRDEELELLASTEARLTREGSGNINIDLTKALPNLGRTLEAIKGVRRKEKYKEMVAKLLMGSPPTPERNRTEQVDEDVAEGPPEEVVAEVRPMSGPEDALLVADQRLDVRSTCVSVVEDLLARATERMTRGSVTSRRRKTLGFTRKDTEVKMTSKRRRRMEYARVQELFRKYPGRAAAEVLDGQCRGVRHRLDELEAFWRPILEKVSDASGPTPEALRAVRRDGQHGGTLDRLAMTKLWSPFSEEEVKEAKIDLRSAPGPDGIRPEDWRTVPAKTQAEIFNSWMSKGEIPLPLRQCRTVFVPKRDEPAGPGDYRPISIASVPLRHMHALLARRLEACCPPDARQRGFVRADGTLENSAVLDAVLGDCRKKLRECHIAVLDFAKAFDTVSHAALVSVLREKGLPGAFCDYIARLYDTAQTTLAVGNDRSEPVVVGRGVRQGDPLSPLLFNLALDVVLASLPKEVGYRLEGERVSALAYADDLVLLAGSKVGMQEAIDAVARTGEMMGLQLNREKTSVLSMVPDGKRKKPHYVTTRSFKLGRRWLRQVESEEHWRYLGVEMTSAGSVTIEQDVKKALENIKKAPLKPQQRLEVVRTYLIPRFLHGLVLGNISDDRLRMLDVQIRHSVRQWLRLPKDVPIGYFHASTRDGGLAIPSLRTCVPDLIVRRFGKLDSSRWSVARAASKSDKIRQKLKWAGRQLRKFSADAPRTGERTVAQYWRDNLHQSVDGFELRESTKVPASNKWITKPMGDLNGRDFIQCVQTHINALPSRVRNTRGRRTGRESELNCRAGCMVRETTAHTIQQCHRTHGGRILRHDCVAKYLSEELGRAGWSVEQEPRIETAVGVRKPDIIASRGGGAGVIVDVQVVSGQRPLDDAHRAKRSKYGGHGELVEKVADRLGLTKDRVEVTSCTVSWRGVWSLGSYREMKSLLGLKEPVYERISVLVLKGSHMNWSRFNRMTTMWSDEVRG

SEQ ID NO: 22766 - protein, 980 aa, Epargyreus spanna
MANAKSAPPQVKRRWRDEELELLASTEARLTREGSGNINIDLAKALPNLGRTFEAIKGVRRKEVYKEMVAKLLMGSPPTPESNRTEQVDEDVAEGPPDGVVAEVRPMSGPEDALLVADQRLDVRSTCVSVVEDLLARATERMTRGSVTSRRRKALGLTRKTTEVKMTSKRRRRLEYARVQELFRRYPGRAAAEVLDGQCRGVRHRLDELEAFWRPILEKVSDASGPTPEALRAVRRDGQHGGTLDRLAMTKLWSPFSEEEVKEAKVDLRSAPGPDGIRPEDWRTVPAKTQAEIFNSWMSRGEIPLPLRQCRTVFVPKRDEPAGPGDYRPISIASVPLRHMHALLARRLEACCPPDARQRGFVRADGTLENSAVLDAVLGDCRKKLRECHIAVLDFAKAFDTVSHAALVGVLREKGLPGAFCDYIARLYDTAQTTLAVGNDRSEPVVVGRGVRQGDPLSPLLFNLALDVVLASLPKEVGYRLEGERVSALAYADDLVLLAGSKVGMQEAIDAVARTGEMMGLQLNREKTSVLSMVPDGKRKKPHYVTTRSFKLGRRWLRQVESEEHWRYLGVEMSSSGSVTIEHDVKRALENIKKAPLKPQQRLEVVRTYLIPRFLHGLVLGNISDDRLRMLDVQIRHSVRQWLRLPKDVPIGYFHASTRDGGLAIPSLRTCVPDLIVRRFGKLDSSRWPVARAASKSDKIRQKLKWAVRQLRKFSADAPRTGERTVAQYWRDTLHQSVDGFELRESTKVPASNKWITKRMGDLNGRDYIQCVQTHINALPSRVRNTRGRRTGRESELNCRAGCMVRETTAHTIQQCHRTHGGRILRHNCVADYLSEELGRAGWSVEQEPRIETAVGVRKPDIIASRGGEAGVIVDVQVVSGQRPLDDAHRAKRSKYGGHGELVEKVADRLGLTKDRVEVTSCTVSWRGVWSLGSYREMKSLLGLKEPVYERISVLVLKGSHMNWSRFNRTTTMWSDEVRG

SEQ ID NO: 22767 - protein, 963 aa, Taractrocera maevius
MLARTEARLVREGSTNVNVDLLKALPNLGRTLEAVKGVRRKVEHKRKVEQYLATLTPQCEEQGDDCVGGETPSVEVSEVLPATEPEDAPLVADQRMAETDDRSSCAAVVDELLERATARMAQGSKRSMKARGLYKNNRTPRTQTEAKPNARQRRRMEYARVQELMQRYPSRAAAEVLDGQCNGVRHSLSELEAYWRPLLEAVSDASGPKAETLRAVKLKGQYGDALDPEKLPKLWSPFTADEVKGTKIDLRTAPGPDGIRSEDWRTVPAEIQAEIFNSWMSRGEIPEPLRQCRTVFVPKKETPAGPGDYRPISIASVPLRHMHALLARRLEACCPSDVRQRGFIRADGTAENSAVLDAVLWDCRKKLRECHMAVLDFSKAFDTVSHAALVSVLRGKGLPAGFCDYIARMYDTAKTTLTVSNDRSDPVSVGRGVRQGDPLSPLLFNMVLDVVLAALPQGVGYRLDGELVSALAYADDLVLLAGSRVGMQEAIDAVRETGEQLGLQLSREKSSVLSMVPDGKRKKPHYVTTRSFKLGRRWLRQVDSVERWRYLGVDMSASGAATIEMDIKQALDNIRKAPLKPQQRLEVVRTYLIPRFLHGLVLGNISDDRLRMLDVQIRHSVRQWLRLPKDVPTAYFHASTRDGGLAVPSLRTCVPDLILKRFGKLGSSRWPVARAASKSERIRRKLKWAEKQLHRLSGESPRNGERSVAHYWRKRLHESVDGVELCEATKVPASTKWITKKVGGLSGRDYIQCVHTHINALPSRVRNSRGRRTGRESELNCRAGCMVRETTAHTIQQCHRTHGGRIMRHNCVADIVAREMKKNGWSVEMEPRIETAVGLRKPDIIASRDGGAGVIVDVQVVSGRRPLDDAHRDKRRKYASHDELVEKVAVKLGLTKDHVEVTSCTISWRGVWSLGSYKDLKRLLGLEERVFEEIAAKVLKGSHINWSRFNRMTTMVREGSWVG

SEQ ID NO: 22768 - protein, 1082 aa, Piruna aea
MKAEGEPWCGASTPAPNGFIHAKGKDNREKRPSGLPQESGAASNPPSGDRAGASAGPSTSAGWRCDLCARVFSTKTGLGVHTRRTHPVAANAQSAPPQVKRRWRDEELELLARTEARLIGAGAACANIDLMSALPNLGRSLEAIKGVRRKAEYKKSVLAFRQQATPTPVNDVSQEEDGEQAPEDQVGEGVAGGVSPVDVVVEIQPERAGEDALLVADQQQAETEDVPECMSIVTELLERAAARRQQGGPKSMKARGKRRWKRPFFTHTEEKLSSRQRRRMEYARVQELFRKCPSRAAAEVLDGQCRGVRHDLEALEAYWRPVLERVSDAPGPTSEALKALRREGLSEGTMDVQRLWQPFTPEEVKEARIDLRSAPGPDGIRSEEWRAVPAETKAEIFNSWMSQGEIPAPLRQCRTVFVPKKEVPAGPGDYRPISIASVPLRHMHALLARRLEACCPPDVRQRGFIRADGTLENSAVLDAVLGDCRKKLRECHIAVLDFSKAFDTVSHAALVSVLREKGLPAAFCDYIARLYESAHTTLAVQNQRSEPVVVGRGVRQGDPLSPLLFNMAMDVVLASLPEGIGYRLDGELVSALAYADDLVLLAGSTVGMQEALGAVERTGEMMGLQLNREKSSVLSMVPDGKRKKPHYVTTRTFKVKGRWLRQVDNVENWRYLGVDMTASGAVTLEHDVKQALRNVTKAPLKPQQRLEVVRTYLIPRFLHGLVLGNITDDRLRMLDVQIRHSVRQWLRLPSDVPVAYFHASVGDGGLAIPSLRTCVPDLIVRRFGKLDSSRWGVAKAASKSDRIRRKLKWARRQLQKFSVENPKTGERVVARYWRESLYASVDGKELRESHHTAASTKWIKKRSSRLSGRDYVQYIHTHINALPSRVRNSRGRREGMCESKLNCRAGCMVRETTAHTIQQCHRTHGGRIERHNCVANFLAKELGDRGWTVVLEPQIKTAVGLRKPDIIASRGDEAGVIVDVQVVSGQRPLDEWHRGKRSKYGNHGELVEKVADRLGLTQDRVATTSCTISWRGVWSPGSYKEMRKLLGLKEYVFEAIVELVLRGSHMNWSRFNRMTTMGRSGA

SEQ ID NO: 22769 - protein, 854 aa, Eracon sarahburnsae
MPDCQSVVAELLERAAARGRQSGSRSMKARGKNRTRTETKLTSRRRRRNEYARVQELFRKFPGRAAAEVMDGQCRGVRHELDALEAYWRPVLEKVSGAPGPTPEARRALRRNERHGGVLDVQRLWAPFSSEEVKGSGVDLRTAPGPDGIRADEWRTVPAAVQAEIFNHWMSQGEIPEPLRRCRTVFVPKKEEPAGPGDYRPISIASVPLRHMHALLARRLEACRPPDVRQRGFIRADGTLENSAVLDAVLGDCRKKLRECHIAVLDFSKAFDTVSHAALVDVLREKGLPVGFCDYIARLYNSATTTLAANGKQSEPVVVGRGVRQGDPLSPLLFNMAMDVVLASLPKGVGYRLDGELVSALAYADDLVLLAGSKVGMQEALGAVERVGEMMGLQLNREKSSVLSMIPDGKRKKPHYVTTRTFKVRGRWLRQVDNVEHWRYLGVEMSASGACTLEHDIKEVLRNITKAPLKPQQRLEVVRTYLIPRYLHGLVLGNITDDRLRMLDVQIRHSVRQWLRLPPDVPVAYFHASVQDGGLAIPSLRTCVPDLVVRRFGKLDSSRWSVARVAANSERIRRKVKWANRQLSKFSIENPRTGEKSVKQYWRDLLHNSVDGVELRESTKTPASTKWIRDKSMQYSGRDYVQFVHTHINALPSRVRNTRGRRITGRESELNCRAGCMVRETTAHTIQQCHRTHGGRILRHNCVADYLAKEMGNRGWTVEKEPRIKTVAGLRKPDIIASREDGVGVIIDAQVVSGQRPLDESHRGKRTKYGGHDELVEKVADRLGLAKDRVTVTSCTISWRGVWSARSYKEMKELLGLKEYVYETIVGLVLRGSHTNWTRFNCLTTMMGRGRDSE

SEQ ID NO: 22770 - protein, 895 aa, Papilio phestus
MPTAMAHLGRFRKRAAATTTEGRLQSGQNPSQTSPERVQTAKHLQRLYRSNKKRAIQYVLAGQRKMCDVSISQTQQYFARQAERRDCADAWPQVLPEAEQSATENAALCAPFSRDEVVRQLKTRSITAPGPDGITYADLKKADPAGHVLLALYNAVLRTEHFPEDWKKSSTTLLHKRGDPTNLDNWRPIALGDTVPKLLSSLLAKRLKKWGMVGGSFSSAQKGFLEYEGCFEHNFVLQEIVRDARNNGEELAICWLDFSNAFNSIPHASITKALEWHRVPSPLRNLIANMIQGNSTRVRVREGWTNPIHLESGIRQGCPLSPDLFNLALEVLIREVLSTGEGYVLGGHRHTILAYADDLVVIATSQEAMQRLLTAAERGANTVGLSFNATKCATLHMNHTSGELLQTEFRIQGCAIPVLAPGDSYLHLGIPTGYQITQTPIASLREFIGDLNKIDESLLAPWQKLDAVRTFLAPRLDFIMQGGTIEKEYLNEVDKKLKRYAKKWLSLPQRASAEMVFLPPARGGAGILPLSVQYDLLTVAHSYRMLHARDTTVSDLAKHLLQETVSVRMRKQANATEQAAYLSGSLDMPRSSARSNYWSQVRSATTRLKALIALNWRSVSSGGLEIYAEESFIASPENSFGIIRLLRRRLVDMYTKRLSAKQDQGRVFDAVHRDRFSNHFLRSGQFTRFCDWRFIHRARLGVLPLNACQRWASEADKRCRRCGYACESTAHVLSSCAPHYATRQRRHNAIQDRLVRATKCSGTIAVNQTVAGTRGQAASLRPDIVVRDEGNKKILIVDVTVPFENRWSALRRARREKQEKYRLLAQQLENAGYAVETDAFIVGALGAWYANNEKIIRTLKISKHYAMLMRKLMISETIQWSRNIYVEHVSGIRQY

SEQ ID NO: 22771 - protein, 1112 aa, Papilio dardanus
MADAGTYFHGLPVPDGPLPCPLSPRRYYNGASRLESLTRHLKEAHQMSVSYKCRICGFIPATGARGYPRKLVMNHVASAHPEVQAVRTGATDSERRARARAVLEASPPAGQPVPGVAERNPPGSETNEVNVPADQGQPDPIMEIPATTAEVNTETILPQVPLQSPSTDIRQDSTSDLRNILQSRSPHRPQTGRPPAMVQELVDRLNGAHSPSELDEALPATMAHLGRFTKRVADRPEEGRTQSGQNPSRTAPDRLQAAKRIQRLYRSCRKRAIQQVLEGQRKLCGVAIRETQDYFARQAERRNGAEDWPRALGETEPRAVDNAALCSPFMRNEVTRQLKTRSTTAPGPDGITYADLKKADPGGHVLVALYNAVLRTEHFPEDWKKSSTTLLHKKGDTGILDNWRPIALGDTVPKLLTSLLAKRLKQWGKVSGCFSSAQKGFLEYEGCFEHNFVLQEIMRNARHNGAELVIGWLDLSNAFNSIPHTSIKKALELHRMPSPLKNLIADMIEGNSTRVRVKEGWTDSILLESGIRQGCPLSPDLFNLTLEILIREILSTGEGYTLGGHRHTVLAYADDLVVISENQEAMQRILTAAERGANIVGLSFNARKCGTLHMDHASGEVLQTAFHIQGCTIPVLAPGDTYLHLGIPTGYQIKQTPVASLRELVADLNKIDESLLAPWQKLDAVRTFLAPRLDFIMQGGTIEKEYLNEVDKSLKRYAKKWMSLPQRASAEMVFVPPARGGAGILPLAVQYDMLTVAHSFRMLYARDPIVRDLAKHLLQETVSERIREPASAAEWAAYLSGSLNMPRSSARSTYWSQVRTASMRLKALITLNWRSVSGDGLEIYAGDTFIASPENSSNIIRMLRRQLVDMYTKRLSAKQDQGRAFDAVHRDRSSNHFLRNGQFVRFCDWRFIHRARLGVLPLNACQRWSSENDKRCRRCGYASESTAHVLSHCAPHFATRQRRHNAIQGRLVKAIKCPGTITVNQTVPGTRGQAASMRPDIVVRDEANKRVLIVDITVPFENRWSALRRARGEKQRKYRLLAQQLENAGYAVETEAFIVGALGAWHPNNEKIMRTLKVSKYYAALMRKLMVCETLQWSRNIYTEHVSGIRQY

SEQ ID NO: 22772 - protein, 1112 aa, Papilio polytes
MTTANPHYHDLPVLDGPLPCPFSPRRTYKGVSRVESLTRHLREAHQIGVAYRCRICGFVPDIGARGYPRKLVMNHVAAAHPEIELTRTGAVDSERRARTRAALEHASPQTARSAIPPIADSSPLRLGNEVIGVSADQERTEPINEIPASAANTDYISPQETITRQIDNTGQDHITDSTTQLQPRSPLRPRTDRPPALVQELVDRLNNVHTANELDEVMPTAMAHLGRFRKRAAATTTEGRLQSGQNPSQTSPERVQTAKHLQRLYRSNKKRAIQYVLAGQRKMCDVSISQTQQYFARQAERRDCADAWPQVLSEAEQSATENAALCAPFSRDEVVRQLKTRSITAPGPDGITYADLKKADPAGHVLLALYNAVLRTEHFPEDWKKSSTTLLHKRGDPTNLDNWRPIALGDTVPKLLSSLLAKRLKKWGMVGGNFSSAQKGFLEYEGCFEHNFVLQEIVRDARNNGAELAICWLDFSNAFNSIPHASITKALEWHRVPSPLRNLIANMIQGNTTRVRVREGWTNSIHLESGIRQGCPLSPDLFNLALEVLIREVLSTGEGYVLGGHRHTILAYADDLVVIAKSQEAMQRLLTAAERGANTVGLSFNATKCATLHMNHTSGELLQTEFRIQGCAIPVLAPGDSYLHLGIPTGYQITQTPIASLREFIGDLNKIDESLLAPWQKLDAVRTFLAPRLDFIMQGGTIEKGYLNEVDKKLKRYAKKWLSLPQRASAEIVFLPPARGGAGILPLSVQYDLLTVAHSYRMLHARDTTVSDLAKHLLQETVSVRMRKQANATEQAAYLSGSLDMPRSSARSNYWSQVRSATTRLKALIALNWRSVSSGGLEIYAEESFIASPENSFSIIRLLRRQLVDMYTKRLSAKQDQGRVFDAVHRDRFSNHFLRSGQFTRFCDWRFIHRARLGVLPLNACQRWASEADKRCRRCGYACESTAHVLSSCAPHYATRQRRHNAIQDRLVRATKCSGTIAVNQTVAGTRGQAASLRPDIVVRDEGNKKILIVDVTVPFENRWSALRRARREKQEKYRLLAQQLENAGYAVETDAFIVGALGAWYANNEKIIRTLKISKHYAMLMRKLMISDTIQWSRNIYVEHVSGIRQY

SEQ ID NO: 22773 - protein, 1112 aa, Papilio ambrax
MTNANPHYHDLPVLDGPLPCPFSPRRTYKGASRVESLTRHLREAHQIGVAYRCRICGFIPDIGARGYPRKLVMNHVAAAHPEMELTRTGAVDSERRARTRAALVHASPQTARSSIPPIADSSPLRLGNEVIGVSADQEHTEPINEIPASAVNAEYISPQETITRQTDNTGQEHITDSTTRLQPRSPLRPPTNRPPAIVQELVDRLNNVHTPNELDEVMPTAMAHLGRFRKRAAATTTEGRLQSGQNPSQTSPERVQTAKHLQRLYRSNKKRAIQYVLAGQRKMCDVSISQTQQYFARQAERRDCADAWPQVLSEAEQSATENAALCAPFSRDEVVRQLKTRSITAPGPDGITYADLKKADPAGHVLLALYNAVLRTEHFPEDWKKSSTTLLHKRGDPTNLDNWRPIALGDTVPKLLSSLLAKRLKKWGMVGGSFSSAQKGFLEYEGCFEHNFVLQEIVRDARNNGAELAICWLDFSNAFNSIPHASITKALEWHRVPSPLRNLIANMIQGNSTRVRVREGWTNSIHLESGIRQGCPLSPDLFNLALEVLIREVLSTGEGYVLGGHRHTILAYADDLVVIAKSQEAMQRLLTAAERGANTVGLSFNATKCATLHMNHTSGELLQTEFRIQGCAIPVLAPGDSYLHLGIPTGYQITQTPIASLREFIGDLNKIDESLLAPWQKLDAVRTFLAPRLDFIMQGGTIEKEYLNEVDKKLKRYAKKWLSLPQRASAEMVFLPPARGGAGILPLSVQYDLLTVAHSYRMLHARDTTVSDLAKHLLEETVSVRMRKQANATEQAAYLSGSLDMPRSSARSNYWSQVRSATTRLKALIALNWRSVSSGGLEIYAEESFIASPENSFGIIRLLRRRLVDMYTKRLSAKQDQGRVFDAVHRDRFSNHFLRSGQFTRFCDWRFIHRARLGVLPLNACQRWASEADKRCRRCGYACESTAHVLSSCAPHYATRQRRHNAIQDRLVRATKCSGTIAVNQTVAGTRGQAASLRPDIVVRDEGNKKILIVDVTVPFENRWSALRRARREKQEKYRLLAQQLENAGYAVETDAFIVGALGAWYANNEKIIRTLKISKHYAMLMRKLMISETIQWSRNIYVEHVSGIRQY

SEQ ID NO: 22774 - protein, 1113 aa, Ophraella communa
MNTNVMRCYFKATNLETITIGYRPEFHRLFTDIYPELGELVTKQRLADQKRVILTNKKLTNREIQRIKEEIATEMDNQGNHQDHNNHQQENQKDTGPNEEDTLEVNLTEIPENQIPIQTDETIHTTTHNEIDNEIQSNIIKWKGLSPSNRLALPKVIFNIKTNNIINDINIKLCNYTEETKTLEDTHLLIYAAATTALQLNKQNITERTEQRKGKITPKWQSRLENKIDNLRKEIGRLTQYIKGNRSIKITKLIQIITNKYNETPHETLDTLKQKLAVFSTRLKRYKESNERKIQNSQFTRSEKNFYRNIEKQEQTQIIPPRKHTIKHFWESIWTQPVIHNHKATWINAEQEKQVNTPQQIDYIITTEELTKTIQTSHNWKAAGTDHIHNFWYKKFTSLHPVLTQQINEIIVDPHKMPTFLTEGRTFIKPKNAETQNPENYRPITCLPTLYKIITAVITQKIDRHLTQHNILTEEQKGCRKHSKGCKEQIIIDSVVMNQVEKQNRNIVTCYIDYKKAFDSVPHSWLLEILKIYKIDEHLQYFLSITMKSWRTRIILATEKEYIETDEIKINRGIFQGDSLSALWFCLCLNPLSNLLNSTTYGFKIKNHNSEHKINHLLYMDDIKLFAPNKTEMQGLLKIVEELTTDTGMEFGIEKCKMLHVYKGKVNTRETTQTLNNEQLKNMQTEETYKYLGFEQNTKINHTHLKQQLKRKYKHRLTLILKSKLNSKNLFKAINTFAIPVLTYSFGIIKWTSTDLEELNRLTRTTLTQYNKHHPHSCIERITIIRKEGGRGLIDIQTLHNSQIASLRKYFQNKNTPIHQSIMQADKQYTPLNLSKRNIQEEIQPPQTENKKEQWAKKPLHGRHYNITQDPHIDRELIYKWLALGQLFPETEGFVLAIQDNVIATRNYRKYILKENIDNDMCRKCHQFKETIEHITGGCKLLAGTDYTDRHNTAGKIIHLELAFKHKLIETKIPYYQYTPENVLENNDYKLYWDRTIYTDKTIPCNRPDITLINKKTNKTYLIDISIPNDINILQKQQEKITKYTPLAYELRELWKQEQVTIVPIIISATGVTPKSFKNYLQTLDIHPNIHSTIQKAVILKTASIVRKFLLLE

SEQ ID NO: 22775 - protein, 768 aa, Ophraella communa
MEEPEITENTLAEVIQDTHSWKSPGSDKIYNYWYKKLTCTHRKLAEFINDFIKNPDKMPLFLTKGITYLLPKGKISQDPSKYRPITCLQTGYKIITSCITRLLTAHLENQGIMTEEQKGCRKGTKGCKEQLVIDSIILSEVKKKNRKLSCCYVDYQKAYDSVPHPWLIKVLQIYKVHPTLVTFLKSTMENWRTEIQLNNIPTPTTQQKTSSTPMTSPEIQITRGIYQGDALSPLWFCMALNPLSKQLNRTGIGYTLKNGQATHIISHQLYMDDLKLYATSQDKLKELIMTVDKFSTDICMTFGLDKCKTIQIDKGKIQTGNVQLADGGLIESMDQQDVYKYLGYQQARTIEQTKIKESIKKEYMNRVYKVCKTELNSRNIFKALNTLAIPILTYSFGVIRWTETDLDNIMRKTRTALTEFRKHHPKSSTLRMMLPRKEGGRGLIDVKNLHNNQVKMLRTYFQGRKETSPLHQLVCLTDKGYTPLNLASEETQKNETIVRLEEKHQEWRSKALHGRHPHDLDQPHVDKQASNEWLRAGELFPETEGFLMAIQDQVVHTKNYRKHIVKEPGLTDDRCRKCMDKPETIQHITAACRTSSQNDYLHRHNQVTAIVHQEICHNLGMLKEKRKTPYYEYTPAAVVQKDHLTVYYDRSIITDRTISCNKPDIVIRDRTKKEAYIIDIAVPNTHNLMSTITEKKRKYTDLADEIKNMWNINKVTIVPIVLSATGVIPKDLHKSLKTLALNNNLYKLMQKAVVLNTTRIVRRFLSQE

SEQ ID NO: 22776 - protein, 1191 aa, Clytia hemisphaerica
MDTQQNVTDVQPADLQENRTRNIQNNRRQRTKWTKDMNIDVMRCYFETILRDPEQPYRKQFHQRWMLLHPEAPNTEQRICDQLRQIEKKINTRENTRGSWLTEIEVDDMRRTIQSEINDERHQPVYQPNQEENQTNQPDQPAETEENLPPPPLPPPAIQPNVEPLAEHIENENQDEIDRVRTMISRMYAIANITPFEDRYTFRKPGKKQEFELKKALQKINKALEGMPLLTDISDVNQLNDVTYGCAFLSIKIAQLEKQCLVRKQDRRQTKRSNWQHQMKVRIDNLRTDINKIEQMSIVDPSSKIKRNNNSMKIKFSIQDEQSRIQILETLKQRLMALNNRLKRFIKREKQYHHNNTFENDPGKFYDEVRDNKIHISEPPTEQDINSFWKPIFNNEQHYNQDAYWLDEYTNDVNEQIVESEYQPITSEEVKSATSKFQNWKSPGIDKIHNFWWCYLTNLHPKIADILHQTMVNPNETPQWLTTGRTTLVAKKPETRNPANYRPITCLPIIYKILTNIITNRMKDHIDQNHLVPDEQKGCSAKTYGTIDQLAVNAMVMSDAVKKCRNISTAWIDYKKAFDSIPHDWLIESLKIHKFDPTTINFFSKTIQNWQTSLHLHTDEVEIASEMFQIKNGIFQGDSPSGLHFVICLLPLTWLLNKTNIGYKLSNSDQKISHLMFMDDLKLYAPNDKLMNNLIDIVKRFSDDIKMSFGIEKCNTLTIIRGKVKRSNNTRLDNGEEIKSLNNQEYYKYLGFKEQDQLSPNTKAALKVEYFTRIKKILKTELNSKNTITAINAYAVPALSYGFQIVDWSITELEAIDRSTRTLLQQYHLMHHQSDILRIYLPRKSGGRGLINITNHYKKTIINFSHYLKNTNEPLLQAVSNWQLIRGQKSIHAKAVQYCEELNIDHQQTQTLSKLQLKQTIKKQYIESMTNSLLQKPLHGQHFRQLQQPHIDSTKSNLWLKSSTLKRSTESTICAIQEQSITTKYIKKHIHHSTNDDSCRICRSSKETIHHIISGCTALAPTKYLKRHNDLAKYLHILLLQKHQLDTTDHLWYNYTPPPVIENQQIKILWDFSIQTDHHLQHNKPDILILHKTQRKAIIVDIAIPNDSNIATKRIDKIRKYTDLAIELKAMWNLDKVEIVPFVIGATGVFYKEFDKDIEKLELNGMLRHEMCQKIILLGTAHIVRAFMQIS

SEQ ID NO: 22777 - protein, 1126 aa, Clytia hemisphaerica
MLLHPEAPNTEQRICDQLRQIEKKINTRENTIGSWLTEIEVDDMRRTIQSEINDERHQPVYQPNQEENQTNQPDQPAETEENLPPPPLPPPAIQPNVEPLAEHIENENQDEIDRVRTMISRMYAIANITPFEDRYTFRKPGKKQEFELKKALQKINKALEGMPLLTDISDVNQLNDVTYGCAFLSIKIAQLEKQCLVRKQDRRQTKRSNWQHQMKVRIDNLRTDINKIEQMSIVDPSSKIKRNNNSMKIKFSIQDEQSRIQILETLKQRLMALNNRLKRFIKREKQYHHNNTFENDPGKFYDEVRDNKIHISEPPTEQDINSFWKPIFNNEQHYNQDAYWLDEYTNDVNEQIVESEYQPITSEEVKSATSKFQNWKSPGIDKIHNFWWCYLTNLHPKIADILHQTINNPNDTPQWLTTGRTTLVPKKAETRNPANYRPITCLPIIYKIMTSIITNRMKNHIDQNHLVPDEQKGCSNKTYGTIDQLAVNAMVMSDAVKKCRNISTAWIDYKKAFDSIPHDWLIESLKIHKFDPTTINFFSKTIQNWRTSLHLHTDEVEISSEMFQIKNGIFQGDSPSGLHFVICLLPLTWLLNKTNIGYKLSNSDQKISHLMFMDDLKLYAPNDKLMNNLIDIVKRFSDDIKMSFGIEKCNTLTIIRGKVKRSNNTRLDNGEEIKSLNNQEYYKYLGFKDQDQLSPNTKAALKVEYFTRIKKILKTELNSKNTITAINAYAVPALSYGFQIVDWSITELEAIDRSTRTLLQQYHLMHHQSDILRIYLPRKSGGRGLVNITNHYKKTIINFSHYLKNTNEPLLQAVSNWQLIRGQKSIHAKAVQYCEELNIDHQQTQTLSKLQLKQTIKKQYIESMTNSLLQKPLHGQHFRQLQQPHIDSTKSNLWLKSSTLKRSTESTICAIQEQSITTKYIKKHIHHSTNDDSCRICRSSKETIHHIISGCTALAPTKYLKRHNDLAKYLHILLLQKHQLDTTDHLWYNYTPPPVIENHQIKILWDFSIQTDHHLQHNKPDILILHKTQRKAIIVDIAIPNDSNIATKRIDKIRKYTDLAIELKAMWNLDKVEIVPFVIGATGVFYKEFDKDIEKLELNGMLRHEMCQKIILLGTAHIVRAFMQIS

SEQ ID NO: 22778 - protein, 908 aa, Pogonognathellus flavescens
MNDLTNSTSNTAHPRPDLSQNVRNLRSTCRNKGAGYDENSTSNEELYENENKSQCDICKKYYKSVPIHKSKSHPAEYRQSLSGEYKSPPSQKLNKEQDDYDDDLNTFLIKENDPLLEGLKSQIQDFDLIFDSLLKNEPNFEKFELEVKNFTELMKNALQYLPGPKHPNTKFYLARKNKKTFQNKTCSYSSTTNPVRKSKRQTHRRTEKYQYEKIQFLYYNQRKKACNMIMNTQSNNKCKIDINILHKSFQDRWGNTNDNVRQSYDTFLTIDSQYKLDSEFNHIISADEISKSIKGINFDTAPGKDGVLIRSLKQLPVDKTLALIASIMLHWSFTPSCFLEAKTILVFKGEDEMNTSNWRPISVCSILRRVIERVLERRLRQYIKNNDFQNGFTKNPGAHENCSIVAALLRKAKYKKEDLSLIFLDVVKAYDMIGYKHLRNTLQALEIPTALRNTVLCLVENNSTTIHNNGNQSQKIHFKRGLLQGAPLSPLLFNICIDFILDALTEREISDEYGKCLIETLPSLTALGFADDLLNIGKDKSSATELLSSTNQKLNEIGLELNPNKSKAIIILKGKIQNEDIRLNDQITISSIKENENIKYLGISFHDEILMDENKIITGLTNNLQCVTSTTMLKPHQKLTILNNYIWPKLIYPFQAAPLHKIKKGFLNDVDKLLRSSVKEILTIPSDANTSFLYSPKDFKGLGLINAGWEAFIQQINISQILIKSNNAYVNQSRDMKKELQICIKKMDLESEVKEIPIGCYSSSHLRTCLRKKEFDKWCSLPNKGKGISLFKQTPKYNKWFSKKQGLTDSEWTTAIKILNNVTAVRGTPGRSIDGNQCRVKTCTEYETLPHVIGYCSSGYLLRNNRHNIIRTKIADSIRETKKEWTVQEEIHCQLINEANGRVDILAF

SEQ ID NO: 22779 - protein, 930 aa, Amphibalanus amphitrite
MYQYLKERFGTITPSQPRTRSTVKDRNMEHLRQRKNALKKRFKKALRNETKEEDIFQIRKEFAYVMRLHNKIRKLLEKKTKRRNKEKASNSFRKDPYGYSKRLLEPTKKQEIQFSKNDAETYYNTIYKDAERDRAFEATESMDRPRQPTFPISTAPPKWHEMQSIIRKTRNKSAPGPNGIPYIVYKKCPRIMGHVFKLFVRIWKSGKIPPQWRTGRVTLIPKSDNPSSPGECRPIVLSNASGKLFFQVIARRLLKFLVTNDYLQTSVQKGFLPGISGCVEHTQALMEALQDAKRRKKEITVCWLDLANAYGSVSHNLIQFAAEWYHVPDILRKIIHSYYDDLAVKISTHEWTTDKISYEQGLFQGCPLSVVLFLMVFQICLDQLSKHSSRGYNVGTGSPHNQRAYADDLTLIAKNKTSAEMMLATVEHFLRWSATMRAKPAKCRSLSFVKIPGTSTMAPTDPELFIHGEAIPFIHQEPMKFLGQLIFKDLSDTSVRNATTDKLLLMLKTVDADPVPNTGKLWIYEHMIVSKLSWEFTIYCFPITFAKKLESLATPYLKKWAGLTRSTTTSVLYRSHGSGGLHLTPLTSRLKCLQLVKFHQLKYAVDNSTQFIYGHIANRLRSKKHWNGVRELEERERHLALNELCRGNFGRAGLGLIPLPRASKMTPKQHRQELSCLVKQSEEENALVYVYNMAKQGRPLAWEAVMFLDVRWRKLIYGFSDKLLSFYLNSMSDTLPSPANLLLWKKSTLGSCSLCGYHHCTLFHIISNCRYSLMTGRYNWRHDMVLRRLIEIIRPVLEKTDAPKKGTHFKSSSGTEYYVPPLQRNTERGKPAADDWQLIWDEEHDTYVFPPQIASTNARPDIAIWSTATKTCIVAELTVCWEENFYQAHERKQGKKDYIDLINTGRKNGWHMHYFAVEVGARGVTSDSLF

SEQ ID NO: 22780 - protein, 972 aa, Dicyrtomina minuta
MVKKKKTDLQPEQCPFCDKMYKGLKRHISCAHPEESRKAITATYNPPTQLEDEPESVYATPEEIAANKKIKDKMTYYADIFQTMVNKRPEEIEFSTTVDDFSGFLLSAMEILPGPKHPSTKFIEARKRKTTFVQNDKKFDSSKNPQRSSQRDRQRRKAQYNYEVIQHLFHYSRKKAVRILMSSSFGSENCTIPLETLHASYQDRWGSPNDCILEDYGPNLDPVEQNVIDNGYSSLITPEEIESSVRGINNDSASGIDGVPIRLIKKIGKDCYLVISQIASIMLKWNLVPSSFKKARTILILKDKDKKEEIGSWRPISICSILRRVIERVLDRSLDQYIILNENQVGFTKHPGTYINTSIVNGCLAKAKQQKLDCCIVFLDVRKAFEESSHAHIEKKLQHMAIPSNLRNLTISLMQENTSQLQTQSGMSKPILVQRSVFQGSPLSPRLFNLSIDHVLKELTEHEISKEYGFPIHCDIPNISARGFADDVALFAHSVEAAKVLTKIAIDNFRKVGYEINFEKSKIINIRKGTLSEDPLILDANCKITAIKSGERIRYLGVNFTDEIIFDPAKVIKNFGKDLQNLVGTPMLYPNQKLKIINQYLWPSLIYPLQTAPLHKLSSKFLLDLDKMVKSSVKEIIGLPADTPDAMLYATKSHRGLQIVRATWEAFIQQYNICVSLLSSKDKYIPYVRKVEDEMQQCISSLKLDANEIDALVASRPKTKPGQILRKKLRDREYDKWCELPQKGIGVKVFQEYPTGNRIIMNKEGLTSSEWVSILKMSANVYPVKSIPGRCLGEPCCRHCNKRETLSHVLGSCSRGDLLRNTRHHEIRSIIAKYLRKAFSGAQRFWKVHEEVTCTATSQRVDILCYDEQSRVGYIIDPTVRFEKNVDQANEVDLEKQAIYNQCIPFFTKQYGLEKMEVIGLLVGARGTITQFFEDFRKRFILPHSMVKEVILAAIRGSNRIAHHHLYALTST

SEQ ID NO: 22781 - protein, 1039 aa, Sceloporus undulatus
MAKCKSNGTTAGMLDGMECCQCGDKFETISGLSQHKRHKHPDQRNKERIGKEVEEESRRNRENNRGKHKSCWTEEEVEQLELLWMKYEGHKNINKLIESELTTKTAKQISDKRRLIELKRKRVKKDKDDFLLGATTCTPPPSPIGGGAGVKVVGLEEELERKAKEWVENGTIVNKNIKQVIEIWLVDKKMAIKRIEEITKEIVENIKAQESKKRKITKKTKDKVGRRKGNKRWMKKRAIKKWTYKRIQQMYRKDTAAVAKYIMDGEAKSECDLNVKEVYENYKSKWESGGEFKGLIGFEGGQRVRNEVFERLITIEELEENCKKIKKKTAAGPDNINAKDLIREGCKETLVELFNAWLIIGEVPNIIKTSRSILIPKTTDINKRKDINNWRPLTISSIILRLFSRILTARLKEGSSINVRQRGFIESNGCAENLWLLKKIIKKAKEEKKELGVVFIDIAKAFDTVSHDHIRWALEEKRMDQHLIKIIMSSYKEARTTFEIKKGNTPEIKLEKGVKQGDPMSPWLFNLAIDPLIIKLEGEENRLEGVNQSISSLAFADDIVIISDSHKEMGEKLKILQDFSEKSGLKIQMAKTRGFFLKPTRDSFVVNNEEKWKLGEECIEWIYPGEEIKYLGIKCNPWVGICREDDLNIVEDWLKKIDKAALKPTQKVEIAQKYMIPRLIYKNEYAETSKLKLKRIDDLIRIKIKKWLHLPASTCTEFVYARNRDGGLGITRIEKVVIEGRCKMVQKIAIALDETAKKIVFNKGVKEEVQKYWLMAGGSVETVPENIERITEIKIPENNKKMFEKWKEYPCQGRGVPIFVNDKTSNHWFRKMRDLNNREYITALKMRTNVYPTREFIGRGQMDAIRKCRKCDANVESLPHILGQCPAIQQGRIWRHNKLVDLLANEAKNKRWTVHREPHIRNERNILRKPDLIFVKNKEAMVVDMTVRWESEIDTLEKAAREKVDYYKNLKEIVKMQFEVDKVKFYGFVCGARGKWPKGNFEILKHLGISGKKATHIAETFVRRTIQYSTRMIQMWENG

SEQ ID NO: 22782 - protein, 1243 aa, Sceloporus tristichus
MTILETCKGVNPAGENSVRVVPVGKETPRIQRTEKDGLEITAESHHARNNKEEGSSKSNNNPELTESTRHDDDDLTLRPDDKTEPVTNPTDTARQLDPMGQLNICMDAVNDSEISLEQQERRMGDQKETNGLDSQVGINSLDQGGNVVIKLGVEKPACPFCNNIVGKPTALDNHIKGSHGGKKVVYECNKCNRRDERVHSTLVHMAKCKSKGVTANVLGGIECCQCGVKFGTMIGLSQHKRHKHPHQRNKERIGKEVEKDSRRTRENNRGKHKSCWSEEEVEQLELLWLKYEGHKNINKLIESELITKTAKQISDKRRVIELKRNRVKQDKDDLLLGATARTPPPPSIGGGAGVRVVGLEEGFERKAKEWIEKGTFVNKAIKQVIEIWLVDKKRAIKRLAKITEEMLENSKVQESRKSKMINKKKDKIRKRKGNKNWMKKRAVRKWTYKRIQQMYRKDTAAVAKYILDGEAKIECELNVKDVYENYKSKWESVGEFKGLDGFEGGQRVNNEVFEKLIMIEELEENCRKIKKKTAAGPDNITVKDLTRDGCKQNLVELFNAWLITSEVPDIMKISRSILIPKMTDLNKRKDINNWRPLTISSIILRLFSRILTARLKEASSINVRQRGFIESNGCAENLWLLKKIIKMAEEEKKELGVVFIDVAKAFDTISHDHIRWVLEQKRMDQHLIKIIMSSYKEATTKFEVKKGNTPEIKLEKGVKQGDPMSPWLFNLAIDPLIIKLEGEDNNPEGENWPISTLAFADDIVIISNNYRKMCENLKILQEFSEKSGLKIQMAKTRGFFLKPTRDSFVVNNEEKWKLGKECLKWIYPGEEVKYLGIKCNPWVGICKEDNMSIVDEWLKKIEKAALKPTQRIEIVQKYMIPRLIYKNEYAETSRLMLKKLDDLIRIKIKKWLHLPASTRTEFVYTKNRDGGLGITRMERVVTEGRCKMVQKVAISLDEAAKKIVFNNGVREEIQKYWLMAGGSMDTVPENVKTIKEIKILENKKKAIEKWKEYPCQGRGVPIFVNDKISNHWLRERKDLNNREYITALKLRTNVYPTREFLGRGQIDAVRNCRKCDANIESLPHILGQCPAVQQGRIWRHNKLADLLANEVKKKGWTVYREPHIRNDQNILRKPDLVFVKNREAAVVDMTVRWESEIDTLEKAAREKVCYYENLKEIVSKQFDVDNVKFYGFVCGARGKWPKGNLEILKHLGISGSKATHIAEIFVRRTIQYSGRMIQMWQNG

SEQ ID NO: 22783 - protein, 859 aa, Sceloporus undulatus
MEIWLVDKKKAIKRIEEITKEIVGNMKGQESKKRKIIKKMKEKVGRRKGNKKWMKKRAIRKWTYKRIQLMYRRDTAAVAKYIMDGEAKIECELNVNEVYENYKFKWESGGEFKGLIGFGGGQRVRNEVFERLITIEELEENCKKIKKKTAAGPDNINAKDLMREGCKQTLVEMFNAWLIAGEVPNIIKASRSILIPKTTDLNKRKDINNWRPLTISSIILRLFSRILTARLKEGSTINVRQRGFIESNGCAENLWLLKKIIKKAKEGKKELGVVFIDIAKAFDTVSHDHIRWALEDKGMDQHLIKLIMSSYKEARTTFEIKKGKTSEIKIEKGVKQGDPMSPWLFNLAIDPLIRKLEGEENRVEGVNHSISSLAFADDIAIISDSYEEMGEKLKILQEFSDKTGLKIQMAKTRGFFLKPTRDSFVVNNVDKWKMGEESIDWIYPGEEIKYLGIKCNPWVGICKEEDLNIVEDWLKKIDKAALKPTQKVEIVQKYMIPRLIYRNEYAETSKLKLKKIDDVIRIKIKKWLHLPASTCTEFIYARNRDGGLGIVRIEKVVVEGRCKMIQKMAIALDETAKRIVFNNGVKEEVQKYWLMAGGSVETIPENIEGTKEIKIPENNKKRLEKWKEYPCQGRGVPIFVNDKTSNHWLKKTRDLNNREYITALKMRTNVYPTREFIGRGQTDAIKKCRKCEANVESLPHILGQCPAIQQGRIWRHNKLVDLLAKEAKNKRWIVHKEPHIRNERNVLRKPDLIFVNNKEAMVIDITVRWESEIDTLEKAAREKVEYYKNLKEIIKRQFDVDNVKFYGFVCGTRGKWPKGNFEILKQLGISGKKATQIAETFVRRTIQYSSRMIQMWENG

SEQ ID NO: 22784 - protein, 1137 aa, Ceratina japonica
MFDATAEGASDTEVPGPGTSVADLSAMDRRAINDEPSNVPGHDFVFVIGMPFGGPITCPQCRADNRNIIFIKEKDFLAHQESLHAGAVRLWECTPCKKRFEKLHSWRCHFPKCKGAPPVEKGDHVCQECGMTFMSNRGLGQHERIRHPALRNEKRSQAAASGGRPGRRATVWSEEETKLLVELNERFKNERFPNKKIGEFLPNKTLRQIKDKRWQINQLQLRPGVVEEEEAEEGGSSSSEASFEDAREDPDTDIEERLEIWEESLRRAIHAHPLKDDNAFKTLEGMIRDLAGTSLSSQESAIGIERAVEWLTEKLLEGSEEATPPRRARRERHRGAPIRSNHVGRRKFDYARYQEIYKECPRRLADMAVSGRLVESAAAELPNRDDTKMLYDELWGTAGPNTGLPRVACSSRSSYPIDEVILPITPQDLVVKMRTVKTNTAAGVDRVRKSHLRKEGALQVLTKLFNLLLLHRYYPACWKVNRTTLIPKVGKDTSDVRNWRPITIGSLVGRLFSSMIDVMLRRKVQQHPRQKGFTHEDGCKNNIAILDYAIKTMKEDRGGVVTIVDISKAFDTVPHGAIVGSLTRKGVPAVIANFIRSAYDGCKTKIRTRTTEVEVVLERGVKQGDPLSPLLFNLAVEPVIEILNETTKGITFDEHNVSVMAFADDLVMLASDRDEAERQVLKLDKYLKELGMSIQASKCSTFQIVHKNKTWHLKDPELWLDGLAIPATKPEDLVTYLGVVLGPWKGLDNIKASDITTSVANVLRMKLKPHQKVNLIRTHILPKFIHRLVASPPPLKTLEKIDHDVKQVVKKILHLHPSTTDGVLYTLKGHGGVGLQRIADIVRLAKLRHGSKMLASSDDAVRSAYYGQEKLITKYAKSIGVSWPASQDDLEAARVRLRKRDTDRWKDLSSQGQGVPDFFNDKIGNAWLYRPELLKPSRYLDALKLRTNTVPTRVALRRARSEIEVLCRKCRGQVETLAHIIGNCNSTKTKRINRHNDICKLIETKMSKSNVVFAEPTISVFGDLKKPDLVVKDQKKVYIVDVTVRYEDKDSLQRAFNEKRTKYEDAAEFVRLRTNSTEAMVLPVVVGSRGAMPMYTRDVLKKLGISKGDMITISLIALRSSIEMANAFLDNNPCVEG

SEQ ID NO: 22785 - protein, 1236 aa, Frankliniella occidentalis
MPSPRRSRVLWVQLPEGGLYSCPVCEAESFLRSEMSLERLRRHLPSKHGKNADWSVTFVCCDTLYSTAEDKYCRKKANTHWNAHHIDVAKNALLPSAPGVCALSEDELQRRVIRVANRAAPGGTSATSPASSTGSSPRLLAARSAAAQARNAARRRKPPTPPELTPQAVLLRPDPAAARPARRLRQPAATSPAGLHPSPAGLPTIPGASCDSPCTPDQGGSPLLAREEEPRDAGPAPTSEPSTPRFSPSPPASPSRTVTQLSPLLRSPTPEPGELPKTPPGFASVELQPEPITKARKPSAWQSAWIKKLGDSSWQEFQLHVKGITKELALPSRQARPGRGPPRRPTQTQQATRIQKIFRHSMKKAMREVLGESSPTCKIPEEELVSHFTNVHASRMGTVGNPPHPDCTLPAAKTPAGLLKPVTPDEVMMVLKRTKNTSPGPDGVPYSAWKKRDQGGLLLCEIFNRCLQEKDVPQAWKSSITTLIFKKGDEGDPTNWRPISLADTAGKLLSAILTRRLTVWAARSGHLSWEQKGFTSHEGCLEHNYILQEVLDDARRSGKEVCLAWLDLANAFGSVPHGALLHALQEAGLNQDELAFVRNYYADNTTSIRHHTGCTKAIPVLAGIKQGDTISPLIFNYVMELLLRAIASLSGLGYLLHGLHRHCVAYADDLCLISSSPEGLQRLLNLCGDVAEWIGLTFKPPKCASLHVKNRRAQPTRFTISGVEMPALREGESYQHLGVPTGWKVDQSPVDVIKTCAVDIRSIATSLLAPWQKLQAVRTFIISRLQFSFLTARVPKKDLDGLDKEIKKFAKTVLNIPTRASAELVFLPPSWGGAGLVPLSITADISSVAHAFRLLSCPDPVVAEVATSSLRLVVQRKLGRNTPARCAEDAAYLSGASDGAWSRDGGDIASVWSTARRATQLLGKLMPGLRWGFSEAKNTFELHVPADGRVTIVDTESRSQLIRVIRQAAQSAFRATLQQKPDQGKVYRVIGASPHSNHFLAHGRNTRFADWRFVHRARLGVLPLRGCRRWTSAAPASRLCRRCGQHAETTAHVLCHCLPSMGAITRRHNAVLEHLLEALAQGGRLQGVEVRVDDVVPFTQLMSPDLAAMVPDALRLLRPDVLLLNHSAKQAVILDVVCPFENGWGALQQARAAKVAKYSPTAECLESAGWDVALDAFVVGSLGAWDPANSPVLKYLGLSRVDVRTLAHFAVSAAIHHSKEIYLAHVIPTSTSPRAA

SEQ ID NO: 22786 - protein, 1125 aa, Trichuris muris
MMPLRTNTPTSAPLRTAGGEEATAVIARYPGPYKCPVCSTVIAIALKFTEHLQLHGLRAKFQCSKCGREYPTVHGAATHYCRCKAPSGNDGHDTNSAHLSGPSTIACPQCGACFPTNCGMQLHRRRQHPDEFAADQIPEKKCRWTRFEIEALARLEAKLPADTKFINQELEKLLFEKHGLCRNTDMIKGQRRKDDYKALVSSLRAGDMSVQSTSDTRTQQTNVCDEALRENLLNEARLFDSDDSARSFLNSCLLLPEPTSTLEAELIALARRALDGEMILDNTASVLLDQFPPPERRNRNTARRATMIPRNNRQRKQLRFKEFKRLYNTNRKRLAEVIFDEAQPQRVEIPLEKCVKYYKEVFGAESPNDNDVVTLKNTSQTSDESHNITRHITASEIKTALSLMPAKSSPGADHITVAALKQTPVSALTVLLNLWLFYLDVPAKFKECRTILIPKHYPVSSANDYRPITISSVVYRLFTKILSNRLNESTILNKRQKAFTAKVDGCGENTFMLKSALASARREHRELCIASLDIAKAFDSVSHNSIFRALVRHDVCASGICLIMNLLSDSFTRIEHADGISEAIQIRRGVKQGDPMSPLLFSLVMDELLDKLDELRAGFTICSGTTLCSLVFADDILLLSDCKAGLQSQLLTCYKFFQARNLAVNVGKCSSLRLYRVPKQRTVNVDVRPKFYLNPLEPNTLLPCFTASGFLKYLGVDFNPFGRRKCQIEKADILIKRACNAELKPQQKIEMIRTYLVPRFLYSLTVGNPLAHTAKSIDKMIRQAVKTILHLPLTTLCDDIFYIPIARGGLGFTNLSEVSDLSILKLIRKMEASDDPAAQATASLFANQKMKTKLMRRLDIPSLTNSEISAAKSRMAQMHIDRFLATYQGSGFQEFAERCSNEWIMGDRMTGRSFIASIKARTNLVPTRMQTFRGRADPGDQRVRCRRCGHISGAPESLAHISQTCAFTHGLITRRHDALTNKIASVAEDAGYECLKEPILRYLGQTYKPDLVLSKGDQSFIIDVAVPYETREPLARRYREKCRKYEELSQTVCELTSTKRCRTGAIVVGARGAWCSKNDETLKMLDILVSTRSKALMCLSTLEKTNQLIAWFMRAAVPLTLTRGG

SEQ ID NO: 22787 - protein, 1121 aa, Parascaris univalens
MEGSSSEESGTTSQEVVLDEECLSTKGLTESEDRSDGPRDSEGHSEAKEIEQRDTMDEMDPRFRAFRKAFYGYFRWAVSSFDREPVKRVRQDCPKVFYAYADYLIATGSSKALAPNQSRIGRLNGLVYAAARTIHQFWRQEVGHRQQGEKGWYAKTRAVQEELEEIISITESELARRKEKREPNAEELENIRKIVGKLGTRSTLGIARRLEAARQRLKLLKDRISVREQEKRRKRLRKQFAETPSLKLLTDPAKKRGGTSVTMKAIMDFWEPIIGRRVPSDPDQLQVLRDWRDEQKRTYPADLELEKADLEEKYEGAIRRIQPWKAPGPDGIHAHWWKALPSAKKLLGELVVDWLATGKVTTGWLCRGRTILIPKKGDRGDPSNYRPITCLNTCYKVLTSVMNSVILSHLSKGEAIPMNQRALRKREWGCTHAMILDRAIVMDAKAQKKHSLSVAWLDFKKAYDSVPHAYIRWAINSVNIPRSVELTLRRLMSDWETRFESTQCRPKLRSDKMKVLNGIFQGDSLSPTLFVLCIAPISYALNKGVGQCRSSSGWSAGYGFEIGHQFYMDDLKLYARTPAMLDSQIQVVSEVSEAMGLHLNCSKCAKAHYTPHEVVAGQEAVGAERPKQPEIPVLGFRDTYKYLGVEQRLLPTVDALKEFEDKLLDRANIIFASELTWGQMATAYNTIAIATVRYVYSNTNGAAPKLLEALKRAATLDTRIRDLLKRHKCRFRSSFVERLYIPRERGGCGLKSVEDTLRESILATWSYITTNPHLAGQQYLFEKMAARGKRTPMADGAKILLDLGVEPQVDLKGRKVTVDDIVFDEPTKLQRYLVGKLLKARTEERIRRWKEASLAGRLVNNTSIDLRLSCLWMKKGFVSARILRDALSVQEGSLFTRACPALRGKGSQEMCRCCHAAPETAEHITSACSHWRPSLYVERHDSVARNLYYVICCRYGITPVHYSNTVSPISENAECRVLWNVDIQTRTPMKHRRPDIVVFDLKRKRILIFEVSVAHASGLIKQREIKTNRYTVNSKELPDEAVTPYPPGPNLAADLAYSYGYKVEFGPVVVGTCGEHIPAVRDDLQRMLDLKPHQVEALLERISRSAVIGTARIVRAHLACS

SEQ ID NO: 22788 - protein, 986 aa, Procambarus virginalis
MEEVRLEGRPQAGREGMNQRLQQRFPSRTLESIKSQRKRNEYRELVVEYRNRAEAEGSESSLSNSDREDEPPSPLRNHGRRGNIRAAVGAPDGADPDMPPPDGTPQEASWKETMVEFLAAIAPRGQETGWGEELLDEAITDLVSGNGHNVDRILERHARVVTSAKRSGDHAPRPRPARRQRPPPTNRTDPTQPPTGRKRERRAQYVLCQSLYEKDRSKAAARVLSGDWKVTPTEVEPARLFPFWEALFSRPTSPDRRPIRDRDPVNQQLGDPITSEEILVALKASSNAAPGPDGITIRLLKAIPIRVFAKLFNLWLVNESLPQPFRKNKTVLLPKKPNPDSPSHYRPITMSSTIVRLFHKILSSRLSGAVRIDRRQKAFVPVDGCPENLVILDALLAEARALKHNTHLAFLDMEKAFDSVSHPAIHRAMKRKGIPKPLRTYIMSGYDRSSTVITSQGEKSKDILITRGVKQGDPLSPFLFNLIIDEAITRAKDLGLGVGLGGEKVSALAFADDLVVAAETAAGLQTLITSICHTLRGSGLKVNAAKCRTLSIAIDAHRKTWHVPTRKAYYVGDDAIGTMSVADEYKYLGILIGAGGRRLSYGSLFEDGLTNITKAPLKPQQRLYLLKHHLIPKMNHRLVLGRVAKTELARLDRRLRHATRGWLRLPHDTPNAFIHADVKDGGLGIPDFATSIRLQKNKRLGALVESEDPVVVAAALLPAFQARMRRWVDPTTAAGTPSNRTTECSRRWKAKLYSMVDGAGLASSCEVPSCHKWVASGTRLLSGGDFAHAIQIRANAVATPSRAARGRPEASGLCDACRKPGTLGHISQACHKTHGARVKRHDDITRFVAGRLRQRGFEVEREVRIPDGGTFCKPDIIACKGDEAFILDTQVSADNFPLSRPHQSKCDKYGTPEILQKVREYTGKHTASASSITLNWRGGWCKESARGLMDMGLTKSDLEICSVKALTWTYSIYRIWSKTTSRGRPP

SEQ ID NO: 22789 - protein, 1025 aa, Galerucella calmariensis
MSSRLSWLPTHIAYYLLRNCLLIPKLTYILRCSPTWLHNDILINFDNTIRHSLESLINIKMEELSWKQASLPVSYGGIGIRSIVSVALPSFLSSLYSSEKFINYILPKSFPTQDPLLLEAKNIWSRKSNKVVPDEYKCFQKSWDIPLMNIEKENLLQKAINLPDKARLNAAFSKESGAWLNALPSAPLGTLLDDESFRISIGLRLGCQLCVKHRCRCGADVDEYGRHGLSCKLSAGRFSRHYAVNDLLKRGLSSAKIPCTLEPLGTCRDDGKRPDGMTLIPWQRGRPVVWDFTCTDTWAPSHVRSTSTSAGAAALHGESFKINKYKNLENIYIFVPVAIETSGVFGHEALKFIKEIGKKISVETNDPRATLFFIQQISIAIQRGNASSFLGTFPRSKPLEELFMKPNHMKPNPSIIFKQPHIIDPKKCDLSFFRCSSLPSSSAGVLSDNICVDNFKNYASNKLLGLSGLKNIDNHQPDDVPIIGILEKMTILENDAIPMRNKLSLTKIKYKTGSPPLKLKTSKKISNSKLEVNEDVEIKNGSEVDRDLFAEKASGCHSLSKNNSRVNNFSSYISISSKDFQRGDETQPEQKDFSENDLDSKEYISKIIQTTDLSTSPKLTITAIYPSNSIANSLNSNSLSRRSSERENHRIRDYSDDDSSGERALNNYSTIRSLDGVPQKSLGLSGLKNIGNTCFMNSVIQCLSNTRWLLEYLKKDAHLRDINTSISSMKGALIKAFAEVIKELWSEDGSDRIVNTMSLKSQFQRFAPRLMGYAQQDAQEFLRHLLEGLHEDVNRVHEKPKPILTEIDEKLSDNEKAQESWIRYLRMDNSKIVDNFVGQLKSTLKCTHCGHCSVTFEPFWDLSLPIPQRTGQLRLSQCLDSFTSEESLDGDEKPTCSKCKEHRRCTKSFSIHEFPKILVIHLKRFSPMERFRGKLDVTVDFPIEGLDMSHYAADNMAPFRYNLYAISNHSGTTYSGHYTAYCRHPYTGQWHEYNDSRVSSISSKSLISGEAYVLFYEQEDTKSHL

SEQ ID NO: 22790 - protein, 1533 aa, Galerucella tenella
MFNVSDQVHIHLKLAKLKSQRSVIRRVPKASRALCASTLSSLIDECVRQNSIPTWENLLLFAYNVLSLPSKNSVKKVSLSTIIKSNLKTFENKDHHLNFSDQQNANFSYRKNMNFPNKTKIKHVINKISDGDLTSAIKILASDDSFVDVSAATLKELKSKHPSEKLNSTFPTLSSEPVPILITEDFVSYAINSFKTSSAGGIDSLRPSHLQDLISYSAGPSGKTLLSSLCKLCNFISNDTVNINIRPILFGASLCALSKKAGGIRPIAIGTVYRRLVAKIICSNIKDKLGDFLRPLQFGFGSKGGCEAVAHAARRFVSIHPDVKNKVFLKIDFKNAFNAIHRDNLLKLLVDILPEIFPFINQCYRFPSYLLFGENIIYSERGVQQGDPLAPLLFCLSIHGLISNIDTEFNAWYLDDGSLGGDTDSVFKSLVYIINNSKDIGLELNFSKCELFFLESPNNLIIDKFNSVAPGITITNRQNLFLLGAPLLKESFLSAFNEKLSFFKKMSSRLSWLPTHIAYYLLRNCLLIPKLTYILRCSPTWLHNDILINFDNTIRHSLESLINIKMEELSWKQASLPVSYGGIGIRSIVSVALPSFLSSLYSSEKFINYILPKSFPTQDPLLLEAKNIWSRKSNKVVPDEYKCFQKSWDIPLMNIEKENLLQKAINLPDKARLNAAFSKESGAWLNALPSAPLGTLLDDESFRISIGLRLGCQLCVKHRCRCGADVDEYGRHGLSCKLSAGRFSRHYAVNDLLKRGLSSAKIPCTLEPLGTCRDDGKRPDGMTLIPWQRGRPVVWDFTCTDTWAPSHVRSTSTSAGAAALHGESFKINKYKNLENIYIFVPVAIETSGVFGHEALKFIKEIGKKISVETNDPRATLFFIQQISIAIQRGNASSFLGTFPRSKPLEELFMKPNHMKPNPSIIFKQPHIIDPKKCDLSFFRCSSLPSSFSSSAGVLSDNICVDNFKNYASNKLLGLSGLKNIDNHQPDDVPIIGILEKMTILENDAIPMRNKLSLTKIKYKTGSPPLKLKTSKKISNSKLEVNEDVEIKNGSEVDRDLVAEKASGCHSLSKNNSRVNNFSSYISISSKDFQRGDETQPEQKDFSENDSDTKEYISKIIQTTDLSTSPKLTITAISPSNSIANSLNSNSLSRRSSERENHRIRDYSDDDSSGERALNNYSTIRSLDGVPQKSLGLSGLKNIGNTCFMNSVIQCLSNTRWLLEYLKKDAHLRDINTCISSMKGALIKAFAEVIKELWSEDGSDRVVNTVSLKSQFQRFAPRLMGYAQQDAQEFLRHLLEGLHEDVNRVHEKPKPILTEIDEKLSDNEKAQESWIRYLRMDNSKIVDNFVGQLKSTLKCTHCGHCFVTFDPFWDLSLPIPQRTGQLRLSQCLDSFTSEESLDGDEKPTCSKCKERRRCTKSFSIHEFPKILVIHLKRFSPMERFRGKLDVTVDFPIEGLDMSHYAADNMAPFRYNLYAISNHSGTTYSGHYTAYCRHPYTGQWHEYNDSRVSSISSKSLISGEAYVLFYEQEGTKSHL

SEQ ID NO: 22791 - protein, 1575 aa, Galerucella pusilla
MTTPVTIKCEICGKFFKKQGLKTHQNKTHGKQSLNYITQESLSNIEIIDSNFHLKLAKLKSQRSVIRRVPKASRALCASTLSNLIDECVRQNSIPTWENLLLFAYNVLSLPSKNSVKKVSLSTIIKSNLKTFENKDHHLNFSDQQNANFSDRKNKNFPNKTKIKHVINKISDGDLTSAIKILASDDSFVDVSAATLTELKSKHPSEKLNSTFPTLSSEPVPILITEDFVSNAINSFKTSSAGGIDSLRPSHLQDLISYSAGPSGKTLLSSLCKLCNFILNDTVNVDIRPILFGASLCALSKKAGGIRPIAIGTVYRRLVAKIICSNIRDKLGDFLRPLQFGFGSKGGCEAVAHAARRFVSIHPDVKNKVFLKIDFKNAFNAIHRDNLLKLVVDILPEIFPFINQCYRFPSYLLFGENIIYSERGVQQGDPLAPLLFCLSIHGLISNIDTEFNAWYLDDGSLGGDTDSVFKSLVYIINNSKDIGLELNFSKCELFFLESPTNLIIDKFNSVAPGITITNRQNLFLLGAPLLKESFFSAFNEKLSFFKKMSSRLSWLPTHIAYYLLRNCLLIPKLTYILRCSPTWLHNDILINFDNTIRHSLESLINIKMEELSWKQASLPVSYGGIGIRSIVSVALPSFLSSLYSSEKFINYILLKSFPTQDPLLLEAKNIWSRKSNKVVPDEYKCFQKSWDIPLMNIEKKNLLQKAINLPDKARLNAAFSKESGAWLNALPSAPLGTLLDDESFRISIGLRLGCQLCVKHRCRCGADVDKYGRHGLSCKLSAGRFSRHYAVNDLLKRGLSSAKIPCSLEPLGTCRDDGKRPDGMTLIPWQRGRPVVWDFTCTDTWAPSHVRSTSTSAGAAALHGESFKINKYKNLENIYIFVPVAIETSGVFGHEALKFIKEIGKKISVETNDPRATLFFIQQISIAIQRGNASSFLGTFPRSKSLEELFMKPNHMKPNPSIIFKQPHIIDPKKCDLSFFRSSSLPSSFSSSAGVLSDNICVDNFKNYASNKLLGLSGLKNIDNHQPYDVPIIGILENMTILENDAIPMRNKLSLTKIKYKTGSPPLKLKTSKKKSNSKLEVNEDVEIKNGSEVDRDLVAEKASGSHFLSKNNSRVNNFSSYISISTKDFQRGDETQPEQKDFSENDLNTKEYISKIIQTTDLSTSPKLTKTAISPSNLIANSLNSNSLSRRSSERENHRIRDYSDDDSSGERALNNYSTIRSLDGVPQKSLGLSGLKNIGNTCFMNSVIQCLSNTRWLLEYLKEDAHMRDINTSISSMKGALIKAFAEVIKELWSEDGSDRVVNTVSLKSQFQRFAPRLMGYAQQDAQEFLRHLLEGLHEDVNRVHEKPKPILSEIDEKLSDNEKAQESWIRYLCMDNSKIVDNFVGQLKSTLKCTHCGHCFVTFDPFRDLSLPIPQRTGQLRLSQCLDSFTSEESLDGDEKPTCSKCKERRRCTKSLSIHEFPKILVIHLKRFSAMERFRGKLDVTVDFPIEGLDMSHYAADNMAPFRYNLYAISNHSGTTYSGHYTAYCRHPYTGQWHEYNDSRVSSISSKSLISGEAYVLFYEQEGTNSHL

SEQ ID NO: 22792 - protein, 1114 aa, Harmonia axyridis
MEHHVLSYPLSPVITCDYCEIMPPRIYQNHNDLNKHLKRHHDRSITFRCRMCLEEIGTIKQVKAHQTRTHPQSSVPPSEAPHVPPPPADNMESAPRVMRPRALRRPVRVPPTTIALEEPVPTPPLNGPPADNELPGSLRETRREDSQKDWRWDGLPPTHSCPSRLGPPPPPPMQETPLQPDEFHPVDAKKPTENQQRWLQWISGICDADDLTATNDRLATEIVEKSARPRRENAGDARPPRPPRPPRPRNTPRRYDPIAASAIQRSYRNNRSRAFKKIIGDQGGEEYCSINPERLIEHLGGAHQAADLRPHGIGLPRAPDDEDIISPFTEAEVMTRLRRTSNTAPGKDGVFYGALKKLDPQCLVMAALFNKVLALRSIPEAWRSASIVLIHKKGPRDDPNSWRPISLCSCLYKLFTSCLSARITSWAMGNNLITPTQKGFGQYEGCYEHNFILQSILDTTRRKGRRCAVAWLDLANAFSSVPHGHIYSTLETMGLNRQALELIRNIYNTSSSTIKTPQGESRPFSVRAGVRQGCPLSPIIFNIALEPVLRAAINTGMGYKIDDNNFVILAYADDLVLVSDTPEDLQIVLDCVGETAAACGLTFKPGKCASLTLDCRRRHTCRELSYSIQGKQFPALEEGQAYEHLGIPTGYHVDQSPEDTIDRMTRDLQKLDESLLAPWQKIDALSTFILPRVSFVLRGCHVQKSRLGVLDKRVKRALKSWMNLPQRASPEILYVPMKRGGAGILPMTDLVEVASIVQAFKMLTCPEALVRDTANSQLREVVQRRIGRVPSVDDLARYLSGDLEGEFGRDGGDISSLWSRARNATRRLSKRLEMGWTTTDSFLSIQIGGNNAPDGQTITRQNLEWRLKDAVRNMYASSLCRKPDQGKTFKCFSRSAASNHFTRSGFATRFCDWRFIHRARLDCVPLNATRRFGSGDRRCRRCQDQPETLPHVLNHCRIHSAAWQKRHNAVQDRLVKSIPDRMGTVHVNRQVPLVASNLRPDIVIINESESRVAIIDVTIPFENEPQALIRARELKLEKYAGLAEDLRAQGFETTVDALIVGALGTWDQENEAVLRRCGTSLKYATLMRRLMCSDVIRWSRDIYIEHVTGVRQYT

SEQ ID NO: 22793 - protein, 1111 aa, Harmonia axyridis
MEHHVLSYPLSPVITCDYCEIMPPRIYQNHNDLNKHLKRHHDRSITFRCRMCLEEIGTIKQVKAHQTRTHPQSSVPPSEAPHVPPPPADNMESAPRVMRPRALRRPVRVPPTTIALEEPVPTPPLNGPPADNELPGSLRETRREDSQKDWRWDGLPPTHSCPSRLGPPPPPPMQETPLQPDEFHPVDARKPTENQQRWLQWISGICDADDLTATNDRLATEIVEKSARPRRENAGDARPPRPPRPRNTPRRYDPIAASAIQRSYRNNRSRAFKKIIGDQGGEEYCSINPERLIEHLGGAHQAADLRPHGIGLPRAPDDEDIISPFTEAEVMTRLRRTSNTAPGKDGVFYGALKKLDPQCLVMAALFNKVLALRSIPEAWRSASIVLIHKKGPRDDPNNWRPISLCSCLYKLFTSCLSARITSWAMGNNLITPTQKGFGQYEGCYEHNFILQSILDTTRRKGRRCAVAWLDLANAFSSVPHGHIYSTLETMGLNRQALELIRNIYNTSSSTIKTPQGESRPFSVRAGVRQGCPLSPIIFNIALEPVLRAAINTGMGYKIDDNNFVILAYADDLVLVSDTPEDLQIVLDCVGETAAACGVTFKPGKCASLTLDCRRRHTCRELSYSIQGKQFPALEEGQAYEHLGIPTGYHVDQSPEDTIDRMTRDLQKLDESLLAPWQKIDALSTFILPRVSFVLRGCHVQKSRLGVLDKRVKRALKSWMNLPQRASPEILYVPMKRGGAGILPMTDLVEVASIVQAFKMLTCPEALVRDTANSQLREVVQRRIGRVPSVDDLARYLSGELEGEFGRDGGDISSLWSRARNATRRLSKRLEMGWTTTDSFLSIQIGGDNAPDGQTITRQNLEWRLKDAVRNMYASSLCRKPDQGKTFKCFSRSAASNHFTRSGFATRFCDWRFIHRARLDCVPLNATRRFGSGDRRCRRCQDQPETLPHVLNHCRIHSAAWQKRHNAVQDRLVKSIPDRMGTVHVNRQVPLVASNLRPDIVIINELESRVAIIDVTIPFENEPQALIRARELKLEKYAGLAEDLRAQGFETTVDALIVGALGTWDQENEAVLRRCGTSLKYATLMRRLMCSDVIRWSRDIYIEHVTGVRQYT

SEQ ID NO: 22794 - protein, 1100 aa, Adalia bipunctata
MEHHVLPYPLPQTITCEYCEVVPPRTYQNHNDLNKHLKRYHSRSITFSCGTCQLIIGTIKQVKKHQATNHPPPEVPQGQESSSSAREDEHPVPPHSATSRPLRRRARVAAARTPTSPDVPATLPVVLPPSPLRDATPEEDAAPRRSPPTQTHLPTPPVPAAINQAPHPARSRVPTDMQKRWLQWLADVRDGDDLSAANDRISSEIVEGSAQAQRARGGAARPTCPPPRRTNMPTRYDPEAAASIQKAYRINRTKAFKRITREQDTTSEFCSIDPERLIAHFGGTSPDAGAHRPPHNVELPHAPDNGEITAPFAAQEVVKKLRRTSNTAPGRDGVYYAALKKLDPGCLMLMALFNRVLQLGHIPSAWSTATIVMIHKKGARDDPNNWRPISLCSCIYKLFTSCLAERISRWAADGDVISPEQKGFGQFEGCYEHNFLLQSVLDDTRRRRRRCALAWLDLANAFSSVPHDHVLETLTTMGLDRRAVSLIEGVYRAGSSTIRTPQGESRPFPISSGVRQGCPLSPVVFNLALEPVLRAAKMEGRGFRLGDHLISVLAYADDLVLVTETPEDLQIVLDRVGDAAAACGLTFKPAKCASLTLDCRHRNDCRSLEYSIQGNRFPALAEGQAYEHLGIPTGYHVDQSPEDTIVRMRSELERLDESLLAPWQKIDALSTFILPKISFVLRGCQVQRTPLKALDKRVKSAVKAWMNLPQRASPEMVYLPMKKGGAGILPMADLVEVATVVQAYKMLTCPETRVHDIANFQLFEVTRRRIGRHPTPEDLARYLSGDLSDEFGRDAGDIASIWTRARNATRRLAGRLEIKWMAEDGALSVRLGMAGAPESHRNTISRQNLEWKLKDAIRNLYAASLSRKPDQGKTFRCFSASAASNHFMRGGFATRFCDWRFIHRARLDCVPLNATKRFGNGDKRCRRCGEHDETLPHVLNHCRMHSAAWQRRHNAVQDRLVRAIPERLGTIRVNQRVPHSESGLRPDIVVVNEADARITIVDVTVPFENQLPALKRARELKCEKYASLAEELRAGGYETTVDAFVVGALGSWDQANEAVLKRCAVSPYYATLMRRLMCSEVIRWSRDIYVEHVTGERQYT

SEQ ID NO: 22795 - protein, 1347 aa, Nymphalis polychloros
MSNRVYNLRSLPGGRRGTSGADAGCDSMRSIGDEKLNRRASIAKSTTADDSSTGTPYRPPPSTTCTSHTSVAQETLDVEQLVPTVSAKRKKWTQDMNEFILRTYLYLTTMETDVAAYLTPLHTKFLEKYPHMQVSRQRVGDQRRAIIRNKLLPQDTIERIYDEVRSDLQTFKKQFQSTQNNTLLTQTPVHTRMHWSKEHNEAIINIYYRVTLMETNLTAYRKQLHTNFIEIFPALSHLSEQRIADQRRAIINNKYINNERLEQIKQDVANDLQLTNNTIDTTVNNNLTENNSVLINTNLNNNHTTTPHADTLTPLQQPQTINDDIEKIFKQIIEYYTDTNSTNRSFIPKQKSSKKLAVIVNYLNQKILPEYINKETEFKSLQTIIYCAAWTAAKVNGAKIQIPHVEHSCQNQERKPKWQIRLERKVKDLRSKIGRLTQYMNGNRNRNLTKHVEAILEQYKIHSTHENINTTLLQFLDTLKQKLTVTSSRLARYNKCTLRKTQNNKFINNEKQFYRDLKNISTNQASTKSTNSQNSVDPEVLRSYWANIWENPVRHNNNNECINSEQLRYKETQQMVFEFISLETFNDVIRKLHNWKTPGSDNIHNYWYKKFTFIHPYLYKIINSFIKNPESMPNYITAGTTYMIPKDRSDYTNPSKYRPITCLQTIYKIISSCLTHEIYNHIEKNKIITEQQKGCRKFSQGCKEQLTIDSVVLKQVQIKKKDLHTMYIDYKKAFDSVPHSWLVDVLNIYKIHPQIILFLQNTMLNWNTRLRINTPKGLVDTTPIKIQRGIFQGDALSPLWFCLALNPLSNVLNTMHEGYQLHIPTDRQNITLNHLFYMDDIKLYTSTQKDLENITKTIERFSQDICMEFGINKCKISSVKAGQFERYSYLTEYGTQIDPLDENETYKYLGYDQSKQILQKETKIKVTQEFRHRINSVLKSNLNSRNLIKAINNYAIATLTYSFGIIKWTKSDLKKLQRTINTTMTKHRKHHPRSCIQRTTLPRKEGGRGLIDIVNLHNKQIATLREFFHDKATSSTLHKAIVENDNKFTPLNLKDTNIQTNETLTDRQTKISEWARKSLHGRHYQDLSLPNVDKLASNEWLSRGVLFPETEGFIIAIQDQVIETRNYQKYIIKNSTLPTDMCRRCNSSSETIQHITGACKTIAQTDYKHRHDQVAYIIHQKLALKFKLIDPQNRTAYYKYNPQAVLENQTFRLYFDRAILTDRTIPYNRPDITVIDKLNKTGYIIDIAIPNTHNLQNTISEKLAKYTELKDEITKNWHLQKVIIVPIVLSTTGVIPQQLHQSLKALDLPSHTFIQLQKAAILNTCRIVRKFMQSDKDHITLPNNQIT

SEQ ID NO: 22796 - protein, 1345 aa, Nymphalis polychloros
MFNRVYNLRSLPGGRRGTSGADAGCDSMRSIGDEKMNRRASIAKSTTADDSSTGTPYRPPPSTTCTSHTSVAQETLDVEQLVPTVSAKRKKWTQDMNEFILRTYLYLTTMETDVAAYLTPLHTKFLEKYPHMQVSRQRVGDQRRAIIRNKLLPQDTIERIYDEVRSDLQTFKKQFQSTQNNTLLTQTPVHTRMHWSKEHNEAIINIYYRVTLMETNLTAYRKQLHTNFIEIFPALSHLSEQRIADQRRAIINNKYINNERLEQIKQDVANDLQLTNNTIDTTVNNNLTENNSVLINTNLNNNHTTTPHADTLTPLQQPQTINDDIEKIFKQIIEYYTDTNSTNRSFIPKQKSSKKLAVIVNYLNQKILPEYINKETEFKSLQTIIYCAAWTAAKVNGAKIQIPHVEHSCQNQERKPKWQIRLEGKVKDLRSKIGRLTQYMNGNRNRNLTKHVEAILEQYKIHSTHENINTTLLQFLDTLKQKLTVTSSRLARYNKCTLRKTQNNKFINNEKQFYRDLKNISTNQASTKSTNSQNSVDPEVLRSYWANIWENPVRHNNNNECINSEQLRYKETQQMVFEFISLETFNDVIRKLHNWKTPGSDNIHNYWYKKFTFIHPYLYNIINSFIKNPESMPNYITAGTTYMIPKDRSDYTNPSKYRPITCLQTIYKIISSCLTHEIYNHIEKNKIITEQQKGCRKFSQGCKEQLTIDSVVLKQVQIKKKDLHTMYIDYKKAFDSVPHSWLVDVLNIYKIHPQIILFLQNTMLNWNTRLRINTPKGLVDTTPIKIQRGIFQGDALSPLWFCLALNPLSNVLNTMHEGYQLHIPTDRQNITLNHLFYMDDIKLYTSTQKDLENITKTIERFSQDICMEFGINKCKISSVKAGQFERYSYLTEYGTQIDPLDENETYKYLGYDQSKQILQKKTKIQVTQEFRHRINSVLKSNLNSRNLIKAINSYAIATLTYSFGIIKWTKSDLKKLQRTINTTMTKHRKHHPRSCIQRTTLPRKEGGRGLIDIVNLHNKQIATLREFFHDKATSSTLHKAIVENDNKFTPLNLKDTNIQTNETLTDRQTKISEWARKSLHGRHYQDLSLPNVDKLASNEWLSRGVLFPETEGFIIAIQDQVIETRNYQKYIIKNSTLPTDMCRRCNSSSETIQHITGACKTIAQTDYKHRHDQVAYIIHQKLALKFKLIDPQNRTAYYKYNPQAVLENQTFRLYFDRAILTDRTIPYNRPDITVIDKLNKTGYIIDIAIPNTHNLQNTEKLAKYTELKDEITKNWHLQKVIIVPIVLSTTGVIPQQLHQSLKALDLPSHTFIQLQKAAILNTCRIVRKFMQSDKDHITLPNNQIT

SEQ ID NO: 22797 - protein, 1347 aa, Nymphalis polychloros
MFNRVYNLRSLPGGRRGTSGADAGCDSMRSIGDEKLNRRASIAKSTTADDSSTGTPNRPPPSTTCTSHTSVAQETLDVEQLVPTVSAKRKKWTQDMNEFILRTYLYLTTMETDVAAYLTPLHTKFLEKYPHMQVSRQRVGDQRRAIIRNKLLPQDTIERIYDEVRSDLQTFKKQFQSTQNNTLLTQTPVHTRMHWSKEHNEAIINIYYRVTLMETNLTAYRKQLHTNFIEIFPALSHLSEQRIADQRRAIINNKYINNERLEQIKQDVANDLQLTNNTIDTTVNNNLTENNSVLINTNLNNNHTTTPHADTLTPLQQPQTINDDIEKIFKQIIEYYTDTNSTNRSFIPKQKSSKKLAVIVNYLNQKILPEYINKETEFKSLQTIIYCAAWTAAKVNGAKIQIPHVEHSCQNQERKPKWQIRLERKVKDLRSKIGRLTQYMNGNRNRNLTKHVEAILEQYKIHSTHENINTTMLQFLDTLKQKLTVTSSRLARYNKCTLRKTQNNKFINNEKQFYRDLKNISTNQASTKSTNSQNSVDPEVLRSYWANIWENPVRHNNNNECINSEQLRYKETQQMVFEFISLETFNDVIRKLHNWKTPGSDNIHNYWYKKFTFIHPYLYKIINSFIKNPESMPNYITAGTTYMIPKDRSDYTNPSKYRPITCLQTIYKIISSCLTHEIYNHIEKNKIITEQQKGCRKFSQGCKEQLTIDSVVLKQVQIKKKDLHTMYIDYKKAFDSVPHSWLVDVLNIYKIHPQIILFLQNTMLNWNTRLRINTPKGLVDTTPIKIQRGIFQGDALSPLWFCLALNPLSNVLNTMHEGYQLHIPTDRQNITLNHLFYMDDIKLYTSTQKDLENITKTIERFSQDICMEFGINKCKISSVKAGQFERYSYLTEYGTQIDPLDENETYKYLGYDQSKQILQKETKIKVTQEFRHRINSVLKSNLNSRNLIKAINSYAIATLTYSFGIIKWTKSDLKKLQRTINTTMTKHRKHHPRSCIQRTTLPRKEGGRGLIDIVNLHNKQIATLREFFHDKATSSTLHKAIVENDNKFTPLNLKDTNIQTNETLTDRQTKISEWARKSLHGRHYQDLSLPNVDKLASNEWLSRGVLFPETEGFIIAIQDQVIETRNYQKYIIKNSTLPTDMCRRCNSSSETIQHITGACKTIAQTDYKHRHDQVAYIIHQKLALKLKLIDPQNRTAYYKYNPQAVLENQTFRLYFDRAILTDRTIPYNRPDITVIDKLNKTGYIIDIAIPNTHNLQNTISEKLAKYTELKDEITKNWHLQKVIIVPIVLSTTGVIPQQLHQSLKALDLPSHTFIQLQKAAILNTCRIVRKFMQSDKDHITLPNNQIT

SEQ ID NO: 22798 - protein, 1348 aa, Nymphalis polychloros
MFNRVYNLRSLPGGRRGTSGADAGCDSMRSIGDEKLNRRASIAKSTTADDSSTGTPNRPPPSTTCTSHTSVAQETLDVEQLVPTVSAKRKKWTQDMNEFILRTYLYLTTMETDVAAYLTPLHTKFLEKYPHMQVSRQRVGDQRRAIIRNKLLPQDTIERIYDEVRSDLQTFKKQFQSTQNNTLLTQTPVHTRMHWSKEHNEAIINIYYRVTLMETNLTAYRKQLHTNFIEIFPALSHLSEQRIADQRRAIIINNKYINNERLEQIKQDVANDLQLTNNTIDTTVNNNLTENNSVLINTNLNNNHTTTPHADTLTPLQQPQTINDDIEKIFKQIIEYYTDTNSTNRSFIPKQKSSKKLAVIVNYLNQKILPEYITKETEFKSLQTIIYCAAWTAAKVNGAKIQIPHVEHSCQNQERKPKWQIRLERKVKDLRSKIGRLTQYMNGNRNRNLTKHVEAILEQYKIHSTHENINTTMLQFLDTLKQKLTVTSSRLARYNKCTLRKTQNNKFINNEKQFYRDLKNISTNQASTKSTNSQNSVDPEVLRSYWANIWENPVRHNNNNECINSEQLRYKETQQMVFEFISLETFNDVIRKLHNWKTPGSDNIHNYWYKKFTFIHPYLYKIINSFIKNPESMPNYITAGTTYMIPKDRSDYTNPSKYRPITCLQTIYKIISSCLTHEIYNHIEKNKIITEQQKGCRKFSQGCKEQLTIDSVVLKQVQIKKKDLHTMYIDYKKAFDSVPHSWLVDVLNIYKIHPQIILFLQNTMLNWNTRLRINTPKGLVDTTPIKIQRGIFQGDALSPLWFCLALNPLSNVLNTMHEGYQLHIPTNRQNITLNHLFYMDDIKLYTSTQKDLENITKTIERFSQDICMEFGINKCKISSVKAGQFERYSYLTEYGTQIDPLDENETYKYLGYDQSKQILQKETKIKVTQEFRHRINSVLKSNLNSRNLIKAINSYAIATLTYSFGIIKWTKSDLKKLQRTINTTMTKHRKHHPRSCIQRTTLPRKEGGRGLIDIVNLHNKQIATLREFFHDKATSSTLHKAIVENDNKFTPLNLKDTNIQTNETLTDRQTKISEWARKSLHGRHYQDLSLPNVDKLASNEWLSRGVLFPETEGFIIAIQDQVIETRNYQKYIIKNSTLPTDMCRRCNSSSETIQHITGACKTIAQTDYKHRHDQVAYIIHQKLALKLKLIDPQNRTAYYKYNPQAVLENQTFRLYFDRAILTDRTIPYNRPDITVIDKLNKTGYIIDIAIPNTHNLQNTISEKLAKYTELKDEITKNWHLQKVIIVPIVLSTTGVIPQQLHQSLKALDLPSHTFIQLQKAAILNTCRIVRKFMQSDKDHITLPNNQIT

SEQ ID NO: 22799 - protein, 1374 aa, Notodonta dromedarius
MITRSKSKKNSQAVMPVSNETTRVSSPSSSNSLTSPTISAAFAHPISTSSPQTPLSSLFSSPNSSPNPFDGQVNSIPSSSSLSSPMSVDVAQEANACILGPTAGNTRARRKWTNEMNEFIWRTYLIITRLETNTRGYLGPLYDSFTTQYPEMNASKQSIGDQRRAIVRNKLLPLSTFDQIKQDVIAYLELNQQPEPIVIQTTNRMRWTNDINETILRIYFEITDMETNLTAYRPKLYDKFIEAYPHLSHVSEQRLSDQRRAIINNRMVLQARIQQIKQEIESQLHITRAHTPSNTQHNAQTLSETHIQTPDYSSQHNNSSSQNTINIVAGLDSSFTLPTENTPPHADNNLEQPNNQQIQYIPAEFDNKINEIFVATYAKYTHTEPTDRPFIPKQRPSKKFEYIINHINTTIIPEYIPSISSFLDTNTIIYCAAYTAAVANDTKISDSTQLNNYHRENIPSWQQRLQRRIQHFRRDIGRITQFMQGNRSRRLITLVDEIRLKHRIHSQHEEPNRTDEQLLDTLKQKLNATTSRLRRYVNCTLRKKQNTQFITSEKQFYRRLGTGLQQATNNQNSELRTPTADTLQQFWASIWSNPAQHNEEAEWIQSSTQHTTEITQMQFTEVSIDTLKRIIQKTHNWKAPGTDNIHNFWYKKFTSCHVILHRHINEFIHNPAAMPQYVSQGITYMIPKDVNDLENPSKYRPITCLQTIYKIITSCITELIYQHTDKNKILAEEQKGCRKNSQGCKEQLIIDSVAMKQALRNIKVLSTMYIDYRKAYDSVPHSWLLYILKHYKIHPTIIAFLENTMCNWKTKLKIGNKISSVQTDAIPIRRGIFQGDALSPLWFCLALNPLSYLLNESNEGLHIETNNDQHTPTTLTHLMYMDDIKLYSNTTISLHHLADITQTFSNDIQMGFGIDKCKTLTISRGLIEQNEYTLHTGERIEPMDQYSTYKYLGFQQSRQIHQKETKTEITKKFKQNSTLKSQLNSRNIIKAINTYAVPILTYSFGIIKWSQSELKQLQRTINTTMTTHRKHHPRSCIQRLTLPREEGGRGLIDITNMHNRQIAILRQYFFAKAQHSTLHHSINIADKHLTPLNLHDTNTQQCEKLISKADKILAWAQKSLHGRHHQDLQQTHIDTRATNAWLWRGELFPETEAFITAIQDQIIDTRNYQKFIIRRPNLVTDKCRRCHVSSETIQHITGACKSIAQTDYKHRHDQVAAIIHQNLAFKYSLITQKTAYYKYIPQTVLESANYKLYWDRTIITDKTIHFNRPDILLHDKNKKIVYLIDIAIPNTHNLTSTHTEKIAKYTDLAIEIKTQWKVNTVHTIPIILSSTGVIPHTLHTSLSTLNMHPSTYILLQKAVILNTCRLVRKFLSMS

SEQ ID NO: 22800 - protein, 1073 aa, Bungalotis erythus
MSPSTPTHTDSLNISNFTLNCNTMTSNITQNISNITLNTQHNNDELSVNQHQANLTSDVHNKVNETFQTIYTKYIHTDPLQRPYIPKQKHSKQFTLTIKYINTKIIPEYITSDSHFSDIQTIIYCAAHTAAVINGSKIKDIIQTNKNNNDYRPPWQRRLQNKIENLRKDIGRVLQFSRGNRSRRLQTLIEDIRNRHRIHSQHEEPNTTDEQLLDTLKQKLNATTSRLRRYLNCTLRKQQNLLFVANEKQFYRRLGMGMGLQQITNHQDTGTRTPTAESLQNFWASMWATPVQHNHNAEWIKSATVHTKNITQMQFTEVSMDTFKNIIQKTHNWKAPGADNIHNFWYKKFTSTHVALHSHINKFIRNPTMLPPYISQGITYMIPKDPNHPEDPSKYRPITCLQNIYKIITSCISHLIYQHVENNNILAEEQKGSRKSSQGCKEQLVIDSIAMTHTLRNKTDLCTMYIDYRKAYDSVPHSWLIHILHIYKIHPIIISFLQVTMNDWKTQLRLGDRDCGVQTGCIPIRRGIFQGDALSPLWFCLALNPLSYVLNESNAGLPIKITNNDEQTHTTLTHLLYMDDLKLYSNTTQSLHHLADITQTFSSDIQMEFGIDKCKTLTISEGSIEQSTYILTTGESIEPMDGRSTYKYLGFQQAHNIHQTDTKMHLIKKFKHRINLTLRSQLYSRNLIKAINTFAIPTLTYSFGIIKWTQTELRNLQRIINTSMTTHRKHHPRSSIHRLTLPREDGGRGIIDITNLHNKQITGLRNFFFKKTQHSTLHQKLSLADKHITPLNLHDTNTQPNQKLTSKSDKMAAWAQKVLHGRHYQDLQQPHIDRIASNNWLRRGELFPETEAFITAIQDQIINTRNYEKFIIRGPNLSTDKCRRCHTASETIQHITGACKALAQTDYKHRHDQVAAIIHQNLAFKHSLITQKTAYYKYKPQTVLESTDYKIYWDRTIITDKTIHYNRPDIILYDKTNKAVYLIDVAIPNTHNLASTHTEKLAKYTDLAIEIKTQWKVNSVRTVPIIVSSTGVIPQTLHSSLNTLSIHPLTYTLLQKAVILNTCRIVRKFLSLT

SEQ ID NO: 22801 - protein, 1302 aa, Aurina azines
MITRSKSRIMSRANKPIVNKTPHVSSPSSVQSSSSPHHISSSSSLFPSLNSSPNSLERLYHTSSSSSSSSPVSVDVVQEANAALLGPTIDSMRTRRKWTNDMNIFIWRNYLILTRLETNIRGYLGSLHDAFTTQYPEMNASKQNIGDQRRAILRNRLLSQSTLDQIKHDVVTFLEQNQQPEFTITQTTSRMRWSSEINENILRMYYEVTELEADLTAYRPKLYNRFIETYPHLTHISEQRLSDQRRAIINNRMVPQERIQQIKYDVGLKLHFTRSHTQSETQLYTRTAEDVHFHTPSNLPSPNIATTSLLKTNVLSTQDNNNESHTNQEQVHNLTSDVQNKINETFHSTYTKYIHTDPLQRPYIPKQKCSKHFILVVNYINTKIIPDYLLSVCHYFNDVQTIIYCAAYTAAVINGTIMKDNTRTNNNNSEYRPPWQRRLQGKIENLRKDIARIIQVGRGKRSRRLDRLVEIIRNKHRIHSQHEEPNTTDEQILDTLKQKLNATTSRLRRYLNCTLRKQQNSLFVSNEKQFYRRLGMGLQQAPNNQNTNSRTPTAETLQNFWSNIWDTPVQHNQNAEWIRLTSQHTTNITQMQFTEISIDTLKSIIQKTHNWKAPGTDNIHNFWYKKFTSTHVALHNHINKFIQNPTTLPSYISQGITYMIPKDPNDPEDPSKYRPITCLQNMYKIITSCISYLIYQHVENNNILAEEQKGCRKNSQGCKEQLIIDSIAMTHTLRDKSDLCTMYVDYRKAYDSIPHSWLIHILSLYKIHPTITSFLQITMNNWKTELRLGSRASGVQTGCIPIRRGIFQGDALSPLWFCLALNPLSYLLNNSSVGLPIKVNNNDEQRDTTLTHLLYMDDIKLYSNTTQSLHHLADITQTFSNDIRMEFGIDKCKTLTVKAGKVEQNPYTLVTGESVEPMDQSSTYKYLGFQQSHHIHQKDTKAYLVKKFKHRINLTLRSQLYSRNIIKAINTFAIPILTYSFGIVKWTQTELKNIQRIINTSMTAHRKLHPRSSVYRLTLPREHGGRGIIDVTNLHNKQITGLRNFFFKKSQHSTLHQTLSHADKHLTPLNLHDTNVQANEKLTSNSDKLLAWAQKVLHGRHYQDLQQPHIDTIASNNWLRRGSLFPETEAFIIAIQDQIINTRNYEKFIIHRPNLATDKCRRCHTASETIQHITGACKALAQTDYKHRHDQVAAIIHQNLAFKHSLIIKKTAYYKYIPQTVLESKYYKIYWDRTIITDKTIHYNRPDIIFYDKTNKIVYLIDIAVPNTHNLTSIHTEKLAKYTDLAIEIKTQWKVNTVRTVP

SEQ ID NO: 22802 - protein, 1329 aa, Pseudonascus paulliniae
MITRSKSKMVSRANMLIVNKTPKISLPSSTQSPISSPITTHSESSSSSSSLFPSPDSSPNILERQYHHTTSSSSSICSPVSVNVAQEANADHLEPITDRMRKKRKWTNDMNMFIWRNYLILTRLETNTRGYLGPLHDRFTTQYPEMNASKQNVGNQRRAILRNRLLPSSTLEQIKHDVATFLEETQQPQQTITQTSSRMRWSDEINENILRIYYEVTELETDLTAYRTKLYHRFIETYPHLTYLSQQRLSDQRRAIVNNRMIPQEKIQQIKYDIGLQLHLIRNQTQSNTQNYIQTAQESTAQTNSNLTSINTASICSIETNLTGTSNTTKSNLSTQDNDHESNSNQQQVPLLLSEAQNKINETFQTCYSKYIHTDPVQRPYIPKQRSSKQFILTINYINTKIIPKYITLARQFNDIQTIIYCAAYTAAVLNGTKIKENTNTKKIDTEYKPPWQRRLQSKIENLRKDIGRVLQFSRGNRSRKLETIVEAIRNKYKIHSQYEEPNTTDEQLLDTLKQKLSATASRLRRYINCTLRKQQNTLFVASEKQFYRKLDTGLQQTTDYSRAPTAEALQKYWSNIWATPVQHNENAEWIRLITEYTTNITQMQFSQISIDTLRNIIQKTHSWKAPGTDNIHNFWYKKFTSTHAALHKYINEFIHNPTTLPPYFSQGVTYMIPKDPNDPGNPSKYRPITCLQNIYKIITACISNLINQHIENNNILAEEQKGCRKNSQGCKEQLVIDSIAMTHTIRKKEDLCTMYVDYRKAYDSVPHSWLIHMLTLYKIHPTIASFLQTTMNNWKTKLKVGSGVSCVQTGIIPIKRGIFQGDALSPLWFCLALNPLSYLLNKSSAGLPMEISRSDEQTYTTLTHLLYMDDIKLYSNTTQSLHHLADITQKFSNDIQMEFGIDKCKTLTVRKGNIEQNAYTLGTGENIEPMDENSTYKYLGFQQTHHIHEKDTKNHLIKKFKHRINLTLRSQLYSRNLIKAINTFAIPILTYSFGIIKWTQTELKNLQRVINTSMTAHRKHHPRSSVHRLTLPREDGGRGIIDIANLHNRQVTLLRTFFFEKSKSSTLHQTLSLADKHFTPLNLREINTQPNEKLTSKSDKMLAWAQKVLHGRHYQDLHHPHIDTMASNNWLRKGDLFPETEAFITAIQDQIINTRNYEKFIIHRPNLLTDKCRRCHTASETIQHITGACMAIAQTDYKHRHDQVAAIIHQHLSFKHSLITQKTAYYKYIPQTVLESKHYKIYWDRTIITDKTIHYNRPDIILYDKSNKTVYLIDIAIPNTHNLTATYTEKLAKYTDLAIEIKTQWKVNFVKTVPIIIPIYLFLRKTYS

SEQ ID NO: 22803 - protein, 1377 aa, Notodonta dromedarius
MITRSKSKKISQAGMPVSNETTRVSSPSSSNSLTSPTISANIAHLISTSSPQTPLSRLFSSPNSSPNPFDGQVNYIPTSSSLSSPMSVDVVQEANACILGPTAGNTRARRKWTNEMNEFIWRTYLITTRLETNTRGYLGPLYDSFTTQYPEMNASKQSIGDQRRAIVRNKLLPLSTFDQIKQDVIAYLELNQQPEPIVTQTTNRMRWTNDINETILRIYFEITDMETNLTAYRPKLYDKFIEAYPHLSHVSEQRLSDQRRAIINNRMVSQARIQQIKQDIETQLHITRAHTPLNTQHNAQTLSETHIQTPYYSSQHNNSSSQSTINIGAGLDSSFTLPTENTTPHADNNLEQPNNQKIQYIPAEFDNKINEIFVATYAKYTHTEPTDRPFIPKQRPSKKFEYIINHINTKIIPEYIPSISSFLDTNTIIYCAAYTAAVANDTKIRDGTQLNNNHREQMPPWQQRLQRRIQHFRRDIGRITQFMQGNRSRRLITLVDEIRQKHRIHSQHEEPNRTDEQLLDTLKQKLNATTSRLRRYVNCTLRKKQNTQFITSEKQFYRRLGTGLQQATNNQNSELRTPTADTLQQFWASIWSNPAQHNEEAEWIQSSTEHTTEITQMQFTEVSIDTLKRIIQKTHNWKAPGTDNVHNFWYKKFTSCHVILHRHINEFIHNPATMPQYVSQGITYMIPKDVNDLENPSKYRPITCLQTIYKIITSCITELIYQHTDKNKILAEEQKGCRKNSQGCKEQLIIDSVAMKQALRNKKDLSTMYIDYRKAYDSVPHSWLLYILKHYKIHPTIIAFLENTMCNWKTKLKIGNKISSVQTDAIPIRRGIFQGDALSPLWFCLALNPLSYLLNESNEGLHLETNNTNQHTPTTLTHLMYMDDIKLYSNTTISLHHLADITQTFSNDIQMGFGIDKCKTLTISRGLIEQNEYTLHTGERIEPMDQYSTYKYLGFQQSRQIHQKETKTEITKKFKHRLNSTLKSQLNSRNIIKAINTYAVPILTYSFGIIKWSQSELKQLQRTINTTMTTHRKHHPRSCIQRLTLPREEGGRGLIDITNMHNRQIATLRQYFFAKAQHSTLHHSINIADKHLTPLNLHDTNTQQCEKLISKADKMLAWAQKSLHGRHHQDLQQTHIDTRATNAWLCRGELFPETEAFITAIQDQIIDTRNYQKFIIRRPNLVTDKCRRCHVSSETIQHITGACKSIAQTDYKHRHDQVAAIIHQNLAFKYSLITQKTAYYKYIPQTVLESANYKLYWDRTIITDKTIHFNRPDILLHDKNKKIVYLIDIAIPNTHNLTSTHTEKIAKYTDLAIEIKTQWKVNTVHTIPIILSSTGVIPHTLHTSLSTLNMHPSTYILLQKAVILNTCRLVRKFLSMS

SEQ ID NO: 22804 - protein, 1376 aa, Notodonta dromedarius
MITRSKRKKISQAVMPVSNETTRVSSPSSSNSLTSPTISAAIAHPISTSSPQTPLSSLFSSPNSSPNPFDGQVNSIPTSSSLSSPMSVDVVQEANACILGPTAGNTRARRKWTNEMNEFIWRTYLIITRLETNTRGYLGPLYDSFTTQYPEMNASKQSIGDQRRAIVRNKLLPLSTFDQIKQDVIAYLELNQQPEPIVIQTTNRMRWTNDINETILRIYFEITDMETNLTAYRPKLYDKFIEAYPQLSHVSEQRLSDQRRAIINNRMVSQARIQQIKQEIETQLHITRAHTPSNTQHNAQTLSETHIQTPHYSSQHNNSSSQNTINIVAGLDSSFTLPTENTTPHADNNLEQPNNQQIQYIPAEFDNKINEIFVATYAKYTHTEPTDRPFIPKQRPSKKFEYIINHINIKIIPEYIPSTSSFLDTNTIIYCAAYTAAVANDTKIRDSTQLNNNHRENIPPWQQRLQRRIQHFRRDIGRITQFMQGNRSKRLITLVDEIRQKHRIHSQHEEPNRTDEQLLDTLKQKLNATTSRLRRYVNCTLRKKQNTQFITSEKQFYRRLGTGLQQATNNQNSELRTPTADTLQQFWTSIWSNPAQHNEEAAWIQSSTQHTTEITQMQFTEVSIDTLKRIIQKTHNWKAPGTDNIHNFWYKKFTSCHVILHRHINEFIHNPVTMPQYISQGITYMIPKDVNDLENPSKYRPITCLQTIYKIITSCITELIYQHTDKNKILAEEQKGCRKNSQGCKEQLIIDSVAMKQALRNKKDLSTMYIDYRKAYDSVPHSWLLYILKHYKIHPTIIAFLENTMCNWKTKLKIGNKISSVQTDAIPIRRGIFQGDALSPLWFCLALNPLSYLLNEGNEGLHIETNNDQHTPTTLTHLMYMDDIKLYSNTTISLHHLADITQTFSNDIQMGFGIDKCKTLTISRGLIEQNEYTLHTGERIEPMDQYSTYKYLGFQQSRQIHQKETKTEITKKFKHRLNSTLQSQLNSRNIIKAINTYAVPILTYSFGIIKWSQSELKQLQRTINTTMTTHRKHHPRSCIQRLTLPREEGGRGLIDITNMHNRQIATLRQYFFAKAQHSTLHHSINIADKHLTPLNLHDTNTQQCEKLISKADKMLAWAQKSLHGRHHQDLQQTHIDTRATNAWLWRGELFPETEAFITAIQDQIIDTRNYQKFIIRRPNLVTDKCRRCHVSSETIQHITGACKSIAQTDYKHRHDQVAAIIHQNLAFKYSLITQKTAYYKYIPQTVLESANYKLYWDRTIITDKTIHFNRPDILLHDKNKKIVYLIDIAIPNTHNLTSTHTEKIAKYTDLAIEIKTQWKVNTVHTIPIILSSTGVIPHTLHTSLSTLNMHPSTYILLQKAVILNTCRLVRKFLSMS

SEQ ID NO: 22805 - protein, 1362 aa, Notodonta dromedarius
MPVSNETTRVSSPSSSNSLTSPTISAAIAHPISTSSPQTPLSSLFSSPNSSPNPFDGQVNSIPTSSSLSSPMSVDVVQEANACILGPTAGNTRARRKWTNEMNEFIWRTYLIITRLETNTRGYLGPLYDSFTTQYPEMNASKQSIGDQRRAIVRNKLLPLSTFDQIKQDVIAYLELNQQPEPIVIQSTNRMRWTDDINETILRIYFETTDMETNLTAYRPKLYNKFIEAYPHLSHVSEQRLSDQRRAIINNRMVSQARIQQIKQEIETQLHITRAHTPSNTQHNAQTLSETHIQTPHYSSQHNNSSSQNTINIVAGLDSSFTLPTENTTPHADNNLEQPNNQQIQYIPAEFDNKINEIFVATYAKYTHTEPTDRPFIPKQRPSKKFEYIINHINTKLIPEYIPSISSFLDTNTIIYCAAYTAAVANDTKIRDSTQLNNNHRENIPPWQQRLQRRIQYFRRDIGRITQFMQGNRSRRLITLVDEIRQKHRIHSQHEEPNRTDEQLLDTLKQKLNATTSRLRRYVNCTLRKKQNTQFITSEKQFYRRLGTGLQQATNNQNSELRTPTADTLQQFWASIWSNPAQHNEEAEWIQSSTQHTTEITQMQFTEVSIDTLKRIIQKTHNWKAPGTDNIHNFWYKKFTSCHVILHRHINEFIHNPATMPQYISQGITYMIPKDVNDLENTSKYRPITCLQTIYKIITSCITELIYQHTDKNKILAEEQKGCRKNSQGCKEQLIIDSVAMKQALRNKKDLSTMYIDYRKAYDSVPHSWLLYILKHYKIHPTIIAFLENTMCNWKTKLKIGNKISSVQTDAIPIRRGIFQGDALSPLWFCLALNPLSYLLNESNEGLHIETNNDQHTPTTLTHLMYMDDIKLYSNTTLSLHHLADITQTFSNDIQMGFGIDKCKTLTISRGLIEQNEYTLHTGERIEPMDQYSTYKYLGFQQSRQIHQKETKTEITKKFKHRLNSTLKSQLNSRNIIKAINTYAVPILTYSFGIIKWSQSELKQLQRTINTTMTTHRKHHPRSCIQRLTLPREEGGRGLIDITNMHNRQIATLRQYFFAKAQHSTLHHSINIADKHLTPLNLHDTNTQQCEKLISKADKILAWAQKSLHGRHHQDLQQTHIDTRATNAWLCRGELFPETEAFITAIQDQIIDTRNYQKFIIRRPNLVTDKCRRCHISSETIQHITGACKSIAQTDYKHRHDQVAAIIHQNLAFKYSLITQKTAYYKYIPQTVLESANYKLYWDRTIITDKTIHFNRPDILLHDKIKKIVYLIDIAIPNTHNLTSTHTEKIAKYTDLAIEIKTQWKVNTVHTIPIILSSTGVIPHTLHTSLSTLNMHPSTYILLQKAVILNTCRLVRKFLSMS

SEQ ID NO: 22806 - protein, 1376 aa, Notodonta dromedarius
MITRSKSKKISQAVMPVSNETTRVSSPSSSNSLTSPTISAAIAHPISTSSPQTPLSSLFSSPNSSPNPFDGQVNSIPTSSSLSSPMSVDVVQEANACILGPTAGNTRARRKWTNEMNEFIWRTYLIITRLETNTRGYLGPLYDSFTTQYPEMNASKQSIGDQRRAIVRNKLLPLSTFDQIKQDVIAYLELNQQPEPIVIQSTNRMRWTNDINETILRIYFEITDMETNLTAYRPKLYNKFIEAYPHLSHVSEQRLSDQRRAIINNRMVSQARIQQIKQEIETQLHITRAHTPSNTQHNAQTLSETHIQTPHYSSQHNNSSSQNTINIVAGLDSSFTLPTENTTPHADNNLEQPNNQQIQYIPAEFDNKINEIFVATYAKYTHTEPTDRPFIPKQRPSKKFEYIINHINTKLIPEYIPSISSFLDTNTIIYCAAYTAAVANDTKIRDSTQLNNNHRENIPPWQQRLQRRIQHFRRDIGRITQFMQGNRSRRLITLVDEIRLKHRIHSQHEEPNRTDEQLLDTLKQKLNATTSRLRRYVNCTLRKKQNTQFITSEKQFYRRLGTGLQQATNNQNSELRTPTADTLQQFWASIWSNPAQHNEEAEWIQSSTQHTTEITQMQFTEVSIDTLKRIIHKTHNWKAPGTDNIHNFWYKKFTSCHVILHRHINEFIHNPATMPQYISQGITYMIPKDVNDLENPSKYRPITCLQTIYKIITSCITELIYQHTDKNKILAEEQKGCRKNSQGCKEQLIIDSIAMKQALRNKKDLSTMYIDYRKAYDSVPHSWLLYILKHYKIHPTIIAFLENTMCNWKTKLKIGNKISSVQTDAIPIRRGIFQGDALSPLWFCLALNPLSYLLNESNKGLHIETNNDQHTPKTLTHLMYMDDIKLYSNTTLSLHHLADITQTFSNDIQMGFGIDKCKTLTISRGLIEQNEYTLHTGERIEPMDQYSTYKYLGFQQSRQIHQKETKTEITKKFKHRLNATLKSQLNSRNIIKAINTYAVPILTYSFGIIKWSQSELKQLQRTINTTMTTHRKHHPRSCIQRLTLPREEGGRGLIDITNMHNRQIATLRQYFFAKAQHSTLHHSINIADKHLTPLNLHDTNTQQCEKLISKADKILAWAQKSLHGRHHQDLQQTHIDTRATNAWLCRGELFPETEAFITAIQDQIIDTRNYQKFIIRRPNLVTDKCRRCHISSETIQHITGACKSIAQTDYKHRHDQVAAIIHQNLAFKYSLITQKTAYYKYIPQTVLESANYKLYWDRTIITDKTIHFNRPDILIHDKIKKIVYLIDIAIPNTHNLTSTHTEKIAKYTDLAIEIKTQWKVNTVHTIPIILSSTGVIPHTLHTSLSTLNMHPSTYILLQKAVILNTCRLVRKFLSMS

SEQ ID NO: 22807 - protein, 1172 aa, Notodonta dromedarius
MRWTNDINETILRIYFEITDMETNLTAYRPKLYNKFIEAYPHLSHVSEQRLSDQRRAIINNRMVSQARIQQIKQEIETQLHITRAHTPSNTQHNTQTLSETHIQTPHYSSQHNNSSSQNTINIVAGLDPSFTLPTENTTPHADNNLEQPNNQQIQYIPAEFDNKINEIFVATYAKYTHTEPTDRPFIPKQRPSKKFEYIINHINTKVIPEYIPSISSFLDTNTIIYCAAYTAAVANDTKIRDSTQLNNNHRENIPPWQQRLQRRIQHFRRDIGRITQFMQGNRSRRLITLVDEIRQKHRIHSQHEEPNRTDEQLLDTLKQKLNATTSRLRRYVNCTLRKKQNTQFITSEKQFYRRLGTGLQQATNNQNSELRTPTADTLQQFWASIWSNPAQHNEEAEWIQSSTQHTTEITQMQFTEVSIDTLKRIIQKTHNWKAPGTDNIHNFWYKKFTSCHVILHRHINEFIHNPATMPQYISQGITYMIPKDVNDLENPSKYRPITCLQTIYKIITSCITELIYQHTDKNKILAEEQKGCRKNSQGCKEQLIIDSVAMKQALRNKKDLSTMYIDYRKAYDSVPHSWLLYILKHYKIHPTIIAFLENTMCNWKTKLKIGNKISSVQTDAIPIRRGIFQGDALSPLWFCLALNPLSYLLNESNKGLHIETNNDQHTPKTLTHLMYMDDIKLYSNTTLSLHHLADITQTFSNDIQMGFGIDKCKTLTISRGLIEQNEYTLHTGERIEPMDQYSTYKYLGFQQSRQIHQKETKTEITKKFKHRLNSTLKSQLNSRNIIKAINTYAVPILTYSFGIIKWSQSELKQLQRTINTTMTTHRKHHPRSCIQRLTLPREEGGRGLIDITNMHNRQIATLRQYFFAKAQHSTLHHSINIADKHLTPLNLHDTNTQQCEKLISKADKILAWAQKSLHGRHHQDLQQTHIDTRATNAWLCRGELFPETEAFITAIQDQIIDTRNYQKFIIRRPNLVTDKCRRCHISSETIQHITGACKSIAQTDYKHRHDQVAAIIHQNLAFKYSLITQKTAYYKYIPQTVLESANYKLYWDRTIITDKTIHFNRPDILLHDKIKKIVYLIDIAIPNTHNLTSTHTEKIAKYTDLAIEIKTQWKVNTVHTIPIILSSTGVIPHTLHTSLSTLNMHPSTYILLQKAVILNTCRLVRKFLSMS

SEQ ID NO: 22808 - protein, 1367 aa, Entheus sp.
MITRSKSKMMSRANMPIINKPAQVSPPSSSQSPILSPINSHPRSSLSSSSSSLFPSLDSSTNTLERLYHITSSPSSASSSMSIDVAQVAIADLIGPTIDRTRARRKWTNDMNIFIWRNYLILTRLEKNTRGYLGPLHTKFTAQYPDMHASKQNVGDQRRAILRNKLLSPSTFDQIKQDVATFLEYQPSDSIIVQTTSRIRWSNEVNENILRIYYEVTELETDLTAYRPKLYHRFIETYPHLTHISEQRLSDQRRAIINNRMLPQERIQQIKHNVSLQLTRSHTELNFQRYTQTLNECNPNLQGNLAAPDSTTVTLDETNLTSSPTNTTFNTNAQPNNDQSHFNKQQVHNLTIEIKNKINETFQIIYSKHIHTDPLRRPYIPKQRPSKRLTLIVHYINTKVIPEYITSNCCINDTQTIIYCAAYTAAVINGTKIRENVETNDTKNEYNPPWQRRLQSKIENLRKDIARLLQFSRGNRSRRLLALVEDIRNKHRIHSKHEEPNTTDEHLLDTIKQKLNATTSRLRRYLNCTLRKQQNSLFVASEKQFYRKLGMGQQQTTSFKVTDHHRMPSADALQKFWADIWATTREHNQNAEWIQLTTEHTTNITQMEFIEISIDTLKMVIKNTHNWKAPGTDNIHNYWYKKFTSTHVALHRHINEFIQDPTTLPPYLLQGITYMIPKDPSDPENPSKYRPITCLQNIYKIITSCISHLIYKHTENNNILAEEQKGCRKNSQGCKEQLIIDSIAMTHTLRNKTDLCTMYIDYRKAYDSVPHSWLIHILKLYKIHPTITSFLQTIMKNWKTELRLGSRVTGVQTGCIPIRRGIFQGDALSPLWFCLALNPLSYLLKDGNAGLPIEICNNNEYTQTTLTHLLYMDDIKIFSNTTQTLHQLADITQMFSNDINMQFGIDKCKTLTITNGTAEPHAYTLITGESIEPMDQNSTYKYLGFQQSHNIQQKDTKIDLTKKFKHRINLILRSQLNSRNIIKAINTFAIPILTYSFGIIKWTQTELKNLQRIINTSMTAHRKHHPRSSIHRLTLPREDGGRSITDITNLHNKQITGLRTFFFKKAQQSILHQTLSLADKHLTPLNLHETNTQPNEKLTSKSDKMLAWAQKVLHGRHYQDLHQPHTDKKASNNWLCRGDLFPETEAFIIAIQDQIINTRNYEKFIIHRPNLTTDKCRRCHTSSETIQHITGACKAIAQTDYKHRHDQVAAIIHQSLAFKHALVTQKTAYYKYMPQTVLESTDYKIYWDRTIITDKTIHYNRPDIIFYDKARKSVYLIDIAIPNTHNLTSTYTEKLAKYTDLTIEIKTQWKVNSVRTVPIIISSTGVIPHSLHTSLSTLNIHPSTYTLLQKAVILNTCRLVRKFLSLS

SEQ ID NO: 22809 - protein, 1362 aa, Clostera curtula
MEIMNNNRYNLRSLPGGRRGASGANAGCHSMRTIGGQELNRRAPTEKNTTADITHPHNDSTISSSSSNSLFQSPSSSPLWNRHCRSSSSMSSYASADDVQVATASNPEPTTGQTRARKKWTVEMNKFIWRTYLIITKLETSTRGHLQYLHQEFTNKYPEMNASKQRVGDQRRAIVNKKLLPVNVLNEIKQEISNLLLDNQEPSIPLTCTQTSNRMRWSDEVNESIIRIYYEITESETNLTAYRKKLHEQFIEKYPHLSHISEQRLSDQRRAIVNNKMLSESKIEEIRREVEMLSNTQTNPQNHSRENVAPIDSSIPPSSRESLVFNLIETNIVSTCSPNHIQGIDTNTAHPEYQTCVIPINYDNDITETFKTAYHNFSNIEPTQRPYIPKLQTNRKHSYIINFLNENILPQYITLEDFMNIQTIVYCTAYTVAVCTGVKIKLTEDLNQNSKNNNIPSWQRRLNNRIKNLRRDIGRMTQFIRGNSNPRLLILVNNIKNKYKIHSQYEEPNITNEQLLDTLKQKLSATASRLRRYLNCTLRKQQNALFHSSEKQFYRSLQTKHSDAPSQMPPNLDSFHQFWSNIWSNPVEHNPQAQWIEAILPDTNKITPMPFDSIPFDIFFKVLQKTHNWKAPGTDKIHNYWYKKLTSLHSLLHQHINRFIEDPSKMPQYITQGVTYMLPKDETDRGNPSKYRPITCLQTIYKILTGCLTELIYQHTADNSILTEEQKGCRKQSQGCKEQLIIDSVAMKHTLRQKQNLSSMYIDYKKAYDSVPHTWLLYILKLYKVNPILVDFLKYTMHSWNTILKIKTDNTTISTDSIRIKRGIFQGDALSPLWFCLALNPLSQLLIKSQEGLHLQNEINLSHLMYMDDIKLYSQSTDSLHRLADITQTFSKDIKMEFGINKCKTFTISRGKVINNPYLLDTGEQIEPIDNNSTYKYLGFHQSRQIHQTETKKELIKKFKHRLNLLLRSQLNSRHLIKSINTFAIPILTYSFGIIRWSKSELKNLQRIINTTMTANRKHHPRSCIQRLTLPREIGGRGLIDIVNLHNKQISNLRSFFLDRGRYSKLHETINMADKKLTALNLSNSSTQQNETLTTIQEKYTTWAQKSLHGRHYNDLHLPHIDRTASNAWLGKGELFPETEAFMLAIQDQVIDTRNYQKFIIHRPNLVTDTCRRCYINSETIQHITGACKSLAQTDYKHRHDQVAAIVHQNLAFKYKLLKERTSYYKYKPQSVLENPDHKLYWDRTIITDKTIHNNRPDILLYDKRKKTVFLIDIAVPNTHNLASTYTEKIAKYTDLSIEIKTQWKVQNVRTIPIILSTTGMIPKTLHTGLKTLSIHQSTYILLQKAVILNTCRIVRKFLSLE

SEQ ID NO: 22810 - protein, 1362 aa, Clostera curtula
MEIMNNNRYNLRSLPGGRRGASGANAGCHSMRTIGGQELNRRAPTEKNTTADITHPHNDSTISSSSSNSLFQSPSSSPLWNRHCRSSSSMSSYASADDVQVATASNPEPTTGQTRARKKWTVEMNKFIWRTYLIITKLETSTRGHLQYLHQEFTNKYPEMNASKQRVGDQRRAIVNKKLLPVNVLNEIKQEISNLLLDNQEPSIPLTCTQTSNRMRWSDEVNESIIRIYYEITESETNLTAYRKKLHEQFIEKYPHLSHISEQRLSDQRRAIVNNKMLSESKIEEIRREVEMLSNTQTNPQNHSRENVAPIDSSIPPSSRESLVFNLIETNIVSTCSPNHIQGIDTNTAHPEYQTCVIPINYDNDITETFKTAYHNFSNIEPTQRPYIPKLQTNRKHSYIINFLNENILPQYITLEDFMNIQTIVYCTAYTVAVCTGVKIKLTEDLNQNSKNNNIPSWQRRLNNRIKNLRRDIGRMTQFIRGNSNPRLLILVNNIKNKYKIHSQYEEPNITNEQLLDTLKQKLSATASRLRRYLNCTLRKQQNALFHSSEKQFYRSLQTKHSDAPSQMPPNLDSFHQFWSNIWSNPVEHNPQAQWIEAILPDTNKITPMPFDSIPFDIFFKVLQKTHNWKAPGTDKIHNYWYKKLTSLHSLLHQHINRFIEDPSKMPQYITQGVTYMLPKDETDRGNPSKYRPITCLQTIYKILTGCLTELIYQHTADNSILTEEQKGCRKQSQGCKEQLIIDSVAMKHTLRQKQNLSSMYIDYKKAYDSVPHTWLLYILKLYKVNPILVDFLKYTMHSWNTILKIKTDNTTISTDSIRIKRGIFQGDALSPLWFCLALNPLSQLLIKSQEGLHLQNEINLSHLMYMDDIKLYSQSTDSLHRLADITQTFSKDIKMEFGINKCKTFTISRGKVINNPYLLDTGEQIEPIDNNSTYKYLGFHQSRQIHQTETKKELIKKFKHRLNLLLRSQLNSRHLIKSINTFAIPILTYSFGIIRWSKSELKNLQRIINTTMTANRKHHPRSCIQRLTLPREIGGRGLIDIVNLHNKQIFNLRSFFLDRGRYSKLHETINMADKKLTALNLSNSSTQQNETLTTIQEKYTTWAQKSLHGRHYNDLHLPHIDRTASNAWLGKGELFPETEAFMLAIQDQVIDTRNYQKFIIHRPNLVTDTCRRCYINSETIQHITGACKSLAQTDYKHRHDQVAAIVHQNLAFKYKLLKERTSYYKYKPQSVLENPDHKLYWDRTIITDKTIHNNRPDILLYDKRKKTVFLIDIAVPNTHNLASTYTEKIAKYTDLSIEIKTQWKVQNVRTIPIILSTTGMIPKTLHTGLKTLSIHQSTYILLQKAVILNTCRIVRKFLSLE

SEQ ID NO: 22811 - protein, 1362 aa, Clostera curtula
MEIMNNNRYNLRSLPGGRRGASGANAGCHSMRTIGGQELNRRAPTEKNTTADITHPHNDSTISSSSSNSLFQSPSSSPLWNRHCRSSSSMSSYASADDVQVATASNPEPTTGQTRARKKWTVEMNKFIWRTYLIITKLETSTRGHLQYLHQEFTNKYPEMNASKQRVGDQRRAIVNKKLLPVNVLNEIKQEISNLLLDNQEPSIPLTCTQTSNRMRWSDEVNESIIRIYYEITESETNLTAYRKKLHEQFIEKYPHLSHISEQRLSDQRRAIVNNKMLSESKIEEIRREVEMLSNTQTNPQNHSRENVAPFDSSIPPSSRESLLFNLIETNIVSTCSPNHIQGIDTNTAHPEYQTCVIPINYDNDITETFKTAYHNFSNIEPTQRPYIPKLQTNRKHSYIINFLNENILPQYITLEDFMNIQTIVYCTAYTVAVCTGVKIKLTEDLNQNSKNNNIPSWQRRLNNRIKNLRRDIGRMTQFIRGNSNPRLLMLVNNIKNKYKIHSQYEEPNITNEQLLDTLKQKLSATASRLRRYLNCTLRKQQNALFHSSEKQFYRSLQTKHSDAPSQMPPNLDSFHQFWSNIWSNPVEHNPQAQWIEAILPDTNKITPMPFDSIPFDIFFKVLQKTHNWKAPGTDKIHNYWYKKLTSLHSLLHQHINRFIEDPSKMPQYITQGVTYMLPKDETDRGNPSKYRPITCLQTIYKILTGCLTELIYQHTADNSILTEEQKGCRKQSQGCKEQLIIDSVAMKHTLRQKQNLSSMYIDYKKAYDSVPHTWLLYILKLYKVNPILVDFLKYTMHSWNTILKIKTDNTTISTDSIRIKRGIFQGDALSPLWFCLALNPLSQLLIKSQEGLHLQNEINLSHLMYMDDIKLYSQSTDSLHRLADITQTFSKDIKMEFGINKCKTFTISRGKVINNPYLLDTGEQIEPIDNNSTYKYLGFHQSRQIHQTETKKELIKKFKHRLNLLLRSQLNSRHLIKSINTFAIPILTYSFGIIRWSKSELKNLQRIINTTMTANRKHHPRSCIQRLTLPREIGGRGLIDIVNLHNKQISNLRSFFLDRGRYSKLHETINMADKKLTALNLSNSSTQPNETLTTIQEKYTTWAQKSLHGRHYNDLHLPHIDRTASNAWLGKGELFPETEAFMLAIQDQVIDTRNYQKFIIHRPNLVTDTCRRCYINSETIQHITGACKSLAQTDYKHRHDQVAAIVHQNLAFKYKLLKERTSYYKYKPQSVLENPDHKLYWDRTIITDKTIHNNRPDILLYDKRKKTVFLIDIAVPNTHNLASTYTEKIAKYTDLSIEIKTQWKVQNVRTIPIILSTTGMIPKTLHTGLKTLSIHQSTYILLQKAVILNTCRIVRKFLSLE

SEQ ID NO: 22812 - protein, 1086 aa, Clostera curtula
MLSESKIEEIRREVEMLSNTQTNPQNHSIENVAPIDSSIPPSSRESLVFNLIETNIVSTCSPNHIQGIDTNTAHPEYQPCVIPINYDNEITETFKTAYHNFSNIEPTQRPYIPKLQTNRKHSYIINFLNENILPQYITLEDFMNIQTIVYCTAYTVAVCTGVKIKLTEDLNQNSKNNNIPSWQRRLNNRIKNLRRDIGRMTQFIRGNSNPRLLTLVNNIKKKYKIHSQYEEPNITNEQLLDTLKQKLSATASRLRRYLNCTLRKQQNALFHSSEKQFYRSLQTKHSDATSQMPPNLDSFHQFWSNIWSNPVEHNPQAQWIEAILPDTNKITPMPFDSIPFDIFFKVLQKTHNWKAPGTDKIHNYWYKKLTSLHSLLHQHINRFIEDPSKMPQYITQGVTYMLPKDETDRGNPSKYRPITCLQTIYKILTGCLTELIYQHTADNSILTEEQKGCRKQSQGCKEQLIIDSVAMKHTLRQKQNLSSMYIDYKKAYDSVPHTWLLYILKFYKVNPILVDFLKYTMHSWNTILKIKTDNTTISTDSIPIKRGIFQGDALSPLWFCLALNPLSQLLFKSQEGLHLQNEINLSHLMYMDDIKLYSQSTDSLHRLADITQTFSKDIKMEFGIDKCKTFTISRGKVINNPYLLDTGEQIEPIDNNSTYKYLGFHQSRQIHQSETKKELIKKFKHRLNLLLRSQLNSRHLIKSINTFAIPILTYSFGIIRWSKSELKNLQRIINTTMTANRKHHPRSCIQRLTLPREIGGRGLIDIVNLHNKQISNLRSFFLDRGRYSKLHETINLADKKLTALNLSNSSTQPNETLTTIQEKYTTWAQKSLHGRHYNDLHLPHIDRTASNAWLSKGELFPETEAFMLAIQDQVLDTRNYQKFIIHRPNLVTDTCRRCYINSETIQHITGACKSLAQTDYKHRHDQVAAIVHQNLAFKYKLLKERTSYYKYKPQSVLENPDHKLYWDRTIITDKTIHNNRPDILLYDKRKKTVFLIDIAVPNTHNLASTYTEKIAKYTDLSIEIKTQWRVQNVRTIPIILSTTGMIPKTLHTGLKTLSIHQSTYILLQKAVILNTCRIVRKFLSLE

SEQ ID NO: 22813 - protein, 1362 aa, Clostera curtula
MEIMNNNRYNLRSLPGGRRGASGANAGCHSMRTIGGQELNRRAPTEKNTTADITHPHNDSTISSSSSNSLFQSPSSSPLWNRHCRSSSSMSSYASADDVQVATASNPEPTTGQTRARKKWTVEMNKFIWRTYLIITKLETSTRGHLQYLHQEFTNKYPEMNASKQRVGDQRRAIVNKKLLPVNVLNEIKQEISNLLLDNQEPSIPLTCTQTSNRMRWSDEVNESIIRIYYEITESETNLTAYRKKLHEQFIEKYPHLSHISEQRLSDQRRAIVNNKMLSESKIEEIRREVEMLSNTQTNPQNHSRENVAPFDSSIPPSSRESLLFNLIETNIVSTCSPNHIQGIDTNTAHPEYQTCVIPINYDNDITETFKTAYHNFSNIEPTQRPYIPKLQTNRKHSYIINFLNENILPQYITLEDFMNIQTIVYCTAYTVAVCTGVKIKLTEDLNQNSKNNNIPSWQRRLNNRIKNLRRDIGRMTQFIRGNSNPRLLMLVNNIKNKYKIHSQYEEPNITNEQLLDTLKQKLSATASRLRRYLNCTLRKQQNALFHSSEKQFYRSLQTKHSDAPSQMPPNLDSFHQFWSNIWSNPVEHNPQAQWIEAILPDTNKITPMPFDSIPFDIFFKVLQKTHNWKAPGTDKIHNYWYKKLTSLHSLLHQHINRFIEDPSKMPQYITQGVTYMLPKDETDRGNPSKYRPITCLQTIYKILTGCLTELIYQHTADNSILTEEQKGCRKQSQGCKEQLIIDSVAMKHTLRQKQNLSSMYIDYKKAYDSVPHTWLLYILKLYKVNPILVDFLKYTMHSWNTILKIKTDNTTISTDSIRIKRGIFQGDALSPLWFCLALNPLSQLLIKSQEGLHLQNEINLSHLMYMDDIKLYSQSTDSLHRLADITQTFSKDIKMEFGINKCKTFTISRGKVINNPYLLDTGEQIEPIDNNSTYKYLGFHQSRQIHQTETKKELIKKFKHRLNLLLRSQLNSRHLIKSINTFAIPILTYSFGIIRWSKSELKNLQRIINTTMTANRKHHPRSCIQRLTLPREIGGRGLIDIVNLHNKQISNLRSFFLHRGRYSKLHETINMADKKLTALNLSNSSTQPNETLTTIQEKYTTWAQKSLHGRHYNDLHLPHIDRTASNAWLGKGELFPETEAFMLAIQDQVIDTRNYQKFIIHRPNLVTDTCRRCYINSETIQHITGACKSLAQTDYKHRHDQVAAIVHQNLAFKYKLLKERTSYYKYKPQSVLENPDHKLYWDRTIITDKTIHNNRPDILLYDKRKKTVFLIDIAVPNTHNLASTYTEKIAKYTDLSIEIKTQWKVQNVRTIPIILSTTGMIPKTLHTGLKTLSIHQSTYILLQKAVILNTCRIVRKFLSLE

SEQ ID NO: 22814 - protein, 1071 aa, Clostera curtula
MLSNTQTYPQNHSIENVAPIDSSIPPSSRESLVFNLIETNIVSTCSPNHIQGIDTNTAHPEYQPCVIPINYDNEITETFKTAYHNFSNIEPTQRPYIPKLQTNRKHSYIINFLNENILPQYITLEDFMNIQTIVYCTAYTVAVCTGVKIKLTEDLNQNSKNNNIPSWQRRLNNRIKNLRRDIGRMTQFIRGNSNPRLLTLVNNIKNKYKIHSQYEEPNITNEQLLDTLKQKLSATASRLRRYLNCTLRKQQNALFHSSEKQFYRSLQTKHSDAPSQMPPNLDSFHQFWSNIWSNPVEHNPQAQWIEAILPDTNKITPMPFDSIPFDIFFKVLQKTHNWKAPGTDKIHNYWYKKLTSLHSLLHQHINRFIEDPSKMPQYITQGVTYMLPKDETDRGNPSKYRPITCLQTIYKILTGCLTELIYQHTADNSILTEEQKGCRKQSQGCKEQLIIDSVAMKHTLRQKQNLSSMYIDYKKAYDSVPHTWLLYILKLYKVNPILVDFLKYTMHSWNTILKIKTDNTTISTDSIRIKRGIFQGDALSPLWFCLALNPLSQLLIKSQEGLHLQNEINLSHLMYMDDIKLYSQSTDSLHRLADITQTFSKDIKMEFGIDKCKTFTISRGKVINNPYLLDTGEQIEPIDNNSTYKYLGFHQSRQIHQTETKKELIKKFKHRLNLLLRSQLNSRHLNKSINTFAIPILTYSFGIIRWSKSELKNLQRIINTTMTANRKHHPRSCIQRLTLPREIGGRGLIDIVNLHNKQISNLRSFFLDRGRYSKLHETINMADKKLTALNLSNSSTQPNETLTTIQEKYTTWAQKSLHGRHYNDLHLPHIDRTASNAWLGKGELFPETEAFMLAIQDQVIDTRNYQKFIIHRPNLVTDTCRRCYINSETIQHITGACKSLAQTDYKHRHDQVAAIVHQNLAFKYKLLKERTSYYKYKPQSVLENPDHKLYWDRTIITDKTIHNNRPDILLYDKRKKTVFLIDIAVPNTHNLASTYTEKIAKYTDLSIEIKTQWRVQNVRTIPIILSTTGMIPKTLHTGLKTLSIHQSTYILLQKAVILNTCRIVRKFLSLE

SEQ ID NO: 22815 - protein, 1362 aa, Clostera curtula
MEIMNNNRYNLRSLPGGRRGASGANAGCHSMRTIGGQELNRRAPTEKITTADITHPHNDSTISSSSSNSLFQSPSLSPLWNRHCRSSSSMSSYASADDVQVATASNPEPTTGQTRARKKWTVEMNKFIWRTYLIITKLETSTRGHLQYLHQEFTNKYPEMNASKQRVGDQRRAIVNKKLLPVNLLNEIKQEVSNLLLDNQEPTISLTCTQTSNRMRWSDEVNESIIRIYYEITESETNLTAYRKKLHEQFIEKYPHLSHISEQRLSDQRRAIVNNKIISESKIEEIRREVEMLSNTQTNPQNHSIENVAPIDSSIPPSSRESLVFNLIETNIVSTCSPNHIQGIDTNTAHPEYQPCVIPINYDNEITETFKTAYHNFSNIEPTQRPYIPKLQTNRKHSYIINFLNENILPQYITLEDFMNIQTIVYCTAYTVAVCTGVKIKLTEDLNQNSKNNNIPSWQRRLNNRIKNLRRDIGRMTQFIRGNSNPRLLTLVNNIKNKYKIHSQYEEPNITNEQLLDTLKQKLSATASRLRRYLNCTLRKQQNALFHSSEKQFYRSLQTKHSDTTSQMPPNLDSFHQFWSNIWSNPVEHNPQAQWIEAILPDTNKITPMPFDSIPFDIFFKVLQKTHNWKAPGTDKIHNYWYKKLTSLHSLLHQHINRFIEDPSKMPQYITQGVTYMLPKDETDRGNPSKYRPITCLQTIYKILTGCLTELIYQHTADNSILTEEQKGCRKQSQGCKEQLIIDSVAMKHTLRQKQNLSSMYIDYKKAYDSVPHTWLLYILKFYKVNPILVDFLKYTMHSWNTILKIKTDNTTISTDSIPIKRGIFQGDALSPLWFCLALNPLSQLLFKSQEGLHLQNEINLSHLMYMDDIKLYSQSTDSLHRLADITQTFSKDIKMEFGIDKCKTFTISRGKVINNPYLLDTGEQIEPIDNNSTYKYLGFHQSRQIHQSETKKELIKKFKHRLNLLLRSQLNSRHLIKSINTFAIPILTYSFGIIRWSKSELKNLQRIINTTMTANRKHHPRSYIQRLTLPREIGGRGLIDIVNLHNKQISNLRSFFLDRGRYSKLHETINLADKKLTALNLSNSSTQPNETLTTIQEKYTTWAQKSLHGRHYNDLHLPHIDRTASNAWLSKGELFPETEAFMLAIQDQVLDTRNYQKFIIHRPNLVTDTCRRCYINSETIQHITGACKSLAQTDYKHRHDQVAAIVHQNLAFKYKLLKERTSYYKYKPQSVLENPDHKLYWDRTIITDKTIHNNRPDILLYDKRKKTVFLIDIAVPNTHNLASTYTEKIAKYTDLSIEIKTQWRVQNVRTIPIILYTTGMIPKTLHTGLKTLSIHQSTYILLQKAVILNTCRIVRKFLSLE

SEQ ID NO: 22816 - protein, 1362 aa, Clostera curtula
MEIMNNNRYNLRSLPGGRRGASGANAGCHSMRTIGGQELNRRAPTEKITTADITHPHNDSTISSSSSNSLFQSPSSSPLWNRHCRSSSSMSSYASADDVQVATASNPEPTTGQTRARKKWTVEMNKFIWRTYLIITKLETSTRGHLQYLHQEFTNKYPEMNASKQRVGDQRRAIVNKKLLPVNVLNEIKQEISNLLLDNQEPTIPLTCTQTSNRMRWSDEVNESIIRIYYEITESETNLTAYRKKLHEQFIEKYPHLSHISEQRLSDQRRAIVNNKMLSESKIEEIRREVEMLSNTQTYPQNHSIENVAPIDSSIPPSSRESLVFNLIETNIVSTCSPNHIQGIDTNTAHPEYQPCVIPINYDNEITETFKTAYHNFSNIEPTQRPYIPKLQTNRKHSYIINFLNENILPQYITLEDFMNIQTIVYCTAYTVAVCTGVKIKLTEDLNQNSKNNNIPSWQRRLNNRIKNLRRDIGRMTQFIRGNSNPRLLTLVNNIKNKYKIHSQYEEPNITNEQLLDTLKQKHSATASRLRRYLNCTLRKQQNALFHSSEKQFYRSLQTKHSDAPSQMPPNLDSFHQFWSNIWSNPVEHNPQAQWIEAILPDTNKITPMPFDSIPFDIFFKVLQKTHNWKAPGTDKIHNYWYKKLTSLHSLLHQHINRFIEDPSKMPQYITQGVTYMLPKDETDRGNPSKYRPITCLQTIYKILTGCLTELIYQHTADNSILTEEQKGCRKQSQGCKEQLIIDSVAMKHTLRQKQNLSSMYIDYKKAYDSVPHTWLLYILKLYKVNPILVDFLKYTMHSWNTILKIKTDNTTISTDSIRIKRGIFQGDALSPLWFCLALNPLSQLLIKSQEGLHLQNEINVSHLMYMDDIKLYSQSTDSLHRLADITQTFSKDIKMEFGIDKCKTFTISRGKVINNPYLLDTGEQIEPIDNNSTYKYLGFHQSRQIHQTETKKELIKKFKHRLNLLLRSQLNSRHLIKSINTFAIPILTYSFGIIRWSKSELKNLQRIINTTMTANRKHHPRSCIQRLTLPREIGGRGLIDIVNLHNKQISNLRSFFLDRGRYSKLHETINMADKKLTALNLSNSSTQPNETLTTIQEKYTTWAQKSLHGRHYNDLHLPHIDRTASNAWLGKGELFPETEAFMLAIQDQVIDTRNYQKFIIHRPNLVTDTCRRCYINSETIQHITGACKSLAQTDYKHRHDQVAAIVHQNLAFKYKLLKERTSYYKYKPQSVLENPDHKLYWDRTIITDKTIHNNRPDILLYDKRKKDVFLIDIAVPNTHNLASTYTEKIAKYTDLSIEIKTQWRVQNVRTIPIILSTTGMIPKTLHTGLKTLSIHQSTYILLQKAVILNTCRIVRKFLSLE

SEQ ID NO: 22817 - protein, 1010 aa, Furcula furcula
MAYRKYIDTEPTQRPYIPKQKVTKKLTHIVDHINTSILPQYIQLDHNFSHTHTLIYCAAYTAAVINGTKIKDNIQQQQQQQNTTYEKYTPHWQRRLQQKIQNLRKDIGRFIQYMRGNRSRRLVALVNDIRNKHRIHSQHEESNTTNEQFLDTLKQKLNATVSRLRRYLNCTLRKQQNIQFSNSEKQFYRRFTSSTGLQETTTNQDSPERRVPTLDSLHQFWSNIWSKPIYHNQHAEWIQSSPQLNTNLTHMQFTEIPMDTFTRVIQKIHNWKAPGTDNIHNFWYKKLTSVHSTLHEHINQFIQNPSTLPQFISEGITYMIPKDVNDTENPSKYRPITCLQTIYKIITSCLTELIYHHIETNKILSEEQKGCRKYSQGCKEQLLIDSIAMQQALRNKKDLCTMYIDYQKAYDSIPHSWLLYILNHYKIHPVLITFLENSMQHWSTKLKIGNVQTECIPIRRGIFQGDSLSPLWFCLALNPLSYLLNESNDTSSSSRLHIKSVNQHADRTLTHLMYMDDIKLYSNTTHSLHRLADITYTFSNDIQMEFGVDKCKTLTIINGTIEHNDYTLDTTERIEPMDQNTTYKYLGFQQSSQIHQKETKTEIIKKFKHRLNLILKTQLNSRNIIKAINSFAIPILTYSFGVIKWTQTELTNLQRIINTTMTTHRKHHPRSCIQRLTLRREEGGRGIIDIKNLHNKQITSMRQYFFRRAQQTTLHNIITHSDKHLTPLNLNDANTQSNEKLTTKEDKILAWTQKSLHGRHYQDIHQSHVDTKASNNWLQRGNLFPETEAFLLAIQDQILDTRNYQKHIIRNPNLITDKCRRCHVSSETIQHITGACRVIAQTDYKHRHDQVAAIIHQDLSFKHSLITHKVPYYKYIPQTILESADFKLYWDRTIITDKTIHYNRPDILLHDKINNTVLLIDIAIPNTHNLSSTYTEKISKYTDLAIEIKTQWKVHTVKTVPIILSSTGVVPLTLHTSLNILDIHPSTYTLMQKAVILNTCRLVRKFLSLN

SEQ ID NO: 22818 - protein, 1371 aa, Furcula furcula
MRTLDTRGSPVLFYPCRGECRALPRLTSRSLATRGNNMLTRSKIKKLNEANMPIESELVQVQSPISSTISSHHILSPSPTSSIFPSPNSSSNLVSSPSSSIVSADVIQGALAQNLGSTAGKTRARRKWTNEMNMFIWRTYLIITGLETNTRGYLDTLHNRFTEAYPDMNASKQNVGDQRRAILNRKLLSISTLNEIRNEVADYLKDTQLTPLTLEQTTIRMRWSNDINETIIRIYYEITDLETNLTAYRKKLYDKFIEIYPHLSHLSEQRLSDQKRAIINNKMIPHERIQQIRHEVELQLHSSQSHIHSNSQHNTATLTQLQEHNIVNQDTNYIETNLYVDTSNQQSPIISQQSQTELYSKTTETFDMAYRKYIDTEPTQRPYIPKQKVTKKLTHIVDHINTSILPQYIQLDHNFSHTHTLIYCAAYTAAVINGTKIKDNIQQQQQQNTTYEKYTPHWQRRLQQKIQNLRKDIGRFIQYMRGNRSRRLVALVNDIRNKHRIHSQHEESNTTNEQFLDTLKQKLNASVSRLRRYLNCTLRKQQNIQFSNSEKQFYRRFTSSTGLQETTTNQDSPERRIPTLDSLHQFWSNIWSKPIYHNQHAEWIQSSSQHNTNLTHMQFTEIPMDTFTRVIQKIHNWKAPGTDNIHNFWYKKLTSVHSTLHQHINQFIQNPSTLPQFISEGITYMIPKDVNDTENPSKYRPITCLQTIYKIITSCLTELIYHHIETNKILSEEQKGCRKYSQGCKEQLLIDSIAMQQALRNKKDLCTMYIDYRKAYDSIPHSWLLYILTHYKIHPVLITFLENSMQHWSTKLKIGNVQTECIPIRRGIFQGDSLSPLWFCLALNPLSYLLNESNEGLHIKSVNQHADRTLTHLMYMDDIKLYSNTTHSLHRLADITYTFSNDIQMEFGVDKCKTLTIINGTIEHNDYTLDTTERIEPMDQNTTYKYLGFQQSSQIHQKETKTEIIKKFKHRLNLILKTQLNSRNIIKAINSFAIPILTYSFGVIKWTQTELTNLQRIINTTMTTHRKHHPRSCIQRLTLRREEGGRGIIDIKNLHNKQITSMRQYFFRRAQQTTLHNIITHSDKHLTPLNLNDANTQSNEKLTTKEDKILAWTQKSLHGRHYQDIHQSHVDTKASNNWLQRGNLFPETEAFLLAIQDQILDTRNYQKHIIRNPNLITDKCRRCHVSSETIQHITGACRVIAQTDYKHRHDQVAAIIHQDLSFKHSLITHKVPYYKYIPQTILESADFKLYWDRTIITDKTIHYNRPDILLHDKINNTVLLIDIAIPNTHNLSSTYTEKISKYTDLAIEIKTQWKVHTVKTVPIILSSTGVVPLTLHTSLNILDIHPSTYTLMQKAVILNTCRLVRKFLSLN

SEQ ID NO: 22819 - protein, 1332 aa, Furcula furcula
MLTRSKIRRLKETNMSPESELVQVHSPISSTISPHHILSLSPSSSIFPSPNLSPNLGSSSSSSIVSAAVIQGALAQNLGSTVGKTRARRKWTNEMNMFIWRTYLIITELETKTRGYLDPLHTRFTEEYPEMNASKQNVGDQRRAILNKKLLSITSLSEIRNEVADYLKNTQPAPLTLEQTGIRMRWSNEINETIIRIYYEITDLETNLTAYRKKLYDKFTEIYPHLSHLSEQRLSDQKRAIINNKMIPHERIQQIRQEVELQLHSSQSHIHPNSQHNTATLTELHEHNIVNQDTNCIETNFYVDNSNQESPVINQQSQFIQTDLYSKISETFDMAYRKYINTEPTQRPYIPKQQLSKKLTHIVDHINTSILPQYIQLNHNFSHTHTLIYCAAYTAALTNGTKIKDNIQRQQQNTTYEKYVPHWQRRLQQKIQNLRKDIGRFVQYTRGNRSRRIIALVNYIRNKHRIHSHHEESNITNEQFLNTLKQKLNAAASRLRRYLNCTRRKQQNMQFSNSEKQFYRQFSTGTITNKNSEERRVPTLDSLHQFWSNIWSKPTCHNQHADWLHSSSQHNTNLTHMQFIEVPMDIFIRVVQKIHNWKTPGTDNIHNFWYKKLTSVHATLHEHINQFIQNPSTLPQFISEGITYMIPKDVNDPENPSKYRPITCLQTIYKIITSCITELIDQHIESNKILAEEQKGCRKYSQGCKEQLIIDSIAMQQALRDKKDLCTMYIDYRKAYDSIPHSWLLYILNHYKIHPVLINFLENSMKQWSTKLKIGNIQTESIPIRRGIFQGDSLSPLWFCLALNPLSYLLNETNAGLFLKPDIGQHTDRTLTHLMYMDDIKLYSNTTHSLHHLADITHTFSNDIRMEFGVDKCKTLTIINGTIEHNDYTLNDTDRIEPMDQNSTYKYLGFQQSRQIHQKETKTEIIKKFKYRLNLILKTQLNSRNIIKAINSFAIPILTYSFGVIKWTQTELKNLQRIINTTMTTHRKHHPRSCIQRLTLGREEGGRGIIDIQNLHNKQITSMRQYFFRRAQQTTLHNKIIHSDKHITPLNLYDANTQSNEKLTTKEDKILAWTQKSLHGRHHQDIHQAHVDTKASNNWLQRGNLFPETEAFLIAIQDQILDTRNYQKHIIHNPNLITDKCRRCHVSSETIQHITGACKAIAQTDYKHRHDQVAAIIHQDLAFKHSLIIQKIPYYKYIPQTILESTDFKLYWDRTIITDKTIHYNRPDLVLHDKNNSIVFLIDIAIPNTHNLSSTYTEKIAKYTDLAIEIKTQWKVRTVKTVPIILSSTGVVPLTLHTSLNILDIHPSTYTLIQKAVILNTCRLVRKFLSLN

SEQ ID NO: 22820 - protein, 1332 aa, Furcula furcula
MLTRSKIRRLKETNMSPESELVQVHSPISSTTSPHHILSLSPSSSIFPSPNLSPNLGSSSSSSVVSAAVIQGALAQNLGSTVGKTRARRKWTNEMNMFIWRTYLIITELETKTRGYLDPLHTRFTEEYPEMNASKQNVGDQRRAILNKKLLSITSLSEIRNEVADYLKNTQPAPLTLEQTGIRMRWSNEINETIIRIYYEITDLETNLTAYRKKLYDKFTEIYPHLSHLSEQRLSDQKRAIINNKMIPHERIQQIRQEVELQLHSSQSHIHPNSQHNTATVTELHEHIIVNQDTNCIETNLYVDNSNQESPIINQQSQFIQTDLYSKISETFDMAYRKYINTEPTQRPYIPKQQLSKKLTHIVDHINTSILPQYIQLNHNFSHTHTLIYCAAYTAALTNGTKIKDNIQRQQQNTTYEKYVPHWQRRLQQKIQNLRKDIGRFVQYTRGNRSRRIIALVNDIRNKHRIHSHHEESNITNEQFLDTLKQKLNAAASRLRRYLNCTRRKQQNMQFSNSEKPFYRQFSTGTITNKNSEERRVPTLDSLYQFWSNIWSKPTCHNQHADWLHSSSQHNTNLTHMQFIEVPMDIFIRVVQKIHNWKAPGTDNIHNFWYKKLTSVHATLHEHINQFIQNPSTLPQFISEGITYMIPKDVNDPENPSKYRPITCLQTIYKIITSCITELIDQHIESNKILAEEQKGCRKYSQGCKEQLIIDSIAMQQALRDKKDLCTMYIDYRKAYDSIPHSWLLYILNHYKIHPVLINFLENSMKQWSTKLKIGNIQTESIPIRRGIFQGDSLSPLWFCLALNPLSYLLNETNAGLFLKPDIGQHTDRTLTHLMYMDDIKLYSNTTHSLHHLADITHTFSNDIRMEFGVDKCKTLTIINGTIEHNDYTLNDTDRIEPMDQNSTYNYLGFQQSRQIHQKETKTEIIKKIKYRLNLILKTQLNSRNIIKAINSFAIPILTYSFGVIKWTQTELKNLQRTINTTMTTHRKHHPRSCIQRLTLGREEGGRGIIDIQNLHNKQIISMRQYFFRRAQQTTLHNKIIHSDKHITPLNLYDANTQSNEKLTTKEDKILAWTQKSLHGRHHQDIHQAHVDTKASNNWLQRGNLFPETEAFLIAIQDQILDTRNYQKHIIHNPNLITDKCRRCHVSSETIQHITGACKAIAQTDYKHRHDQVAAIIHQDLAFKHSLIIQKIPYYKYIPQTILESTDFKLYWDRTIITDKTIHYNRPDLVLHDKNNSIVFLIDIAIPNTHNLSSTYTEKIAKYTDLAIEIKTQWKVRTVKTVPIILSSTGVVPLTLHTSLNILDIHPFTYTLIQKAVILNTCRLVRKFLSLN

SEQ ID NO: 22821 - protein, 1369 aa, Ptilodon capucinus
MITRSKSKKIVQAIMPEENETMQVSTQSSSPTLLSPTTAGTILHPLTPSSPQSSPSSLFPSPNSSLNPLERHAHYSPTSSSSLSSPMSVAAVREANACTLGSTTANMRARRKWTNEMNIFIWRTYLTLTRLETNTRGYLGQLHDSFTAQYPEMNASKQSIGDQRRAIIRNNLLPLSTLNQIRQDALAYIEQNQQAEPTMIQTAGRMRWSNEINETILRIFFEVTELETNLTAYRPKLYSRFIETYPHLSHLSEQRLSDQRRAIINNKMVPQERIQQIKREIEEQLHIALNPNLTNSQNIQTLPEVGTRMFNRSLSQDSTNININLEIDPSSAILTANAPTSDANNLEQYNNQETSTEFDSKIKEIFQITHQKYIHTDPVQRPFIPKQKYSKKFTYIVNHLNTKIIPEYISTINNFNDAHTIIYCAAYTAAIANDVKIREYAQPNNSCAQNTPAWQQRLQRKIQNFRKEIGRLSQFMQGNRSRRLITLVDEIRRKHIIHSQYEEPNRTNEQLLDTLKQKLNAASSRLRRYLNCTLRKQQNMQFISSEKQFYRRLSTGPQQATNHQNAEIRAPTADTLQQFWSNIWSNPVNHNQHAEWIHVSSQKTVNVPNMAFVEVTIDAMKRIIQKTHSWKAPGTDNIHNFWYKKLTSLHVTLHQHINEFIQNPTTMPQYISHGVTYMIPKDLNDLENPAKYRPITCLQTIYKIITSCITDIIYQHVDQNQILAEEQKGCRKNSQGCKEQLIIDSVVMQQSLRNKKDINTMYIDYRKAYDSVPHSWLLYILKHYKIHPTIIAFLEDTMSNWKTKLKVSNRGANIETNSIPIKRGIFQGDALSPLWFCLALNPLSYLLNDNNDGICIETNSDQHAPRTLTHLLYMDDIKLYSNATQSLHRLADTTQTFSNDIQMEFGIDKCKTLTIAGGKIEHNEYILQTGERVEPMDQYSTYKYLGFQQSQQIHQKETKAEIKKKIKHRLNLTLKSQLNSRNIIKAINTFAVPILTYSFGVIKWSQSDLKQLQRTINTTMTAHRKHHPRACIQRLTLSREEGGRGLIDIKNLHNKQISTLRKYFFFKAQHSTLHHSINNADKHFTPLNLQDKNTQPSEKLTTKTEKMIAWAQKSLHGRHYQDLQQPHVDTKATNTWLCRGELFPETEAFITAIQDQVIDTRNYQKFIIRRPNLTTDKCRRCHVSSETIQHITGACKTIAQTDYKHRHDQIAAVIHQNLAFKYSLITQKTAYYKYVPQAVLESSDYKLYWDRTIITDKTVHYNRPDILLHDKNNKIVYLIDIAIPNTHNLTSTHTEKIAKYTDLAIEIKTQWKVRTVKTVPIILSSTGVIPHTLHTSLNILNMHPSAYTLLQKAVILNTCRLVRKFLSMT

SEQ ID NO: 22822 - protein, 894 aa, Ptilodon capucinus
MQGNRSRRLITLVDEIRRKHIIHSQYEEPNRTNEQLLDTLKQKLNAASSRLRRYLNCTLRKQQNMQFISSEKQFYRRLSTGPQQATNHQNAEIRAPTADTLQQFWSNIWSNPVNHNQHAEWIHVSSQNTVNVPNMAFVEVTIDAMKRIIQKTHSWKAPGTDNIHNFWYKKLTSLHVTLHQHINEFIQNPTTMPQYISHGVTYMIPKDLNDLENPAKYRPITCLQTIYKIITSCITDIIYQHVDQNQILAEEQKGCRKNSQGCKEQLIIDSVVMQQSLRNKKDISTMYIDYRKAYDSVPHSWLLYILKHYKIHPTIIAFLEDTMSNWKTKLKVSNRGANIETNSIPIKRGIFQGDALSPLWFCLALNPLSYLLNDNNDGICIETNSDQHAPRTLTHLLYMDDIKLYSNATQSLHRLADTTQTFSNDIQMEFGIDKCKTLTIAGGKIEHNEYILQTGERVEPMDQYSTYKYLGFQQSQQIHQKETKAEIKKKFKHRLNLTLKSQLNSRNIIKAINTFAVPILTYSFGVIKWSQSDLKQLQRTINTTMTAHRKHHPRACIQRLTLSREEGGRGLIDIKNLHNKQISTLRKYFFFKAQHSTLHHSTNNADKHFTPLNLQDKNTQPSEKLTTKTEKMIAWAQKSLHGRHYQDLQQPHVDPKATNTWLCRGELFPETEAFITAIQDQVIDTRNYQKFIIRRPNLTTDKCRRCHVSSETIQHITGACKTIAQTDYKHRHDQVAAVIHQNLAFKYSLITQKTAYYKYVPQAVLESSDYKLYWDRTIITDKTVHYNRPDILLHDKNNKIVYLIDIAIPNTHNLTSTHTEKIAKYTDLAIEIKTQWKVRTVKTVPIILSSTGVIPHTLHTSLNILNMHPSAYTLLQKAVILNTCRLVRKFLSMT

SEQ ID NO: 22823 - protein, 894 aa, Ptilodon capucinus
MQGNRSRRLITLVDEIRRKHIIHSQYEEPNRTNEQLLDTLKQKLNAASSRLRRYLNCTLRKQQNMQFISSEKQFYRRLSTGPQQATNHQNAEIRAPTADTLQQFWSNIWSNPVNHNQHAEWIHVSSQNTVNVPNMAFVEVPIDAMKRIIQKTHSWKAPGTDNIHNFWYKKLTSLHVTLHQHINEFIQNPTTMPQYISHGVTYMIPKDLNDLENPAKYRPITCLQTIYKIITSCITDIIYQHVDQNKILAEEQKGCRKNSQGCKEQLIIDSVVMQQSLRNKKDINTMYIDYRKAYDSVPHSWLLYILKHYKIHPTIIAFLEDTMSNWKTKLKVSNRGANIETNSIPIKRGIFQGDALSPLWFCLALNPLSYLLNDNNDGICIETNSDQHAPRTLTHLLYMDDIKLYSNATQSLHRLADTTQTFSNDIQMEFGIDKCKTLTIAGGKIEHNEYILQTGERVEPMDQYSTYKYLGFQQSQQIHQKETKAEIKKKFKHRLNLTLKSQLNSRNIIKAINTFAVPILTYSFGVIKWSQSDLKQLQRTINTTMTAHRKHHPRACIQRLTLSREEGGRGLIDIKNLHNKQISTLRKYFFFKAQHSTLHHSINNADKHFTPLNLQDKNTQLSEKLTTKTEKMIAWAQKSLHGRHYQDLQQPHVDTKATNTWLCRGELFPETEAFITAIQDQVIDTRNYQKFIIRRPNLTTDKCRRCHVSSETIQHITGACKTIAQTDYKHRHDQVAAVIHQNLAFKYSLITQKTAYYKYVPQAVLESSDYKLYWDRTIITDKTVHYNRPDILLHDKNNKIVYLIDIAIPNTHNLTSTHTEKIAKYTDLAIEIKTQWKVRTVKTVPIILSSTGVIPHTLHTSLNIINMHPSAYTLLQKAVILNTCRLVRKFLSMT

SEQ ID NO: 22824 - protein, 1372 aa, Phalera bucephala
MEMSQRRYNLRPLPGGRRGASGADAGCYSMRTIGGGELSRRVLTDKNATAEITTSHTIPKSSTTSSPLSSLFPSPNSSPNSLSHHLQSSQSSSTSSVVSVDVVQEAHASNPGPTTGENRARKKWTNDMNIFIWRTYLIITNLEQNTRAYLDQLYQEFSEKYPEMDTSKQRLGDQRRAIVNKKLLPLSTLNKVKEEVTIYLQQNQQSYSTVTQTTCRMRWSNEVNEMILRIYFEITNLETDLTAYRKKLYDRFIEKYPHLSHLSEQRVSDQRRAIINNKMISHERIQQIKLEIEMQLHSTQAIILTNSQTDSRNTLSQIYYTNAHTTDTEIQLTHVQTNTSRNLISEEQQNNHQQLLCSSIIPSEFDSKINETFQTAYNKYNNTDPTQRPYIPRQKISKNFTHIVNHINSKTIPQYVSYDHSFNEIHTIIYCAAYTAAIANGAKIKENLQFNNTNKESIPHWQRRLQQKIQNLRKSIGRVTQFIQGNRSRRLITLVVEIKGKYRIHSQHEGPNTTDEQLLDTLKQKLNATASRLRRYLNCTLRKQQNTQFMNSEKQFYRRLGMGLQQATINQNNRAPTAATLEQFWSSIWSNTTHHNQHAEWIQSLSQHTTNITEMQFSEITVDIFKRVISRTQNWKAPGTDQIHNFWYKKFTSIHDSLLRHINEFIHSPTTMPPFISQGVTHMIPKDLNDLANPSKYRPITCLQTVYKIITSCLSELIYDHVEKHKILAEEQKGCRKHSQGCKEQLLIDSVAMKQAVRNKRDFSTMYIDYRKAYDSVPHSWLIYILAHYRINPTIVTFLKNTMKNWKTELKVTTKSSYIHTKHIPIRRGIFQGDALSPLWFCLALNPLSYLLNTNGNGLEIDTDDDQLTHTTLTHLMYMDDIKLYSNTTHSLHDLADITQTFSNDIQMEFGIDKCKTLTITRIEQNEYILNTGEKVEPMDQNSTYKYLGFQQSRHIHQKETKTEVTKKFKHRLNTILKSQLNSRNIVKAINTYAIPILTYSFGVINWSQTELKNLQRTINTTMTSHRKHHPRSCIQRLTLPREDGGRGIIDILNLHNNQISTLRQYFYERAQNSSLHLTIKHADNHITPLNLHDGNTQLNQKVSTRADKILAWTQKSLHGRHYQDLHRPHIDTKASNNWLTRGDLFPETEAFIIAIQDQIIDTRNFEKYIIHRPNLITDKCRRCHTGSETIQHITGSCKAIAQTDYKHRHDQVAAIIHQELAVKHLLIPNKTPYYKYTPQVILESTDFKLYWDRTIITDKTIHFNRPDILLHDKIKKIVYLIDIAIPNTHNLTSTHTEKIAKYTDLAIEIKTQWRVNTVKTIPIILSSTGVVPHTLHTSLNMLNIHSSIYALLQKAVILNTCRLVRKFLSME

SEQ ID NO: 22825 - protein, 1374 aa, Phalera bucephala
MEMSQRRYNLRPLPGGRRGASGADAGCYSMRTIGGGELSRRVLTDKNATAEITTSHTIPKSSTTSSPLSSLFPSPNSSPNSLSHHLQSSQSSSTSSVVSVDVVQEAHASNPGPTTGENRARKNWTNDMNIFIWRTYLIITNLEQNTRAYLDQLYQEFSEKYPEMDASKQRLGDQRRAIVNKKLLPLSTLNKVKEEVTIYLQQNQQSYSTVTQTTCRMRWSNEVNEMILRIYFEITNLETDLTAYRKKLYDRFIEKYPHLSHLSEQRVSDQRRAIVNNKMISHERIQQIKLEIEMQLHSTQAIILTNSQTDSHNTLSQIYYTNAHTTDTEIQLTDVQTNTTRNLISEEQQNNHQQLLCSSIIPSEFDSKINETFQTAYNKYNNTDPTQRPYIPRQKISKKFTHIVNHINSKTIPQYVSYDHSFNEIHTIIYCAAYTAAMANGAKIKENLQFNNTNKESIPHWQRRLQQKIQNLRKSIGRVTQFIQGNRSRRLITLVEEIKGKYRIHSQHEGPNTTDEQLLDTLKQKLNATASRLRRYLNCTLRKQQNTKFMNSEKQFYRRLGMGLQQATINQNNRAPTAATLEQFWSSIWSNTTHHNQHAEWIQSLSQHTTNITEMQFSEITVDIFKQVISRTQNWKAPGTDQIHNYWYKKFTSIHDILIRHINEFIHSPTTMPPFISQGVTHMIPKDLNDLANPSKYRPITCLQTVYKIITSCLSELIYDHVEKHKILAEEQKGCRKHSQGCKEQLLIDSVAMKQAVRNKRDFSTMYIDYRKAYDSVPHSWLIYILAHYKINPTIVTFLKNTMKNWKTELKVTTKSSYIHTKHIPIRRGIFQGDALSPLWFCLALNPLSYLLNTNGNGLEIDTDDDQLTHTTLTHLMYMDDIKLYSNTTHSLHDLADITQTFSNDIQMEFGIDKCKTLTITAGRIEKNEYILNTGEKVEPMDQNSTYKYLGFQQSRHIHQKETKTEVTKKFKHRLNTILKSQLNSRNIVKAINTYAIPILTYSFGVINWSQTELKNLQRTINTTMTSHRKHHPRSCIQRLTLPREDGGRGIIDILNLHNNQISTLRQYFYERAQNSSLHLTIKHADNHITPLNLHDGNTQLNQKVSTRADKILAWTQKSLHGRHYQDLHRPHIDTKASNNWLTRGDLFPETEAFIIAIQDQIIDTRNFEKYIIHRPNLITDKCRRCHTGSETIQHITGSCKAIAQTDYKHRHDQVAAIIHQELAVKHLLIPNKTPYYKYTPQIILESTDFKLYWDRTIITDKTIHFNRPDILLHDKIKKIVYLIDIAIPNTHNLTSTHTEKIAKYTDLAIEIKTQWRVNTVKTIPIILSSTGVVPHTLHTSLNMLNIHSSIYALLQKAVILNTCRLVRKFLSME

SEQ ID NO: 22826 - protein, 1374 aa, Phalera bucephala
MEMSQRRYNLRPLPGGRRGASGADAGCYSMRTIGGGELSRRVLTDKNATAEITTSHTIPKSSTTSSPLSSLFPSPNSSPNSLSHHLQSSQSSSTSSVVSVDVVQEAHASNPGPTTGENRARKKWTNDMNIFIWRTYLIITNLEQNTRAYLDQLYQEFSEKYPEMDTSKQRLGDQRRAIVNKKLLPLSTLNKVKEEVTIYLQQNQQSYSTVTQTTCRMRWSNEVNEMILRIYFEITNLETDLTAYRKKLYDRFIEKYPHLSHLSEQRVSDQRRAIINNKMISHERIQQIKLEIEMQLHSTQAIILTNSQTDSRNTLSQIYYTNAHTTDTEIQLTHVQTNTSRNLISEEQQNNHQQLLCSSIIPSEFDSKINETFQTAYNKYNNTDPTQRPYIPRQKISKNFTHIVNHINSKTIPQYVSYDHSFNEIHTIIYCAAYTAAIANGAKIKENLQFNNTNKESIPNWQRRLQQKIQNLRKSIGRVTQFIQGNRSRRLITLVEEIKGKYRIHSQHEGPNTTDEQLLDTLKQKLNATASRLRRYLNCTLRKQQNTQFMNSEKQFYRRLGMGLQQATINQNNRAPTAATLEQFWSSIWSNTTHHNQHAEWIQSLSQHTTNITEMQFSEITVDIFKRVISRTQNWKAPGTDQIHNFWYKKFTSIHDILLRHINEFIHSPTTMPPFISQGVTHMIPKDLNDLANPSKYRPITCLQTVYKIITSCLSELIYDHVEKHKILAEEQKGCRKHSQGCKEQLLIDLVAMKQAVRNKRDFSTMYIDYRKAYDSVPHSWLIYILAHYKINPTIVTFLKNTMKNWKTELKVTTKSSYIHTKHIPIRRGIFQGDALSPLWFCLALNPLSYLLNTNGNGLEIDTDDDQLTHTTLTHLMYMDDIKLYSNTTHSLHDLADISQTFSNDIQMEFGIDKCKTLTITAGRIEQNEYILNTGEKVEPMYQNSTYKYLGFQQSRHIHQKETKTEVTKKFKHRLNTILKSQLNSRNIVKAINTYAIPILTYSFGVINWSQTELKNLQRTINTAMTSHRKHHPRSCIQRLTLPREDGGRGIIDILNLHNNQISTLRQYFYERAQNSSLHLTIKHADNHITPLNLHDGNTQLNQKVSTRADKILAWTQKSLHGRHYQDLHRPHIDTKASNNWLTRGDLFPETEAFIIAIQDQIIDTRNFEKYIIHRPNLITDKCRRCHTGSETIQHITGSCKAIAQTDYKHRHDQVAAIIHQELAVKHLLIPNKTPYYKYTPQVILESTDFKLYWDRTIITDKTIHFNRPDILLHDKIKKIVYLIDIAIPNTHNLTSTHTEKIAKYTDLAIEIKTQWRVNTVKTIPIILSSTGVVPHTLHTSLNMLNIHSSIYALLQKAVILNTCRLVRKFLSME

SEQ ID NO: 22827 - protein, 937 aa, Phalera bucephala
MANGAKIKENLQFNNTNKESIPHWQRRLQQKIQNLRKSIGRVTQFIQGNRSRRLITLVEEIKGKYRIHSQHEGPNTTDEQLIDTLKQKLNATASRLRRYLNCTLRKQQNTQFMNSEKQFYRRLGMGLQQATINQNNRAPTAATHEQFWCSIWSNTTHHNQHAEWLQSLSQYTTNITEMQFSEITVDIFKRVISRTQNWKAPGTDQIHNFWYKKFTSIHDILLRHINEFIHSPTTMPPFISQGVTHMIPKDLNDLANPSKYRPITCLQTVYKIITSCLSELIYDHVEKHKILAEEQKGYRKYSQGCKEQLLIDSVAMKQAVRNKRDFSTMYIDYRKAYDSVPHSWLIYILAHYKINPTIVTFLKNTMKNWKTELKVTTKSSYIHTKHIPIRRGIFQGNALSPLWFCLALNPLSYLLNTNGNGLEIDTDDDQLTHTTLTHLMYMDDIKLYSNTTHSLHDLADITQTFSYDIQMEFGIDKCKTLTITAGRIEQNEYILNTGEKVEPMDQNSTYKYLGFQQSRHIHQKETKTEVTKKFKHRLNTILKSQLNSRNIVKAINTYAIPILTYSFGVINWSQTELKNLQRTINTTMTSHQKHHSISCIQRLTLPREDGGRGIIDILNLHNNQISTLRQYFYERAQNSSLHLTIKHADNHITPLNLHDGNTQLNQKVSTRADKILAWKQKSLHKRHYQDLHRPHIYTKASNNWLTRGDLFPETEAFIIAIQDQIIDTRNFEKYIIHRPNLITDKCRRCHTGSETIQHITGSCKAIAQTDYKHRHDQVAAIIHQELAVKHLLIPNKTPYYKYTPQIILESTDSKLYWDRTIITDKTIHFNRPDILLHDKIKKIVYLIDISIPNTHNVTSTHTEKIAKYTDLAIEIKTQWRVNTVKTIPFILSSTGVVPHTLHTSLNMLNIHSSICALLQKAVILNTCRLLRKFLSME

SEQ ID NO: 22828 - protein, 1374 aa, Phalera bucephala
MEMSQRRYNLRPLPGGRRGASGADAGCYSMRTIGGGELSRRVLTDKNATAEITTSHTIPKSSTTSSPLSSLFPSPNSSPNSLSHHLQSSQSSSTSSLVSVDVVQEAHASNPGPTTGENRTRKKWTNDMNIFIWRTYLIITNLEQNTRAYLDQLYQEFSEKYPEMDASKQRLGDQRRAIVNKKLLPLSTLNKVKEEVTIYLQQNQQSYSTVTQTTCRMRWSNEVNEMILRIYFEITNLETDLTAYRKKLYDRFIEKYPHLSHLSEQRVSDQRRAIINNKMISHERIQQIKLEIEMQLHSTQAIILTNSQTDSRNTLSQIYYTNAHTTDTEIQLTHVQTNTSRNLISEEQQNNHQQLLCSSIIPSEFDSKIDETFQTAYNKYNNTDPTQRPYIPRQKISKNFTHIVNHINSKTIPQYVSYDHSFNEIHTIIYCAAYTAAMANGAKIKENLQFNNTNKESIPHWQRRLQQKIQNLRKSIGRVTQFIQGNRSRRLITLVEEIKGKYRIHSQHEGPNTTDEQLLDTLKQKLNATASRLRRYLNCTLRKQQNTQFMNSEKQFYRRLGMGLQQATINQNNRAPTAATLEQFWSSIWSNTTHHNQHAEWIQSLSQHTTNITEMQFSEITVDIFKRVISRTQNWKAPGTDQIHNFWYKKFTSIHDILLRHINEFIHSPTTMPPFISQGVTHMIPKDLNDLANPSKYRPITCLQTVYKIITSCLSELIYDHVEKHKILAEEQKGCRKHSQGCKEQLLIDSVAMKQAVRNKRDFSTMYIDYRKAYDSVPHSWLIYILAHYKINPTIVTFLKNTMKNWKTELKVTTKSSYIHTKHIPIRRGIFQGDALSPLWFCLALNPLSYLLNTNGNGLEIDTDDDQLTHTTLTHLMYMDDIKLYSNTTHSLHDLADITQTFSNDIQMEFGIDKCKTLTITAGRIEQNEYILNTGEKVEPMDQNSTYKYLGFQQSRHIHQKETKTEVTKKFKHRLNTILKSQLNSRNIVKAINTYAIPILTYSFGVINWSQTELKNLQRTINTTMTSHRKHHPRSCIQRLTLPREDGGRGIIDILNLHNNQISTLRQYFYERAQNSSLHLTIKHADNHITPLNLHDGNTQLNQKVSTRADKILAWTQKSLHGRHYQDLHRPHIDTKASNNWLTRGDLFPETEAFIIAIQDQIIDTRNFEKHIIHRPNLITDKCRRCHTGSETIQHITGSCKAIAQTDYKHRHDQVAAIIHQELAVKHLLIPNKTPYYKYTPQIILESTDFKLYWDRTIITDKTIHFNRPDILLHDKIKKIVYLIDIAIPNTHNLTSTHTEKIAKYTDLAIEIKTQWRVNTVKTIPIILSSTGVVPHTLHTSLNMLNIHSSIYALLQKAVILNTCRLVRKFLSME

SEQ ID NO: 22829 - protein, 1374 aa, Phalera bucephala
MEMSQRRYNLRPLPGGRRGASGADAGCYSMRTIGGGELSRRVLTDKNATAEITTSHTIPKSSTTSSPLSSLFPSPNSSPNSLSHHLQSSQSSSTSSVVSVDVVQEAHASNPGPTTGENRGRKKWTNDMNIFIWRTYLIITNLEQNTRAYLDQLYQEFSEKYPEMDASKQRLGDQRRAIVNKKLLPLSTLNKVKEEVTIYLQQNQQSYSTVTQTTCRMRWSNEVNEMILRIYFEITNLETDLTAYRKKLYDRFIEKYPHLSHLSEQRVSDQRRAIINNKMISHERIQQIKLEIEMQLHSTQAIILTNSQTDSHNTLSQIYYTNAHTTDTEIQLTHVQTNTTRNLISEEQQNNYQQLLCSSIIPSEFDSKINEIFQTAYNKYNNTAPTQRPYIPRQKISKKFTHIVNHINSKTIPQYVSYDHSFNEIHTIIYCAAYTAAMANGAKIKENLQFNNTNTESIPHWQRRLQQKIQNLRKSIGRVTQFIQGNRSRRLITLVEEIKGKYRIHSQHEGPNTTDEQLLDTLKQKLNATASRLRRYLNCRLRKQQNTQFMNSEKQFYRRLGMGLQQATINQNNRAPTAATLEQFWSSIWSNTTHHNQHAEWIQSLSQHTTNITEMQFSEITVDIFKRVISRTQNWKAPGTDQIHNFWYKKFTSIHDILLRHINEFIHSPTTMPPFISQGVTHMIPKDLNDLANPSKYRPITCLQTVYKIITSCLRELIYDHVEKHKILAEEQKGCRKHSQGCKEQLLIDSVAMKQAVRNKRDFSTMYIDYRKAYDSVPHSWLIYILAHYKINPTIVTFLKNTMKNWKTELKVTTKSSYIHTKHIPIRRGIFQGDALSPLWFCLALNPLSYLLNTNGNGLEIDTDDDQLTHTTLTHLMYMDDIKLYSNTTHSLHDLADITQTSSNDIQMEFGIDKCKTLTITAGRIEQNEYKLNTGEKVEPMDQNSTYKYLGFQQSRHIHQKETKTEVTKKFKHRLNTILKSQLNSRNIVKAINTYAIPILTYSFGVINWSQTELKNLQRTINTTMTSHRKHHPRSCIQRLTLPREDGGRGIIDILNLHNKQISTLRQYFYERAQNSSLHLTIKHADNHITPLNLHDGNTQLNQKVSTRADKILAWTQKSLHGRHYQDLHRPHIDTKASNNWLTRGDLFPETEAFIIAIQDQIIDTRNFEKYIIHRPNLITDKCRRCHTGSETIQHITGSCKAIAQTDYKHRHDQVAAIIHQELAIKHLLIPNKTPYYKYTPQIILESTDFKLYWDRTIITDKTIHFNRPDILLHDKIKKIVYLIDIAIPNTHNLTSTHTEKIAKYTDLAIEIKTQWRVNTVKTIPIILSSTGVVPHTLHTSLNMLNIHSSIYALLQKPVILNTCRLVRKFLSME

SEQ ID NO: 22830 - protein, 1374 aa, Phalera bucephala
MEMSQRRYNLRPLPGGRRGASGADAGCYSMRTIGGGELSRRVLTDKNATAEITTSHTIPKSSTTSSPLSSLFPSPNSSPNSLSHHLQSSQSSSTSSLVSVDVVQEAHASNPGPTTGENRARKKWTNDMNIFIWRTYLIITNLEQNTRAYLDQLYQEFSEKYPEMDASKQRLGDQRRAIVNKKLLPLSTLNKVKEEVTIYLQQNQQSYSTVTQTTCRMRWSNEVNEMILRIYFEITNLETDLTAYRKKLYDRFIEKYPHLSHLSEQRVSDQRRAIINNKMISHERIQQIKLEIEMQLHSTQAIILTNSQTDSRNTLSQIYYTNAHTTDTEIQLTHVQTNTSRNLISEEQQNNHQQLLCSSIIPSEFDSKIDETFQTAYNKYNNTDPTQRPYIPRQKISKNFTHIVNHINSKTIPQYVSYDHSFNEIHTIIYCAAYTAAMANGAKIKENLQFNNTNKESIPHWQRRLQQKIQNLRKSVGRVTQFIQGNRSRRLITLVEEIKGKYRIHSQHEGPNTTDEQLLDTLKQKLNATASRLRRYLNCTLRKQQNTQFMNSEKQFYRRLGMGLQQATINQNNRAPTAATLEQFWSSIWSNTTHHNQHAEWIQSLSQHTTNITEMQFSEITVDIFKRVISRTQNWKAPGTDQIHNFWYKKFTSIHDILLRHINEFIHSPTTMPPFISQGVTHMIPKDLNDLANPSKYRPITCLQTVYKIITSCLSELIYDHVEKHKILAEEQKGCRKHSQGCKEQLLIDSVAMKQAVRNKRDFSTMYIDYRKAYDSVPHSWLIYILAHYKINPTIVTFLKNTMKNWKTELKVTTKSSYIHTKHIPIRRGIFQGDALSPLWFCLALNPLSYLLNTNGNGLEIDTDDDQLTHTTLTHLMYMDDIKLYSNTTHSLHDLADITQTFSNDIQMEFGIDKCKTLTITAGRIEQNEYILNTGEKVEPMDQNSTYKYLGFQQSRHIHQKETKTEVTKKFKHRLNTILKSQLNSRNIVKAINTYAIPILTYSFGVINWSQTELKNLQRTINTTMTSHRKHHPRSCIQRLTLPREDGGRGIIDILNLHNNQISTLRQYFYERAQNSSLHLTIKHADNHITPLNLHDGNTQLNQKVSTRADKILAWTQKSLHGRHYQDLHRPHIDTKASNNWLTRGDLFPETEAFIIAIQDQIIDTRNFEKHIIHRPNLITDKCRRCHTGSETIQHITGSCKAIAQTDYKHRHDQVAAIIHQELAVKHLLIPNKTPYYKYTPQIILESTDFKLYWDRTIITDKTIHFNRPDILLHDKIKKIVYLIDIAIPNTHNLTSTHTEKIAKYTDLAIEIKTQWRVNTVKTIPIILSSTGVVPHTLHTSLNMLNIHSSIYALLQKAVILNTCRLVRKFLSME

SEQ ID NO: 22831 - protein, 1374 aa, Phalera bucephala
MEMSQRRYNLRPLPGGRRGASGADAGCYSMRTIGGGELSRRVLTDKNATAEITTSHTIPKSSTTSSPLSSLFPSPNSSPNSLSHHLQSSQSSSTSSVVSVDVVQEAHASNPGPTTGENRARKKWTNDMNIFIWRTYLIITNLEQNTRAYLDQLYQEFSEKYPEMDASKQRLGDQRRAIVNKKLLPLNTLNKVKEEVTIYLQQNQQSYSTVTQTTCRMRWSNEVNEMILRIYFEITNLETNLTAYRKKLYDRFIEKYPHLSHLSEQRVFDQRRAIIHNKMISHERIQQIKLEIEMQLHSTQAIILTNSQIDLHNTLSQIYCTNAHTTDTEIQLTDVQTNTTRNLISEEQQNNHQQLLCSSIIPSEFDSKINETFQTAYNKYNNTDPTQRPYIPRQKISKKFTHIVNHINSKTIPQYVSYDHSFNEIHTIIYCAAYTAAIANGAKIKENLQFNNTNKESIPHWQRRLQQKIQNLRKSIGRVTQFIQGNRSRRLITLVEEIKGKYRIHSQHEGPNTTDEQLLDTLKQKLNATASRLRRYLNCTLRKQQNTQFMNSEKQFYRRLGMGLQQATINQNNRAPTAATLEQFWSSIWSNTTHHNQHAEWLQSLSQHTTNITEMQFSEITVDIFKRVISRTQNWKAPGTDQIHNFWYKKFTSIHDILLRHINEFIHSPTTMPPFISQGVTHMIPKDLNDLTNPSKYRPITCLQTVYKIITSCLSELIYDHVEKHKILAEEQKGCRKHSQGCKEQLLIDSVAMKQAVRNKRDFSTMYIDYRKAYDSVPHSWLIYILAHYKINPTIVTFLKNTMKNWKTELKVTTKSSYIHTKHIPIRRGIFQGDALSPLWFCLALNPLSYLLNTNGNGLEIDTDDDQLTHTTLTHLMYMDDIKLYSNTTHSLHDLADITQTFSNDIQMEFGIDKCKTLTITAGRIEQNEYILNTGEKVEPMDQNSTYKYLGFQQSRHIHQKETKTEVTKKFKHRLNTILKSQLNSRNIVKAINTYAIPILTYSFGVINWSQTELKNLQRTINTTMTSHRKHHPRSCIQRLTLPREDGGRGIIDILNLHNNQISTLRQYFYERAQNSSLHLTIKHADNHITPLNLHDGNTQLNQKVSTRADKILAWTQKSLHGRHYQDLHRPHIDTKASNNWLTRGDLFPETEAFIIAIQDQIIDTRNFEKYIIHRPNLITDKCRRCHTGSETIQHITGSCKAIAQTDYKHRHDQVAAIIHQELAVKHLLIPNKTPYYKYTPQIILESTDFKLYWDRTIITDKTIHFNRPDILLHDKIKKIVYLIDIAIPNTHNLTSTHTEKIAKYTDLAIEIKTQWRVNTVKTIPIILSSTGVVPHTLHTSLNMLNIHSSIYALLQKAVILNTCRLVRKFLSME

SEQ ID NO: 22832 - protein, 1374 aa, Phalera bucephala
MEMSQRRYNLRPLPGGRRGASGADAGCYSMRTIGGGELSRRVLTDKNATAEITTSHTIPKSSTTSSPLSSLFPSPNSSPNSLSHHLQSSQSSSTSSLVSVDVVQEAHASNPGPTTGENRARKKWTNDMNIFIWRTYLIITNLEQNTRAYLDQLYQEFSEKYPEMDASKQRLGDQRRAIVNKKLLPLSTLNKVKEEVTIYLQQNQQSYSTVTQTTCRMRWSNEVNEMILRIYFEITNLETDLTAYRKKLYDRFIEKYPHLSHLSEQRVSDQRRAIINNKMISHERIQQIKLEIEMQLHSTQAIILTNSQTDSRNTLSQIYYTNAHTTDTEIQLTHVQTNTSRNLISEEQQNNHQQLLCSSIIPSEFDSKIDETFQTAYNKYNNTDPTQRPYIPRQKISKNFTHIVNHINSKTIPQYVSYDHSFNEIHTIIYCAAYTAAMANGAKIKENLQFNNTNKESIPHWQRRLQQKIQNLRKSIGRVTQFIQGNRSRRLITLVEEIKGKYRIHSQHEGPNTTDEQLLDTLKQKLNATASRLRRYLNCTLRKQQNTQFMNSEKQFYRRLGMGLQQATINQNNRAPTAATLEQFWSSIWSNTTHHNQHAEWIQSLSQHTTNITEMQFSEITVDIFKRVISRTQNWKAPGTDQIHNFWYKKFTSIHDILLRHINEFIHSPTTMPPFISQGVTHMIPKDLNDLANPSKYRPITCLQTVYKIITSCLSELIYDHVEKHKILAEEQKGCRKHSQGCKEQLLIDSVAMKQAVRNKRDFSTMYIDYRKAYDSVPHSWLIYILAHYKINPTIVTFLKNTMKNWKTELKVTTKSSYIHTKHIPIRRGIFQGDALSPLWFCLALNPLSYLLNTNGNGLEIDTDDDQLTHTTLTHLMYMDDIKLYSNTTHSLHDLADITQTFSNDIQMEFGIDKCKTLTITAGRIEQNEYILNTGEKVEPMDQNSTYKYLGFQQSRHIHQKETKTEVTKKFKHRLNTILKSQLNSRNIVKAINTYAIPILTYSFGVINWSQTELKNLQRTINTTMTSHRKHHPRSCIQRLTLPREDGGRGIIDILNLHNNQISTLRQYFYERAQNSSLHLTIKHADNHITPLNLHDGNTQLNQKVSTRADKILAWTQKSLHGRHYQDLHRPHIDTKASNNWLTRGDLFPETEAFIIAIQDQIIDTRNFEKHIIHRPNLITDKCRRCHTGSETIQHITGSCKAIAQTDYKHRHDQVAAIIHQELAVKHLLIPNKTPYYKYTPQIILESTDFKLYWDRTIITDKTIHFNRPDILLHDKIKKIVYLIDIAIPNTHNLTSTHTEKIAKYTDLAIEIKTQWRVNTVKTIPIILSSTGVVPHTLHTSLNMLNIHSSIYALLQKAVILNTCRLVRKFLSME

SEQ ID NO: 22833 - protein, 825 aa, Phalera bucephala
MNSEKQFYRRLGMGLQQATINQNNRAPTAATLKQFWSSIWSNTTHHNQHAEWIQSLSQHTTNITEMQFSEITVDIFERVISRTQNWKAPGTDQIHNFWYKKFTSIHDILLRHINEFIHSPTTMPPFISQGVTHMIPKDLNDLANPSKYRPITCLQTVYKIITSCLNELIYDHVEKHKILAEEQKGCRKHSQGCKEQLLIDSVAMKQAVRNKRDFSTMYIDYRKAYDSVPHSWLIYILAHYKINPTIVTFLKNTMKNWKTELKVTTKSSYIHTKHIPIRRGIFQGDALSPLWFCLALNPLSYLLNTNGNGLEIDTDDDQLTHTTLTHLMYMDDIKLYSNTTHSLHDLADITQTFSNDIQMEFGMDKCKTLTITAGRIEQNEYILNTGEKVEPMDQNSTYKYLGFQQSRHIHQKETKTEVTKKFKHRLNTILKSQLNSRNIVKAINTYAIPILTYSVGVINWSQTELKNLQRTINTTMTSHRKHHPRSCIQRLTLPREDGGRGIIDILNLHNNQISTLRQYFYERAQNSSLHLTIKHADNHITPLNLHDGNTQLNQKVSTRADKILAWTQKSLHGRHYQDLHRPHIDTKASNNWLTRGDLFPETEAFIIAIQDQIIDTRNFEKYIIHRPNLITDKCRRCHTGSETIQHITGSCKAIAQTDYKHRHDQVAAIIHQELAVKHLLIPNKTPYYKYTPQIILESTDFKLYWDRTIITDKTIHFNRPDILLHDKIKKIVYLIDIAIPNTHNLTSTHTEKIAKYTDLAIEIKTQWRVNTVKTIPIFLSSTGVVPHTLHTSLNMLNIHSSIYALLQKAVILNTCRLVRKFLSME

SEQ ID NO: 22834 - protein, 1374 aa, Phalera bucephala
MEMSQRRYNLRPLPGGRRGASGADAGCYSMRTIGGGELSRRVLTDKNATAEITTSHTIPKSSTTSSPLSSLFPSPNSSPNSLSHHLQSSQSSSTSSVVSVDVVQEAHASNPGPTTGENRARKKWTNDMNIFIWRTYLIITNLEQNTRAYLDQLYQEFSGKYPEMDASKQRLGDQRRAIVNKKLLPLSTLNKVKEEVTIYLQQNQQSYSTVTQTTCRMRWSNEVNEMILRIYFEITNLETDLTAYRKKLYDRFIEKYPHLSHLSEQRVSDQRRAIINNKMISHERIQQIKLEIEMQLHSTQAIILTNSQTDSHNTLSQIYYTNAHTTDTEIQLTHVQTNTTRNLISEEQQNNHQQLLCSSIIPSEFDSKINETFQTAYNKYNNTDPTQRPYIPRQKISKKFTHIVNHINSKTIPQYVSYDHSFNEIHTIIYCAAYTAAMANGAKIKENLQFNNTNKESIPHWQRRLQQKIQNLRKSIGRVTQFIQGNRSRRLITLVEEIKGKYRIHSQHEGPNTTDEQLLDTLKQKLNATASRLRRYLNCTLRKQQNTQFMNSEKQFYRRLGMGLQQATINQNNRAPTAATLEQFWSSIWSNTTHHNQHAEWIQSLSQHTTNITEMQFSEITVDIFERVISRTQNWKAPGTDQIHNFWYKKFTSIHDILLRHINEFIHSPTTMPPFISQGVTHMIPKDLNDLANPSKYRPITCLQTVYKIITSCLNELIYDHVEKHKILAEEQKGCRKHSQGCKEQLLIDSVAMKQAVRNKRDFSTMYIDYRKAYDSVPHSWLIYILAHYKINPTIVTFLKNTMKNWKIELKVTTKSSYIHTKHIPIRRGIFQGDALSPLWFCLALNPLSYLLNTNGNGLEIDTVDDQLTHTTLTHLMYMDDIKLYSNTTHSLHDLADITQTFSNDIQMEFGIDKCKTLTITAGRIEQNEYILNTGEKVEPMDQNSTYKYLGFQQSRHIHQKETKTEVTKIFKHRLNTILKSQLNSRNIVKAINTYAIPILTYSFGVINWSQTELKNLQRTINTTMTSHRKHHPRSCIQRLTLPREDGGRGIIDILNLHNNQISTLRQYFYERAQNSSLHLTIKHADNHITPLNLHDGNTQLNQKVSTRADKILAWTQKSLHGRHYQDLHRPHIDTKASNNWLTRGDLFPETEAFIIAIQDQIIDTRNFEKYIIHRPNLITDKCRRCHTGSETIQHITGSCKAIAQTDYKHRHDQVAAIIHQELAVKHLLIPNKTPYYKYTPQIILESTDFKLYWDRTIITDKTIHFNRPDILLHDKIKKIVYLIDIAIPNTHNLTSTHTEKIAKYTDLAIEIKTQWRVNTVKTIPIILSSTGVVPHTLHTSLNMLNIHSSIYALLQKAVILNTCRLVRKFLSME

SEQ ID NO: 22835 - protein, 1385 aa, Pheosia tremula
MVNAGLCRGRLFMSLATRGNTMITRSKSKKNNRATVPTTNETVQVSLPSSPQSPSSLSIANIITHPTSSSFQQTPSSSLFVSPNSSPYSFEKQFHSEQSSSSSPMSVDVVQEAHANKLGPTTGNTRARRKWTNDMNMFIWRNYLIITRLETNTRGYLGSLYDNFTSKYPEMNASKQSIGDQRRAIVRNKLLPTETLHQIKQDVSAYLEQNQQSEPTVTQTTSRMRWSNEINEAILRIYFEITELETNLTAYRPKLHHKFIERYPNLSHISEQRLSDQKRAIINNRMISQERIQELKLEIQSQLLSTQACTQLNFENNNHTVPQIDTQTNNRSSSQDNINLNVAIDSSCSPTTANTIPYHERIHHQQTHCMPAEFVNEINDTFQTIYNKYIHIDPTQRPYIPKQKPSKKFAYIVNHINTKILPEYISTVNNFTDLHTIIYSAACTAAIANGTKIRENTIPHNTQHENIPPWQQRLQRKIQNFRKDIGRMIQFIQGNRSRRLILLVDEIKNKYRIHSQHEEPNRTDEQLLDTIKQKLNATNSRLKRYLNCTLRKQQNAQFISSEKQFYRKLSTGQQQPENNQNRHIRAPSPDTLQQFWTNIWANPVQHNQHAEWTQLSSQHTTDIAQMQFTEVPTDTLKRVLLKTHNWKAPGTDNIHNFWYKKFTTLHNILHQHINKFIQNPTTMPQYISQGITYMISKDVNDPENPSKYRPITCLQTIYKIITSCITELIYQHTENNKILAEEQKGCRKNSQGCKEQLIIDSVAMQQSFRNKTDFSTMYIDYRKAYDSVPHSWLLHILNHYKIHPVIIAFLENTMSNWTTKLKIGNGTSSIQTDNIPIRRGIFQGDALSPLWFCLALNPLSYLLKEQNEGLHIETHNGHHTPSTLTHLMYMDDIKLYSNTTRSLHHLADITQTFSNDIQMEFGIDKCKTLTIVGGKIEQNEYVLNTGQKVEPMDQFSTYKYLGFQQSRQIHQKQTKTELIKKFKHRLNLTLKSQLNSRNIVKAINTFAVPILTYSFGVIKWSQTELKQLQRIINTTMTTQRKHHPRSCIQRLTLPREEGGRGLTDITNLHNRQISTLRQYFIKKAQNSTLHHTINHADKHLTPLNLHDTNTQPCEKITSKADKKLVWAQKSLHGRHYQDLQQPHVDTKATNTWLCRGELFPETEAFITAIQDQVIDTRNYQKFIIRRPNLRTDKCRRCHISSETIQHITGACKTISQTDYKHRHDQVAAIIHQNLAFKHSLITQKTAYYKYIPQVVLESSDYKLYWDRTIITDKTIHYNRPDILLYDKNNKIVYLIDIAVPNTHNLTATHTEKIAKYTDLAIEIKTQWKVNTVKTVPIILSSTGVIPHTLHASLSTLNLHPSTYTLLQKAVILNTCRLVRKFLTMT

SEQ ID NO: 22836 - protein, 1100 aa, Pheosia tremula
MISQERIQELKLEIQSQLLSTQACTQLNFENNNHTVPQIDTQTNNRSSSQDNINLNVAIDSSCSPTTANTIPYHERIHHQQTHCMPAEFVNEINDTFQTIYNKYIHIDPTQRPYIPKQKPSKKFAYIVNHINTKILPEYISTVNNFTDLHTIIYSAACTAAIANGTKIRENTIPHNTQHENIPPWQQRLQRKIQNLRKDIGRMIQFIQGNRSRRLILLVDEIKNKYRIHSQHEEPNRTDEQLLDTIKQKLNATNSRLKRYLNCTLRKQQNAQFISSEKQFYRKLSTGQQQPENNQNRHIRAPSPDTLQQFWTNIWANPVQHNQHAEWTQLSSQHTTDIAQMQFTEVPTDTLKRVLLKTHNWKAPGTDNIHNFWYKKFTTLHNILHQHINKFIQNPTTMPQYISQGITYMIPKDVNDPENPSKYRPITCLQTIYKIITSCITELIYQHTENNKILAEEQKGCRKNSQGCKEQLIIDSVAMQQSFRNKTDFSTMYIDYRKAYDSVPHSWLLHILNHYKIHPVIIAFLENTMSNWTTKLKIGNGTSSIQTDNIPIRRGIFQGDALSPLWFCLALNPLSYLLKEQNEGLHIETHNGHHTPSTLTHLMYMDDIKLYSNTTRSLHHLADITQTFSNDIQMEFGIDKCKTLTIVGGKIEQNEYVLNTGQKVEPMDQFSTYKYLGFQQSRQIHQKQTKTELIKKFKHRLNLTLKSQLNSRNIVKAINTFAVPILTYSFGVIKWSQTELKQLQRIINTTMTTQRKHHPRSCIQRLTLPREEGGRGLTDITNLHNRQISTLRQYFIKKAQNSTLHHTINHADKHLTPLNLYDTNTQPCEKITSKADKKLVWAQKSLHGRHYQDLQQPHVDTKATNTWLCRGELFPETEAFITAIQDQVIDTRNYQKFIIRRPNLRTDKCRRCHISSETIQHITGACKTISQTDYKHRHDQVAAIIHQNLAFKHSLITQKTAYYKYIPQVVLESSDYKLYWDRTIITDKTIHYNRPDILLYDKNNKIVYLIDIAVPNTHNLTATHTEKIAKYTDLAIEIKTQWKVNTVKTVPIILSSTGVIPHTLHASLSTLNLHPSTYTLLQKAVILNTCRLVRKFLTMT

SEQ ID NO: 22837 - protein, 1329 aa, Euriphellus phraxanor
MITRSKSKIYVVNKTPQVSSSSLPVESSISSPINSLSRSFSPSNSLFSSLDSLPNPQKRLTVSYSSSITSPTSVDVAQEANADLLGPTTGSIRARRKWTNDMNMFIWRNYLILTKLETKTRGYLGPLHEKFTFRYPEMHASKQSIGDQRRAILRNKLLPPSTLDQIKQDVATFLEKNQQPESTITQTTSRMRWSDEINENILRIYYKVTNLEADLTAYRPKLYHRFIEMYPHLTHISQQRLSDQRRAIINNRMVSQERIQQIKHEIALQLHLTQSCAQSNTQHNTQATHKVLSHTQSNIASANIGPTRLDETTETSNPTTCNTNIQQGHTSHPYQRQVHHLTLDAQDKINETFQTTYSKFFQTDPLQRPFILKQKHSKHLTLIIDYMNTEIIPKYITLGSHFNDIQTIIYCAAYTVAVISGTKVKDNAQTSNTITENRPPWQRRLQDKIEKLRKDIGRVLQFSRGNRSRRLETLVKDITNKHKIHSQHEEPNTTCEQVLDTLKQKLNATTSRLRRYMNCTLRKQQNSLFVASEKLFYRKLSTGQITNHQHTTAPEAEVLERFWTNLWAIPVEHNQNAEWIGVATEHTTNITQMEFTEIPIDTLRSIIQKTHNWKAPGADNIHNFWYKKFTSTHAALHSHINEFIQNPASLPQYITQGITYMIPKDHNDTKNPSKYRPITCLQNIYKIITSCITYLIYQHVENNNILAEEQKGCRKYSQGCKEQLIIDSIAMAHTLCNKTDLCTMYIDYRKAYDSIPHSWLIHILNLYKIHPKITSFLQTVMNNWKTILRLDSRASRVQTGCIPIRRGIFQGDALSPLWFCLALNPLSYLLNGSSAGIPIEFTNTGNQPHTTLTHLAYMDDIKLYSNTTQSLHHLADITQTYSNDILMEFGIDKCKTFTISKGKVEQNPYTIVTGESIEPLEQSSTYKYLGFQQSQHVHQKDTKVHLTKIFKHRINLILRSQLYSRNMIKAINTFAIPILTYSFGIIKWTQTELKKLQRIINTSMTGHRKHHPRSSIHRLTLPREDGGRGVIDITNLHNKQITGLRHFFFKKAQHSTLHQTLSLADKHFTPLNLKETHTQLNEKQTSKSDKMLAWAQKVLHGRHYHDLQQPHVDRIASNNWLRRGDLFPETEAFIIAIQDQIINTRNYEKFIIHRPNLITDKCRRCHSASETIQHITGACRAITQTDYKHRHDQVAAIIHQNLAFKYSFITKKTPYYKYIPQTVLESADYKLYWDRTIITDKTIHYNRPDIILYNKTNKTVYLIDIAIPNTHNLTSIYTEKFAKYTDLAIEIKIQWKVNSVRFTYIHTYTCIHTYAFNNYQQTLQFYLFV

SEQ ID NO: 22838 - protein, 737 aa, Plutella xylostella
MPTEPSLTTPHLTVSTEDVRLSVGSFYNGSASGMDGLRPEHLKELTSFTAGDSGVRLLQSLTKLSNFLLKGTLNREVCPYLYGASLCALNKADGGVRPIAVGSVLRRLVAKLCCRAVKEEMAAYLQPHQLGFGTALGCEAAIHATRAFTSDNPDHIIIKLDIRNAFNSVERDVLLREVMEQVPTLYPFLHQCYSSPSNLFYHETSIASQVGAQQGDPLGPLVFSLALHKTISSIKSPLNIWYLDDGVIGGSPETVLNEIPTLISNLKSIGLILNCKKCEFFGNTPRAQQSFSLFEAIVPGSQNTVKDQFMLLGAPIFPEGIPALLENKHQTFSKLTNQLDKLSSCVALILLRSCLAMPRLTYTVRTSPAWLFLDEVAALDATVKRTLEKVLNVSLNDAQWCQASLPIRHGGIGVRRLQDTALVGFLASAHGVVNLVTQILSINGDGFTVPFVDVGLTEWASRHPNQNVVKPNIQKEWDEIQCKALVADIMVNSSGAHLARIKAVTRPEAGAWLHALPSPQLGTYLDNDSLRIAVALRLGCDVCVPHKCICGVMVEADGHHALSCTRCAGRLPRHSALNDIIRRALVSANIPCVLEPPGLFRTDGKRPDGLTLIPWKRGQCLVWDATCVSTYAAAHLGNTIRAGGAAAETAAGAKHLKYSNLKASYSFLPFAVEAAGSWGTEALCFIRELGKRLKEKGHDARSGSFLFQRISLAIQRGNAAGLLGTFEPGTIRGGIFD

SEQ ID NO: 22839 - protein, 939 aa, Plutella xylostella
MDNPPSRVPCPHCPGSSRSFIAPHGLSVHIGRMHRDVLTQPSGNLPTGHQNNISINNVTLDNLPILKNRVRILSHIPKGARHSAADKLAATIDKCLETNDTDDWYHLLTFSYTALRVPDRTDRRSLTAKVKANINSDSVYFPSEGPQTNKRGIYKLIESKVFEGDLRGAVRLLTSDCSIAPNNDTTLSSLIDKHPPPSRDLSMPTEPSLTTPHLTVSTEDVRLSVGSFYNGSASGMDGLRPEHLKELTSFTAGDSGVRLLQSLTKLTNFLLKGTLNREVCPNLYGASLCALNKADGGIRPIAVGSVLRRLVAKLCCRAVKEEMAAYLQPHQLGFGTALGCEAAIHATRAFTSDDPDHIIIKLDIRNAFNSVERDVLLREVMEQVPTLYPFLHQCYSSPSNLFYHETSIASQVGAQQGDPLGPLVFSLALHKTISSIKSPLNIWYLDDGVIGGSPETVLNEIPTLISNLKSIRLILNSKKCEFFGNTPRAQQSFSLFEAIVPGLQNTVKDQFMLLGAPIFPEGIPALLENKHQTFSKLTNQLDKLSSCVALILLRSCLAMPRLTYTVRTSPAWLFPDEVAALDATVKRTLEKVLNVSLNDAQWCQASLPIRHGGIGVRRLQDTALVGFLASAHGVVNLVTQILSINGDGFTVPFVDVGLTEWASRHPNQNVVKPNIQKEWDEIQCKALVADIMANSSGAHLARIKAVTRLEAGAWLHALPSPQLGTYLDNDSLRIAVALRLGCDVCVPHKCICGVMVEADGHHALSCTRCAGRLPRHSALNDIIRRALVSANIPCVLEPPGLFRTDGKRPDGLTLIPWKRGQCLVWDATCVSTYAAAHLGNTIRAGGAAAETAAGAKHLKYSNLKASYSFLPFAVEAAGSWGTEALCFIRELGKRLKEKGHDARSGSFLVQRISLAIQRGNAAGLLGTFEPGTIRGGIFD

SEQ ID NO: 22840 - protein, 939 aa, Plutella xylostella
MDNPPSRVPCPHCPGSSRSFIAPHGLSVHIGRMHRDVLTQASGNLPTGHQNNISINNVTFDNLPILKNRVRILSHIPKGARHSAADKLAATIDKCLETNDTDDWYHLLTFSYTALRVPDRTDRRSLTAKVKANINSDSVYFPSEGPQTNKRGIYKLIESKVFEGDLRGAVRLLTSDCSIAPNNDTTLSSLIDKHPPPSRDLSMPTEPSLTTPHLTVSTEDVRLSVGSFYNGSASGMDGLRPEHLKELTSFTAGDSGVRLLQSLTKLSNFLLKGTLNREVCPYLYGASLCALNKADGGVRPIAVGSVLRRLVAKLCCRAVKEEMAAYLQPHQLGFGTALGCEAAIHATRAFTSDNPDHIIIKLDIRNAFNSVERDVLLREVMEQVPTLYPFLHQCYSSPSNLFYHETSIASQVGAQQGDPLGPLVFSLALHKTISSIKSPLNIWYLDDGVIGGSPETVLNEIPTLISNLKSIGLILNSKKCEFFGNTPRAQQSFSLLETIVPGLQNTVKDQFMLLGAPIFPEGIPALLENKHQTFSKLTNELDKLSSCVALILLRSCLAMPRLTYTVRTSPAWLFPDEVAALDATVKRTLEKVLNVSLNDAQWCQASLPIRHGGIGVRRLQDTALVGFLASAHGVVNLVTQILSINGDGFTVPFVDVGLTEWASRHPNQNVVKPNIQKEWDEIQCKALVADIMANSSGAHLARIKAVTRPEAGAWLHALPSPQLGTYLDNDSLRIAVALRLGCDVCVPHKCICGVMVEADGHHALSCTRCAGRLPRHSALNDIIRRALVSANIPCVLEPPGLFRTDGKRPDGLTLIPWKRGQCLVWDATCVSTYAAAHLGNTIRAGGAAAETAAGAKHLKYSNLKASYSFLPFAVEAAGSWGTEALCFIRELGKRLKEKGHDARSGSFLVQRISLAIQRGNAAGLLGTFEPGTIRGGIFD

SEQ ID NO: 22841 - protein, 939 aa, Hypermnestra helios
MNSPPSTASCPYCPISSRRFVAPHGLNVHIGRMHKDVNSQTPNISTTNHHILNFNTLDDLPLLKTRVKVLKHIPKGARHSAASKLSSIINKCLETNDISDWCNLLTFTYSALRIPDRSDSKSLTAKVKENIDSCCSLFPLTEPCTKSYSFYRAIESKVFDGDIRGAVRIITSDSSIAPNNNNTLSALRNKHPEKSRNLSMPNEPDTSSPVLIVTANNIKVAIGSFYNGSASGMDGIRPEHLKELTSFSAGDNGVHLLESLTKLCNFLLKGSLNREVCPYFYGATLCALDKNDGGVRPIAVGSVLRRLVAKLGCKAVKEEMAVYLQPHQLGFGTALGCEAAIHATRAFAFSKDNNDSVIIKLDIRNAFNSVERDVILSEVLEHIPSLYPFLHQCYSCPSKLFYNESLIVSQVGAQQGDPLGPLIFCLAIQKIISSIKSPLNLWYLDDGVIGGNTEILLNDIPLLFSSLKAIGLEINTEKCEYYACSQNSQLSFSRFQALVPGLKNLNKDTFMLLGAPIFPEGIPSLLHSKQQSFSRVMTHLNKISACVALILLRNCFAMPRLTYAIRTSPTWLFPSYVSSFDGNLKQILENILNIKLHDGQWCQASLPIRYGGIGIRRLQDTALMAFLASAHGVMNLVTQILAINGDGFIVPFVDEALKEWSRRYPDKAVPLKPEIQREWDNIQCGTIIDHLIRTSSGAHLARMKAVTRPESGAWLHALPSPQLGTYLDNDSLRIAVAYRLGCDVCVSHKCICGMLVEADGHHALGCIKCAGRIPRHSSLNEIIRRALISANVPCVLEPPGLFRTDGKRPDGLSLIPWEKGQCLVWDATCVSTFAATHLNNTTRTGGAAAETAAKRKHSKYANLSEAYQFLPFAVETAGSWGAESLNFVRQLGKRLRERGYDARSGSFLVQRISLAIQRGNAASLMGTFEPGTIRGGLFD

SEQ ID NO: 22842 - protein, 1042 aa, Leptinotarsa texana
MGLSQHMRHRHPDARNEARTASASYYQPPRPRHNQVFTEDEIRTMLECEVRFYGDRLIAFNMAPFIPTKTNTQLRHKRADTKYKLRRDKYLIEHNLPPLAAGRQENLEEIEEERNLPDSPARGLADPLLAAQEEAAALVRELESIQRATLEYREWRKEIVESVLAQQIPQNAQRSQKEITAFANLGSGLERSSFWDYDVPQGFIDTMYSWVLSVVQTDGRPKTPKPKRGAGRGRGSRRRYLYAKTQDLYNKNPSLVARYVRNNVDWLDAPGIGCPNADVQDLYNRLWGQKPAVQIPDLGENDPPIGLSQVLTEITRKEIKERFSQISSSTAAGPDGFRLIDVRKPAVYEVLHRFYNLVMVCGRIPSDWRKNRTTLIPKEGKDGSKAENYRPITIASILSRGYFGIFDKKLRRVVEFSPRQKGFVNEAGCFNNVHLLNEVLRHSKVHKGMVVTILDVSKAFDTVPKEVLNPALRRKGLPEQVVRIVEDAYSGVQTSLELNNAQVEVRLQRGVKQGDPLSPFLFNAALEPLLHKLESQPGYQINESEEVTCLAFADDLVLLAQDESQAQKQLSDTEAYLEGLGMKLSQQKCQTFRVKTTKDSWHLTDPGLKFDSGEGVPVMGAGDCLVYLGVRFSPWVGISSEGIRADLASALARVQKLKLKPHQKIDLITTYLVPHYLYKINVTIPSLNEIRAMDQELRVVIKAILHLPNSTTNGLLYVSRKDGGLGIPRLEWLLTSSALHAGLKFWNNPDPAMQALAAGSRLEVRLRNLAKAARINWPVDPTVIKNYVRKERKKELARWSRQRSQGKSVAAFTDSKISNTWLSDPTLLKPCRMITALRMRTNSCANRVAMSRAGPVPDPNCRQCGSQLETLGHILGQCRYTKSSRIRRHDEIRDLIVAEVTKQGAEVAVTVEPTIVDPRGGNLKPDLVIQRQGRVFVVDVTVRHEDGDGLVSGRNSKIQKYSRLLPHFRQRFHADQAEVLPIVVGTRGALPRETTQCLSTLGLQNQGLFKTISLIALRSSIEIYHDFMDYNAPLRRRSRQPP

SEQ ID NO: 22843 - protein, 1147 aa, Leptinotarsa defecta
MDRTMKEIWESMGYPIPVAQNYTERSCTLCLLEGRNLLSLSLAEEERHCRDWHPDREIKFVCTKCRKIYKNRHASRCHLPKCTGPKPIVADGQRCGICNSVFATDMGLSQHMRHRHPDARNEARIASASYYQPPRPRHNQVFTEDEIRTMLECEVRFYGDRLIAFNMAPYIPTKSNTQLRHKRADIKYKVRRDQYLIEHNLPPLAAGRQENLEEIEEPINLPDSPARGLADPLLALEEGAAALVRELESIQRATLEYREWRREIVESVLAQQIPQNAQRSQTEITAFTNLGAGLEQSSFWDHDVPQGFIDTMYSWVLSVVQTDGRPRIPKPKRGAGRGRGSRRRYLYAKTQDLYNKNPSLVARYVRNNVDWLDAPGIGCPNADVQDLYERLWGQKPVVQIPDLGENDPPIELSRALSEITQQEIKERLSQISSSTAAGPDGIRLIDVRRPAVYEVLHRFYNLVMVCGRIPSDWRKNRTTLIPKEGKDGSKAENYRPITIASILSRGYFGIIDKKLRGVVEFSPRQKGFVNEAGCFNNVHLLNEVLRHSKVHKGMVVTILDVSKAFDTVPHEVLNPTLRRKGLPAQVVRIVEDAYSGVQTSLELNDAQVEVRLQRGVKQGDPLSPFLFNAALEPLLHKLESQPGYQINESEEVTCLAFADDLVLLAQDSSQAQKQLSDTEAYLEGLGMKLSHQKCQTFRVKTAKDSWHLTDPGLKFDSGEGVPVMGAGDCLVYLGVRFSPWVGITSEGIRADLASALARVQKLKLKPHQKIDLITTYLVPHYLYKINVTIPSLNEIRAMDQELRVVIKAILHLPNSTTNGLLYVSRKDGGLGIPRLEWLLTSSALQAGLKFWNNPDPAMQALAAGSRLEVRLRNLAKAARINWPVDPTIIKNYVRKERKKELARWSRQKSQGKSVAAFTDSKISNTWLSDPTLLKPCRMITALRMRTNSCANRVAMSRAGPVPDPNCRQCGSQLETLGHILGQCRYTKSSRIRRHDEIRDLIVAEVTKQGAEVAVTVEPTIVDPRGGNLKPDLVIQRQGRVFVVDVTVRHEDGDGLVSGRNSKIQKYSRLLPQFRQRFHADQAEVLPIVVGTRGALPRETTRCLRTLGLQNQGLYKTISLIALRSSIEIYHDFMDYNAPLRRRSRQPP

SEQ ID NO: 22844 - protein, 1147 aa, Leptinotarsa tumamoca
MERFLKEIWESMGYPIPVAQNYTERSCTLCLLEGRNLLSLSLAEEERHCRDWHPDREIKFVCTKCRKIYKNRHASRCHLPKCTGPKPIVADGQRCGICNSVFATDMGLSQHMRHRHPDARNEARIASASYYQPPRPRHNQVFTEDEIRTMLECEVRFYGDRLIAFNMAPYIPTKSNTQLRHKRADIKYKVRRDQYLIEHNLPPLAAGRQENLEETEEPINLPDSPARGLADPLLAMQEEAAALVRELESIQRTTLEYREWRREIVESVLAQQIPQNAQRSQTESTAFTNLGAGLEQSSFWDYDVPQGFIDTMYSWVLSVVQTDGRPRNPKPKRGAGRGRGSRRRYLYAKTQDLYNKNPSLVARYVRNNVDWLDAPGIGCPNADVQDLYERLWGQKPVVQIPDLGDNDPPIELSHVLSEITRDEIKERFSQISSSTAAGPDGFRLIDVRRPAVYEVLHRFYNLVMVCGRIPSDWRKNRTTLIPKEGKDGSKAENYRPITIASILSRGYFGIIDKKLRRVVEFSPRQKGFVNEAGCFNNVHLLNEVLRHSKAHKGMVVTILDVSKAFDTVPHEVLNPTLRRKGLPEQVVRIVEDAYSGVQTSLELNDAQVEVRLQRGVKQGDPLSPFLFNAALEPLLHKLESQPGYQINESEEVTCLAFADDLVLLAQDASQAQKQLSDTEAYLEGLGMKLSQLKCQTFRVQTTKDSWHLTDPGLKFDSGEGVPVMGAGDCLVYLGVRFSPWVGITSEGIRADLASALARVQKLKLKPHQKIDLITTYLVPHYLYKINVTIPSLNEIRAMDQELRVVIKAILHLPNSTTNGLLYVSRKDGGLGIPRLEWLLTSSALQAGLKFWNNPDPAMQALAAGSRLEVRLRNLAKAARINWPVDPTIIKNYVRKERKKELARWSRQKSQGKSVAAFTDSKISNTWLSDPTLLKPCRMITALRMRTNSCANRVAMSRAGPVPDPNCRQCGSQLETLGHILGQCRYTKSSRIRRHDEIRDLIVAEITKQGTEVAVTVEPTIVDPRGGNLKPDLVIQRQGRVFVVDVTVRHEDGDGLVSGRNSKIQKYSRLLPQFRQRFHADQAEVLPIVVGTRGALPRETTRCLRTLGLQNQGLYKTISLIALRSSIEIYHDFMDYNAPLRRRSRQPP

SEQ ID NO: 22845 - protein, 837 aa, Leptinotarsa undecemlineata
MYSWVLTVIQDGARPRKPEPKRGARQGRGSRRRYLYAKTQDLYKKNPSLVARHVRTNVDWLDTPGIRCPNADVRDLYNNLWGHKPEVQVPDLGTKDPPRGLSRVLSEITPEEIKQRFSQISRSTAAGPDGFRLIDVKRPAVYEVLHRFFNMIMVCARIPSDWRKNRTTLIPKEGKDGSKAENYRPITIASVLSRGYFGIIDKKLRKVVDFSPRQKGFVNEAGCFNNVHLLNEVLRHSKVHKGMVVTILDVSKAFDTIPHEVLTPSLLKKGLPGHVTRIVEDAYAGVHTTIELNDAQVEVRLQRGVKQGDPLSPFLFNAAMEPLLLALESQPGYQINESVKVTCLAFADDLILLAQDEGQAQKQLSDTEAYLSGLGMKLSQLKCQTFRVKTTKDSWCLVDPGLTFDSGEGVPVTGAGDHLVYLGVKFSPWVGITSEGIGADLASALKRVQKLKLKPHQKIDLITTYLVPHYQYRINIAIPSLNAIREMDQELRVVVKQILHLPNCTTNGLLYVGKKDGGLGIPRLEWLLTSSTLKAGLKFADNPDPAMRALAAGTRLESRLKSLAKAARINWPIEDPKVLINYVKKERKKELARWSRLQSQGKSVAAFTASKVSNAWLSDYSLLKPCRMITALRMRTNSCANRVAMSRAGPTPDLNCRQCGSQLETLGHILGQCRYTKPARIRRHDEIRDLIMQEVTKQGIEVAVTVEPTVVGPRGGNLKPDLVIQRQGRVFVVDVTVRHEDGDRLVAGRNSKIEKYSQLLPQFRHRFHADHAEVLPVVVGTRGALPKESIRCLSQLGLKNKGLLKTISMIALRSSIEIYHDFMDYNAPLRRRSRQPP

SEQ ID NO: 22846 - protein, 1048 aa, Osmia bicornis
MTSLRNTVLRVASPLDCDYVGPNSTKTPRMNENTTVGGPSGSSDPTMNTDEALSDASLPTLAYQCRMPECERSFTTSRGRGVHEQKAHKNWHDERQVRNIEQRKAPWSKEEAALLARQEAKLTIEGTRFINQALLPYFPNRTLEAIKGQRKNIRHKDMVNLLIHEMEQNTESDIHLETPAEHQAEERGTDLIDEIIGSFDELQPLNIAGFKADHLNQICENLKTWPATRIFEELGIYLLGVFPPPPKKRKRNNNTNTGKDNRNRKPTKRQQRRAEYARTQRAWRRNPCDCLRTILKDKTTALTPEKGIMLPYWENVMSGSNNITPGVGEKRQVINALWGPVWPMEIKEAFPELSTAPGPDGLTARQLRAVPPGILTRIFNLFLICGKLPEHLLESRTVMIPKKDGASEPGDFRPITISSVITRTFHKILARRLMKLVKLDSRQKAFVPVDGCAENTFKLDLILRYHRQQFKPLYLASIDIAKAFDSVTHKTIHDTLVTSGLPSAMIEYIMYIYEHSITRLVCDDWESEPIHPTCGVKQGDPLSPIIFNLIMDRLLCMIPKEIGVDIVGDHYNALMFADDLLFFAATPQGLQILLDLAVGFLAQCGLKINANKSFTVALRNVPHKKKSVVDNRTTFSCQGRTLPAMKREDEWKYLGVPFTPEGRTIVHPEAQLQQNIEKLTKAPLKPQQRLFALRVMVLPALYHLLTLGNTNLSRLKKVDTLVRGAIRKWLTLPQDVVNAFFHANAKDGGLSIPSMRWLMPLRRRERLEKMIGSGNEPGNYLSLEISRAKRRLLDGGEDICNNNKLEMRWAKLLHLANDGKALKESNKVPQQHQWVTAPNRLLTGRDFINVTKLRINALPTRSRTTRGRRHDRLCRAGCNEIETLNHVLQRCPRTHAARVDRHNAIVAYTKRALEKTCDRTDDEPHFNTDDGLRKPDLVAKQNNTAFVIDAQIVGEQADLTQSHQKKIDYYKGLESAIKRDYQVEKVRFTSVTLSCRGIWSRPSASDLTEWKILKKKELRIISTRVLVGGLNAFWLFNRATTRGRTGIG

SEQ ID NO: 22847 - protein, 953 aa, Nomada fabriciana
MTVESMESVEFRKAHWSEEEAALLARQEARLTREGTRFVNQALVPYFPHRTLESIKGQRRYPKHKDRVLLFIKEMEQDAEPQVNTTATNEQRTSDGSTSLVERIEASHAKLKTLEGTGYRSDHLDQICRNIRRWSLSRIYEELEVYLLGVFPTLAQKRAQDPRPEAKKPTRRQLRRTEYAQTQRAWTKNPCRCLRAILRDTVAIETPKEDIMVPYWQAAMSGGDNTSPGIGNKRQVIEALWCPLEPAEVKEAYPEMSTAPGPDGLTARQLRAMPLGTLTRILNLFVLCGRLPSYLLESRTVLIPKKSTAKEPGDFRPITVSSVLTRTFHKALARRLTRLVELDKRQMAFVPADGCAENIFRMDMILRYHRQYFKPLYMASVDLAKAFDSVTHATLRDTMSNMGLPEPMISYITNSYDGSSTKLTCADWESESIHPTCGVKQGDPLSPILFNMVIDRLLQLIPNEVGVDIAGDHYNALMFADDMVLVASTPQGLQLMLDKTVDFLAQCGLTINTQKSFTVAVRNVPHVKKTVIDGLTKFNCRGYILPALKRDDEWKYLGVPFTPEGRTLAQPETELQQTIDKLTKAALKPQQRLFALRVMVLPSLYHLLTLGNTNLSRLKKIDNLVRGAVRKWLALPHDTVNAYIHASAKDGGLAIPSMRWLMPLRRRERLLKLTKEGREPCPYLSQEISRAKKRLLEGRDEISSSHMLERRWAKLLHSAIDGIALKESGKVPQQHQWVTLPNHFLSGKDFLNSIKLRINALPTRSRTTRGQRADRLCRAGCNAIETLNHVLQQCHRTHSTRVARHNAIAAYIQRALCKTYDRVDEEPHFETEGGLRKPDLVAAKDKTAIVIDAQVVGEQADLDTAHRKKIDYYKDLEGTIKNKYNVDEVRFTSATLSCRGIWSRRAATDLTNLRILKKTELKILSTRALIGGLSAFWLYNRSTTMAKRRTGVG

SEQ ID NO: 22848 - protein, 953 aa, Nomada fabriciana
MTVESMESVEFRKAHWSEEEAALLARQEARLTREGTRFVNQALVPYFPHRTLESIKGQRRYPKHKDRVLLFIKEMEQDAEPQVNTTATNEQRTSDGSTSLVERIEASHAKLKPLEGTGYRSDHLDQICQNIRRWSSSRIYEELEVYLLGVFPILAQKRAQDPRPEAKKPTRRQLRRTEYAQTQRAWIKNPCRCLRAILRDTVAIETPKEDIMVPYWQAAMSGGDNTSPGIGNKRQVIEALWCPLEPAEVKEAYPEMSTAPGPDGLTARQLRAMPLGTLTRILNLFVLCGRLPSYLLESRTVLIPKKSTAKEPGDFRPITVSSVLTRTFHKALARRLTRLVELDKRQMAFVPADGCAENIFRMDMILRYHRQYFKPLYMASVDLAKAFDSVTHATLRDTMSNMGLPEPMIRYITNSYDGSSTKLTCADWESESIHPTCGVKQGDPLSPILFNMVIDRLLQLIPNEVGVDIAGDHYNALMFADDMVLVASTPQGLQLMLDKTVDFLAQCGLTINTQKSFTVAVRNVPHVKKTVIDGLTKFNCRGYILPALKRDDEWKYLGVPFTPEGRTLAQPETELQQTIDKLTKAALKPQQRLFALRVMVLPSLYHLLTLGNTNLSRLKKIDNLVRGAVRKWLALPHDTVNAYIHASAKDGGLAIPSMRWLMPLRRRERLLKLTKEGREPCPYLSQEISRAKKRLLEGRDEISSSHMLERRWAKLLHAAIDGIALKESGKVPQQHQWVTLPNHFLSGKDFLNSIKLRINALPTRSRTTRGQRADRLCRAGCNAIETLNHVLQQCHRTHSTRVARHNAIAAYIQRALCKTYDRVDEEPHFETEGGLRKPDLVAAKDKTAIVIDAQVVGEQADLDTAHQKKIDYYKDLEGTIKNKYNVEEVRFTSATLSCRGIWSRRAATDLTNLRILKKTELKILSTRALIGGLSAFWLYNRSTTMAKRRTGVG

SEQ ID NO: 22849 - protein, 966 aa, Dasypogon diadema
MRAESANSRNLWTEDEESELARREAECDPALSVGEILNHLAQHSSRSRESIRARRRLGKYAEKVQQFRIELESLREREDNNASNTTATQEHQQEINEEIKLALISIQDQLSEEEDQRLVGALLHQPEEYARTELNNWCQSLIDRYGRSLGNRDPNRNSARRRIIDAINRPGLSRRRQRALAYKLAQMDYNRDLKSYADGLLDGTDLTGETTMPNIEDIKNHYNDVFSTPSNEDMEPIHDRSIETTRISSPISAEEIEIAIKSSKSNSPGPDGTNMRSLARIPRIRLLLLYNAMILLEITPDVLKKSRTILIPKGKENLTNIGNWRPLTISSVFLRIFNKILSQRIASHVEIHGNQRGFSKIDGCFANCITLESIIKTRRKAGQPVTVLTLDLSKAFDRVSHHSIKRALLRKNIDSKAVNLIMDNFKDSSTVVTCNGERIDEYNIKRGVKQGDPLSPILFNIVLDELLHLLDDKGGVPIGNNIKLSALAYADDIILCAEDGGDAGRLLAATVDFLDRRGLKLNVGKSHSLSLRRVPSKKKLFVDTEPKFKVGEDFIPPITIQDEFRYLGQCFSYQGQTRCSTAALYEQLTAIRRAPLKPQQKMNILRNYLIPRYISSLQRPHISLKLLKEVDKKIRAFIRTTLHLPTHSSNMILYGPMKMGGLGIFHFAAIIPSISLGRMEKLREATPLLNATIAMAQTTVDRLRKQQYHQCNNTKLIKQKLGEQLHESYSGKGLSEAKNHQACRSFIVSPPRYWKGEQYIKAIQLRYNLLPTVGIPSNPPEARMCRAGCQKVESLSHVLQNCPITHSQRIARHDYVVHRIKNAARRHQWHVELEPHIRSDNGRLLKPDLAIIKGNQIIITDVGINWEGDIPLSVQYDNKKAIYSERPFIERLQNLHPGKNINILPLIIGARGTWCSRNNSLINLIRMTSRDVCELINTTLRGGWMTHSHFMRAVWRVRRTRERRQD

SEQ ID NO: 22850 - protein, 1036 aa, Dasypogon diadema
MSSSRQQSYPCVCGNAYATEAGLKQHQRRYCRGVPAEDPNNCPNCGRRFDTYAGMRQHIRHRHPVEYNEEMRAESANSRNLWTEDEESELARREAECDPALSVGEILNHLAQHSSRSRESIRARRRLGKYAEKVQQFRIELESLREREDNNASNTTATQEHQQEINEEIKLALISIQDQLSEEEDQRLVGALLHQPEEYARTELNNWCQSLIDRYGRSLGNRDPNRNSARRRIIDAINRPGLSRRRQRALAYKLAQMDYNRDLKSYADGLLDGTDLTGETTMPNIEDIKNHYNDVFSTPSNEDMEPIHDRSIETTRISSPISAEEIEIAIKSSKSNSPGPDGTNMRSLARIPRIRLLLLYNAMILLEITPDVLKKSRTILIPKGKENLTNIGNWRPLTISSVFLRIFNKILSQRIASHVEIHGNQRGFSKIDGCFANCITLESIIKTRRKAGQPVTVLTLDLSKAFDRVSHHSIKRALLRKNIDSKAVNLIMDNFKDSSTVVTCNGERIDEYNIKRGVKQGDPLSPILFNIVLDELLHLLDDKGGVPIGNNIKLSALAYADDIILCAEDGGDAGRLLAATVDFLDRRGLKLNVGKSHSLSLRRVPSKKKLFVDTEPKFKVGEDFIPPITIQDEFRYLGQCFSYQGQTRCSTAALYEQLTAIRRAPLKPQQKMNILRNYLIPRYISSLQRPHISLKLLKEVDKKIRAFIRTTLHLPTHSSNMILYGPMKMGGLGIFHFAAIIPSISLGRMEKLREATPLLNATIAMAQTTVDRLRKQQYHQCNNTKLIKQKLGEQLHESYSGKGLSEAKNHQACRSFIVSPPRYWKGEQYIKAIQLRYNLLPTVGIPSNPPEARMCRAGCQKVESLSHVLQNCPITHSQRIARHDYVVHRIKNAARRHQWHVELEPHIRSDNGRLLKPDLAIIKGNQIIITDVGINWEGDIPLSVQYDNKKAIYSERPFIERLQNLHPGKNINILPLIIGARGTWCSRNNSLINLIRMTSRDVCELINTTLRGGWMTHSHFMRAVWRVRRTRERRQD

SEQ ID NO: 22851 - protein, 1346 aa, Hypolimnas misippus
MLQPMIIIHSHHPRPHQYFHQLHHHHHHIWIILTIILQHHLQDLHYHYQTTEVVVQEAIPAFIPAPTAVKQCTRRKWTKDMNIFIIRTYLTITILETNTQNYLDQLHLKFIEQFPEMQVSKQRVGDQRRAIIRRKLLPAETLQEIKEGVEKDIQHLNTLTENTIQTTIDRQVHPQQFSNNTVGTKSRMKWSKEINEAIIKSYYTITKLESNKTAYRRQLHESIIQQFPQLSHVTEQRIADQRRVIVNNQLINNNRLQEIRQEVERTLSTCNIEIQTESNENVLFNVTPHTYNHLDNTANIINEITQNNPNLPNISLNDTANRAPQIINSNEKFLNTEITHQINNNFKNALDTFININPTERPFIPIQKTSRKLSCIIDYINTEILPKHLATEQDFATLQTIIYSAAHTAATCNGSKIHYPLNNKKIHVNTNRVPKWQKRLKNKIEYLRKDLGRLIQYSRGNRSPRIISHINRIKNRYRIHTQHEEPNTTESQFIDTVRQKLNVASSRLRRYSNCTLRKLQNKQFNANEKQFYRQLNSNSNNSNIRETSSTSENVSVQSEKFHQYWSHLWSNPIQHHRSTEWIQFISNNNCPQMQFEYISLEMLVTVINKTHNWKTPGSDHIHNYWYKKFTSIHPFLHNHINNFIHHPDTMPTFLTQGITFLIPKDTDYLNPEKYRPITCLQTLYKIITSCLTQLINNHITTNNILAEEQKGCRKHSQGCKEQLTIDAIVMKQAVKNKQDINTMYIDYRKAFDSVPHSWLLQVLKIYRIHPTIITFLQNTMQNWRTNLRIRNGFHIAQMTEIPIRRGIFQGDALSPLWFCLALNPLSELLNRSNSGFHFNSNSTQTTLSHLLYMDDIKLFSNSTQSLHRLADIIQTFSRDICMEFGINKCKTFTVSKGKIEQNDYILESGETIEALGTNSLYKYLGFQQAKQINAKLSKIQITKQFRHRLNIIMKTQLSSRNLIKAINTYAISILTYSFGIIKWSQTDLNNLQRIINTTMTQHRKHHPRSCIQRLILPRVDGGRGIINIKNLHNKQIKRLREFFHSRAQYSLLHQVTTESDFQYTPLNLHDYQTQQNERITDPKELIAAWEQKSLHGRHRSDLLQPHVDKQASNAWLQHGDLFPETEAFMLAIQDQVIDTRNYKKYIIHDQNSLNDICRHCHNAPETIQHITGACKSIAQTDYKHRHDQVAAIIHQDLAHQYKFINEKKPYYKYQPKSILEDNNCKIYWDRSIITDKTVHSNRPDIVVLDRNKNVVYLIDIAVCNTHNLTNTYSQKIAKYTDLSIELKTQWHVSRVLTVPLVISSTGVIPKTLHKSLQLLNIHPLTFILIQKAVILNTCRTVRKFLT

SEQ ID NO: 22852 - protein, 1373 aa, Junonia neildi
MEGTTTRYNLRPLPGGRRGASGANAGCHSMRSVGDGGLNRRVPLEQNTTADDHLSLPSSPTSSLFPSIASSPPSYMDHFNHNSPTLSVSSSSSHQTTDGVVQEAISAFNSTPTVVKRCTRKKWTKDMNIFIIRTYLMITALETNMQNYLDQLHLKFTHQFPEMQVNKQRVGDQRRAIIRRKLLSAEILQAIKEDVEKDIQSQNSLPQNTTQTYNNSQVQSQQSSNSTARNRSRMKWSNEVNEAIMRSYYTITKLESNKTAYRRQLYENIKEQFPQLSHVSEQRIADQRRVIVNNQLINNHRLQEIKQEVERFLSSCNDAGQQTELNRNLSLNTTTQNINSIDGRANLPDNNLNNDNAPQMINSHDKFINTDIAILINKNFENALNIYTNTNPTQRPFIPIQKSSRKLSYIVDYINTDILPKHLTTEQDFATLQTIIYCAAHTAAVSNGSKIHNISNNNKTPANRTPKWQKRLKNKIENLRKDLGRLIQYNQGNRSQRIIAHINRIKNRHRIHTQHEEPNITESQFIDTVKQKLNVASSRLRRYSNCTLRKLQNKQFISNEKQFYRQLNNNSTIGQISENVNVPKPEEFHQYWSHLWSEPVQHNQSAEWIKSLPNDSYPQMQFEYIPLETFATVINKTHNWKTPGTDHIHNYWYKKFTAIYPYLHNHINSFIQKPETMPKYLSQGITFLIPKDTDYQNPEKYRPITCLQTLYKIITSCLTDIIYNHITINNILAEEQKGCKKHSQGCKEQLTIDTIAMKQAVKNKRDISTMYVDYRKAFDSVPHSWLIHILHIYKIHPTITAFLKNTMQKWSTNLRIKIGANTTQTAEIPIRRGIFQGDALSPLWFCLAVNPLSELLNRSNSGFCFKSNSIQTILSHLLYMDDIKLFSNNTQSLHQLADITETFSRDICMEFGINKCKTFTIRKGKIEQHDYTTDSGQIIEALGANNLYKYLGFQQAKEINTKLTKTQITKQFKHRLNMIMKTQLSSRNLIKAINTYAIPILTYSFGIIKWSQTELNNLQRIINTTMTQHRKHHPRSCIQRLILPRSEGGRGIINIKNLHNKQIKRLREFFHSQAQHTILHQVTTESDFQYTPLNLQDYQVQQNERITDPKELIATWEQKSLHGRHRSDLLQPHVDKNASNAWLQQGDLFPETEAFMLAIQDQVIETRNYKKYIIHDQNSSNDICRHCHEASETIQHITGACKSIAQTDYKHRHDQVASIIHQHLAHQHRFINEKQPYYKYQPKSILENNNYKIYWDRSIITDKTVHSNRPDIVIHDKNNSVVYLVDIAVCNTHNLTNTHSQKIAKYVDLSIELKTQWHVSKVLTVPIVISSTGVIPKTLHKSLQLLNINPLIYKLIQKAVILNTCRIVRKFLT

SEQ ID NO: 22853 - protein, 1332 aa, Junonia coenia
MRSVGDGGLNRRVPLEQNTTADDHLSLPSSPTSSLFPSIASSPPSYMDHFNHNSPTLSVSSSSSHQTTDGVVQEAISAFNPTPTVVKRCTRKKWTKDMNIFIIRTYLMITALETNMQNYLDQLHLKFTHQFPEMQVNKQRVGDQRRAIIRRKLLSAEILQAIKEDVEKDIQSQNSLPQHTTQTYNNSQVQSQQSSNSTVGNRSRMKWSNEVNEAIMRSYYTITKLESNKTAYRRQLYENIKEQFPQLSHVSEQRIADQRRVIVNNQLINNHRLQEIKQEVERFLSSCNDAGQQRELNRNLSLNTTPQNINSIDGRANLPDNNLNNDNAPQMINSHDKFINTDIAILINKNFENALNIYTNTNPTQRPFIPIQKSSRKLSYIVDYINTDILPKHLTTEQDFATLQTIIYCAAHTAAVSNGSKIHNISNNNKTPANRTPKWQKRLKNKVENLRKDLGRLIQYNQGNRSQRIIAHINRIKNRHRIHTQHEEPNITESQFIDTVKQKLNVASSRLRRYSNCTLRKLQNKQFNSNEKQFYRQLNNNNTIGQISENVNVPKPEEFHQYWSHLWSEPVQHNQSAEWIKSLPNDSYPQMQFEYIPLETFATVINKTHNWKTPGTDHIHNYWYKKFTAIYPYLHNHINNFIQKPETMPKYLSQGITFLIPKDTDYQNPEKYRPITCLQTLYKIITSCLTDIIYNHITINNILAEEQKGCKKHSQGCKEQLTIDTIAMKQAVKNKRDISTMYVDYRKAFDSVPHSWLIHILHIYKIHPTITAFLKNTMQKWSTNLRIKIGANTTQTAEIPIRRGIFQGDALSPLWFCLAVNPLSELLNRSNSGFCFKSNTIQTILSHLLYMDDIKLFSNNTQSLHQLADITETFSRDIGMEFGINKCKTFTIRKGKIEQHDYTTDSGQVIEALGANNLYKYLGFQQAKEINTKLTKTQITKQFKHRLNMIMKTQLSSRNLIKAINTYAIPILTYSFGIIKWSQTELNNLQRIINTTMTQHRKHHPRSCIQRLILPRSEGGRGIINIKNLHNKQIKRLREFFHSQAQHTILHQVTTESDFQYTPLNLQDYQVQQNERITDPKELIATWEQKSLHGRHRSDLLQPHVDKNASNAWLQQGDLFPETEAFMLAIQDQVIETRNYKKYIIHDQNSSNDICRHCHEASETIQHITGACKSIAQTDYKHRHDQVASIIHQHLAHQHRFINEKQPYYKYQPKSILENNNYKIYWDRSIITDKTVHSNRPDIVIHDKNNSVVYLVDIAVCNTHNLTNTHSQKIAKYVDLSIELKTQWHVSKVLTVPIVISSTGVIPKTLHKSLQLLNITPLIYKLIQKPSS

SEQ ID NO: 22854 - protein, 1373 aa, Junonia zonalis
MEGTTTRYNLRPLPGGRRGASGANAGCHSMRSVGDGGLNRRVPLEQNTTADDHLSLTSSPTSSLFPSIASSPPSYMDHFNHNSPTLSVSSSSSHQTTDGVVQEAISAFNSTPTVVKRCTRKKWTKDMNIFIIRTYLMITALETNMQNYLDQLHLKFTHQFPEMQVNKQRVGDQRRAIIRRKLLSAEILQAIKEDVEKDIQSQNSLPQNTTQTYNNSQVQSQQSSNSTAGNRSRMKWSNEVNEAIMRSYYTITKLESNKTAYRRQLYENIKEQFPQLSHVSEQRIADQRRVIVNNQLINNHRLQEIKQEVERFLSSCNDAGQQTELNRNLSLNTTTQNINSIDGRANLPDNNLNNDNAPQMINSHDKFINTDIAILINKNFENALNIYTNTNPTQRPFIPIQKSSRKLSYIVDYINTDILPKHLTTEQDFATLQTIIYCAAHTAAVSNGSKIHNISNNNKTPANRTPKWQKRLKNKIENLRKDLGRLIQYNQGNRSQRIIAHINRIKNRHRIHTQHEEPNITESQFIDTVKQKLNVASSRLRRYSNCTLRKLQNKQFNSNEKQFYRQLNNNNTIGQISENVNVPKPEEFHQYWSHLWSEPVQHNQSAEWIKSLPNDSYPQMQFEYIPLETFATVINKTHNWKTPGTDHIHNYWYKKFTAIYPYLHNHINSFIQKPETMPKYLSQGITFLIPKDTDYQNPEKYRPITCLQTLYKIITSCLTDIIYNHITINNILAEEQKGCKKHSQGCKEQLTIDTIAMKQAVKNKRDISTMYVDYRKAFDSVPHSWLIHILHIYKIHPTITAFLKNTMQKWSTNLRIKIGANTTQTAEIPIRRGIFQGDALSPLWFCLAVNPLSELLNRSNSGFCFKSNTIQTILSHLLYMDDIKLFSNNTQSLHQLADITETFSRDICMEFGINKCKTFTIRKGKIEQHDYTTDSGQIIEALGANNLYKYLGFQQAKEINTKLTKTQITKQFKHRLNMIMKTQLSSRNLIKAINTYAIPILTYSFGIIKWSQTELNNLQRIINTTMTQHRKHHPRSCIQRLILPRSEGGRGIINIKNLHNKQIKRLREFFHSQAQHTILHQVTTESDFQYTPLNLQDYQVQQNERITDPKELIATWEQKSLHGRHRSDLLQPHVDKNASNAWLQQGDLFPETEAFMLAIQDQVIETRNYKKYIIHDQNSSNDICRHCHEASETIQHITGACKSIAQTDYKHRHDQVASIIHQHLAHQHRFINEKQPYYKYQPKSILENNNYKIYWDRSIITDKTVHSNRPDIVIHDKNNSVVYLVDIAVCNTHNLTNTHSQKIAKYVDLSIELKTQWHVSKVLTVPIVISSTGVIPKTLHKSLQFLNINPLIYKLIQKAVILNTCRIVRKFLT

SEQ ID NO: 22855 - protein, 1344 aa, Junonia stemosa
MRSVGDGGLNRRVPLEQNTTADDHLSLPSSPTSSLFPSIASSPPSYMDHFNHNSPTLSVSSSSSHQTTDGVVQEAISAFNSTPTVVKRCTRKKWTKDMNIFIIRTYLMITALETNMQNYLDQLHLKFTHQFPEMQVNKQRVGDQRRAIIRRKLLSAEILQAIKEDVEKDIQSQNSLPQNTTQTYNNSQVQSQQSSNSTAGNRSRMKWSNEVNEAIMRSYYTITKLESNKTAYRRQLYENIKEQFPQLSHVSEQRIADQRRVIVNNQLINNHRLQEIKQEVERFLSSCNDAGQQTELNRNLSLNTTTQNINSIDGRANLPDNNLNNDNAPQMINSHDKFINTDIAILINKNFENALNIYTNTNPTQRPFIPIQKSSRKLSYIVDYINTDILPKHLTTEQDFATLQTIIYCAAHTAAVSNGSKIHNISNNNKTPANRTPKWQKRLKNKVENLRKDLGRLIQYNQGNRSQRIIAHINRIKNRHRIHTQHEEPNITESQFIDTVKQKLNVASSRLRRYSNCTLRKLQNKQFNSNEKQFYRQLNNNNTIGQISENVNVPKPEEFHQYWSHLWSEPVQHNQSAEWIKSLPNDSYPQMQFEYIPLETFATVINKTHNWKTPGTDHIHNYWYKKFTAIYPYLHNHINNFIQKPETMPKYLSQGITFLIPKDTDYQNPEKYRPITCLQTLYKIITSCLTDIIYNHITINNILAEEQKGCKKHSQGCKEQLTIDTIAMKQAVKNKRDISTMYVDYRKAFDSVPHSWLIHILHIYKIHPTITAFLKNTMQKWSTNLRIKIGANTTQTAEIPIRRGIFQGDALSPLWFCLAVNPLSELLNRSNSGFCFKSNTIQTILSHLLYMDDIKLFSNNTQSLHQLADITETFSRDIGMEFGINKCKTFTIRKGKIEQHDYTTDSGQVIEALGANNLYKYLGFQQAKEINTKLTKTQITKQFKHRLNMIMKTQLSSRNLIKAINTYAIPILTYSFGIIKWSQTELNNLQRIINTTMTQHRKHHPRSCIQRLILPRSEGGRGIINIKNLHNKQIKRLREFFHSQAQHTILHQVTTESDFQYTPLNLQDYQVQQNERITDPKELIATWEQKSLHGRHRSDLLQPHVDKNASNAWLQQGDLFPETEAFMLAIQDQVIETRNYKKYIIHDQNSSNDICRHCHEASETIQHITGACKSIAQTDYKHRHDQVASIIHQHLAHQHRFINEKQPYYKYQPKSILENNNYKIYWDRSIITDKTVHSNRPDIVIHDKNNSVVYLVDIAVCNTHNLTNTHSQKIAKYVDLSIELKTQWHVSKVLTVPIVISSTGVIPKTLHKSLQLLNINPLIYKLIQKAVILNTCRIVRKFLT

SEQ ID NO: 22856 - protein, 1298 aa, Junonia vestina
MDHFNHNSPTLSVSSSSSHQTTDGVVQEAISAFNSTPTVVKRCTRKKWTKDMNIFIIRTYLMITALETNMQNYLDQLHLKFTHRFPEMQVNKQRVGDQRRAIIRRKLLSAEILQAIKEDVEKDIQSQNLLPQNTKQSYNNSQVQSQQSSNSNVGNKSRMKWSNEVNEAIMRSYYTITKLESNKTAYRRQLYENIKEQFPQLSHVSEQRIADQRRVIVNNQLINNHRLQEIKQEVERFLSSCNDAGQQTELNRNLSLNTTTQNINSIDGRANLLDNNLNNDNAPQMINSHDKFINTDIAILINKNFENALNIYTNTNPTQRPFIPIQKSSRKLSYIVDYINTDILPKHLTTEQDFATLQTIIYCAAHTAAVSNGSKIHNISNNNKTPANRIPKWQKRLKNKIENLRKDLGRLIQYNQGNRSQRIIAHINRIKNRYRIHTQHEEPNITESQFIDTVKQKLNVASSRLRRYSNCTLRKLQNKQFNSNEKQFYRQLNKSSTIGQISENVYVLKPEEFHEYWSHLWSEPVQHNQSAEWIKSLPNDSYPQMQFEYIPLETFATVINKTHNWKTPGTDHIHNYWYKKFTAIYPYLHNHINNFIQKPETMPKYLSQGITFLIPKDTDYQNPEKYRPITCLQTLYKIITSCLTDIIYNHITINNILAEEQKGCKKHSQGCKEQLTIDTIAMKQAVKNKRDISTMYVDYRKAFDSVPHSWLIHILHIYKIHPTITAFLKNTMQKWSTNLRIKIGANTTQTAEIPIRRGIFQGDALSPLWFCLAVNPLSELLNRSNSGFCFKSNTIQTNLSHLLYMDDIKLFSNNTQSLHQLADITETFSRDIGMEFGINKCKTFTIRRGKIEQHHYTTDSGQIIEALDANNLYKYLGFQQAKEINTKLTKTQITKQFKHRLNMIMKTQLSSRNLIKAINTYAIPILTYSFGIIKWSQTELNNLQRIINTTMTQHRKHHPRSCIQRLILPRSEGGRGIINIKNLHNKQIKRLREFFHSQAQHTILHQVTTESDFQYTPLNLQDYQVQQNERITDPKELIATWEQKSLHGRHRSDLLQPHVDKNASNAWLQQGDLFPETEAFMLAIQDQVIETRNYKKYIIHDQNSSNDICRHCHEASETIQHITGACKSIAQTDYKHRHDQVASIIHQHLAHQHRFINEKQPYYKYQPKSILENNNYKIYWDRSIITDKTVHSNRPDIVIYDKNNSVVYLVDIAVCNTHNLTNTHSQKIAKYVDLSIELKSQWHVSKVLTVPIVISSTGVIPKTLHKSLQLLNINPLIYKLIQKAVILNTCRIVRKFLT

SEQ ID NO: 22857 - protein, 1373 aa, Junonia genoveva
MEGTTTRYNLRPLPGGRRGASGANAGCHSMRSVGDGGLNRRVPLEQNTTADDHLSLPSSPTSSLFPSIASSPPSYMDHFNHNSPTLSVSSSSSHQTTDGVVQEAISAFNSTPTVVKRCTRKKWTKDMNIFIIRTYLMITALETNMQNYLDQLHLKFTHQFPEMQVNKQRVGDQRRAIIRRKLLSAEILQAIKEDVEKDIQSQNSLPQNTTQTYNNSQVQSQQSSNSTVGNRSRMKWSNEVNEAIMRSYYTITKLESNKTAYRRQLYENIKEQFPQLSHVSEQRIADQRRVIVNNQLINNHRLQEIKQEVERFLSSCNDAGQQTELNRNLSLNTTTQNINSIDGRANLPDNNLNNDNAPQMINSHDKFINTDIAILINKNFENALNIYTNTNPTQRPFIPIQKSSRKLSYIVDYINTDILPKHLTTEQDFATLQTIIYCAAHTAAVSNGSKIHNISNNNKTPANRTPKWQKRLKNKIENLRKDLGRLIQYNQGNRSQRIIAHINRIKNRHRIHTQHEEPNITESQFIDTVKQKLNVASSRLRRYSNCTLRKLQNKQFNSNEKQFYRQLNNNSTIGQISENVNVPKPEEFHQYWSHLWSEPVQHNQSAEWIKSLPNDSYPQMQFEYIPLETFATVINKTHNWKTPGTDHIHNYWYKKFTAIYPYLHNHINSFIQKPETMPKYLSQGITFLIPKDTDYQNPEKYRPITCLQTLYKIITSCLTDIIYNHITINNILAEEQKGCKKHSQGCKEQLTIDTIAMKQAVKNKRDISTMYVDYRKAFDSVPHSWLIHILHIYKIHPTITAFLKNTMQKWSTNLRIKIGANTTQTAEIPIRRGIFQGDALSPLWFCLAVNPLSELLNRSNSGFCFKSNSIQTILSHLLYMDDIKLFSNNTQSLHQLADITETFSRDICMEFGINKCKTFTIRKGKIEQHDYTTDSGQIIEALGANNLYKYLGFQQAKEINTKLTKTQITKQFKHRLNMIMKTQLSSRNLIKAINTYAIPILTYSFGIIKWSQTELNNLQRIINTTMTQHRKHHPRSCIQRLILPRSEGGRGIINIKNLHNKQIKRLREFFHSQAQHTILHQVTTESDFQYTPLNLQDYQVQQNERITDPKELIATWEQKSLHGRHRSDLLQPHVDKNASNAWLQQGDLFPETEAFMLAIQDQVIETRNYKKYIIHDQNSSNDICRHCHEASETIQHITGACKSIAQTDYKHRHDQVASIIHQHLAHQHRFINEKQPYYKYQPKSILENNNYKIYWDRSIITDKTVHSNRPDIVIHDKNNSVVYLVDIAVCNTHNLTNTHSQKIAKYVDLSIELKTQWHVSKVLTVPIVISSTGVIPKTLHKSLQLLNINPLIYKLIQKAVILNTCRIVRKFLT

SEQ ID NO: 22858 - protein, 1375 aa, Junonia pacoma
MEGTNARYNLRPLPGGRRGASGANAGCHSMRSVGDGGLNRRVPLEQNTTADDHLSLPSSPTSSLFPSIASSPPSYMDHFNHNSPTLSVSSSSSHQTTDGVVQEAISAFNPTPTVVKRCTRKKWTKDMNIFIIRTYLMITALETNMQNYLDQLHLKFTHQFPEMQVNKQRVGDQRRAIIRRKLLSAEILQAIKEDVEKDIQSQNSLPQHTTQTYNNSQVQSQQSSYSSVGNRSRMKWSNEVNEAIMRSYYTITKLESNKTAYRRQLYENIKEQFPQLSHVSEQRIADQRRVIVNNQLINNHRLQEIKQEVERFLSSCNDAGQQTELNRNLSLNTTTQNINSIDGRANLPDNNLNNDNAPQMINSHDKFINTDIAVLINKNFENALNIYTNTNPTQRPFIPIQKSSRKLSYIVDYINTDILPKHLTTEQDLQTATLQTIIYCAAHTAAVSNGSKIHNISNNNKTPANRTPKWQKRLKNKVENLRKDLGRLIQYNQGNRSQRIIAHINRIKNRHRIHTQHEEPNITESQFIDTVKQKLNVASSRLRRYSNCTLRKLQNKQFISNEKQFYRQLNNNSTIGQISENVNVPKPEEFHQYWSHLWSEPVQHNQSAEWIKSLPNDSYPQMQFEYIPLETFATVINKTHNWKTPGTDHIHNYWYKKFTAIYPYLHNHINNFIQKPETMPKYLSQGITFLIPKDTDYQNPEKYRPITCLQTLYKIITSCLTDIIYNHITINNILAEEQKGCKKHSQGCKEQLTIDTIAMKQAVKNKRDISTMYVDYRKAFDSVPHSWLIHILHIYKIHPTITAFLKNTMQKWSTNLRIKIGANTTQTAEIPIRRGIFQGDALSPLWFCLAVNPLSELLNRSNSGFCFKSNTIQTILSHLLYMDDIKLFSNNTQSLHQLADITETFSRDIGMEFGINKCKTFTIRKGKIEQHDYTTDSGQVIEALGANNLYKYLGFQQAKEINTKLTKTQITKQFKHRLNMIMKTQLSSRNLIKAINTYAIPILTYSFGIIKWSQTELNNLQRIINTTMTQHRKHHPRSCIQRLILPRSEGGRGIINIKNLHNKQIKRLREFFHSQAQHTILHQVTTESDFQYTPLNLQDYQVQQNERITDPKELIATWEQKSLHGRHRSDLLQPHVDKNASNAWLQQGDLFPETEAFMLAIQDQVIETRNYKKYIIHDQNSSNDICRHCHEASETIQHITGACKSIAQTDYKHRHDQVASIIHQHLAHQHRFINEKQPYYKYQPKSILENNNYKIYWDRSIITDKTVHSNRPDIVIHDKNNSVVYLVDIAVCNTHNLTNTHSQKIAKYVDLSIELKTQWHVSKVLTVPIVISSTGVIPKTLHKSLQLLNINPLIYKLIQKAVILNTCRIVRKFLT

SEQ ID NO: 22859 - protein, 1373 aa, Junonia evarete
MEGTTTRYNLRPLPGGRRGASGANAGCHSMRSVGDGGLNRRVPLEQNTTADDHLSLPSSPTSSLFPSIASSPPSYMDHFNHNSPTLSVSSSSSHQTTDGVVQVAISAFNSTPTAVKRCTRKKWTKDMNIFIIRTYLMITALETNMQNYLDQLHLKFTHQFPEMQVNKQRVGDQRRAIIRRKLLSAEILQAIKEDVEKDIQSQNSLPQNTTQTYNNSQVQSQQSSNSTVGNRSRMKWSNEVNEAIMRSYYTITKLESNKTAYRRQLYENIKEQFPQLSHVSEQRIADQRRVIVNNQLINNHRLQEIKQEVERFLSSCNDAGQQTELNRNLSLNTTTQNINSIDGRANFSDNNLNNDNAPQMINSHDKFINTDIAILINKNFENALNIYTNTNPTQRPFIPIQKSSRKLSYIVDYINTDILPKHLTTEQDFATLQTIIYCAAHTAAVSNGSKIHNISNNNKTPANRTPKWQKRLKNKVENLRKDLGRLIQYNQGNRSQRIIAHINRIKNRHRIHTQHEEPNITESQFIDTVKQKLNVASSRLRRYSNCTLRKLQNKQFNSNEKQFYRQLNNNNTIGQISENVNVPKPEEFHQYWSHLWSEPVQHNQSAEWIKSLPNDSYPQMQFEYIPLETFATVINKTHNWKTPGTDHIHNYWYKKFTAIYPYLHNHINNFIQKPETMPKYLSQGITFLIPKDTDYQNPEKYRPITCLQTLYKIITSCLTDIIYNHITINNILAEEQKGCKKHSQGCKEQLTIDTIAMKQAVKNKRDISTMYVDYRKAFDSVPHSWLIHILHIYKIHPTITAFLKNTMQKWSTNLRIKIGANTTQTAEIPIRRGIFQGDALSPLWFCLAVNPLSELLNRSNSGFCFKSNTIQTILSHLLYMDDIKLFSNNTQSLHQLADITETFSRDIGMEFGINKCKTFTIRKGKIEQHDYTTDSGQIIEALGANNLYKYLGFQQAKEINTKLTKTQITKQFKHRLNMIMKTQLSSRNLIKAINTYAIPILTYSFGIIKWSQTELNNLQRIINTTMTQHRKHHPRSCIQRLILPRSEGGRGIINIKNLHNKQIKRLREFFHSQAQHTILHQVTTESDFQYTPLNLQDYQVQQNERITDPKELIATWEQKSLHGRHRSDLLQPHVDKNASNAWLQQGDLFPETEAFMLAIQDQVIETRNYKKYIIHDQNSSNDICRHCHEASETIQHITGACKSIAQTDYKHRHDQVASIIHQHLAHQHRFINEKQPYYKYQPKSILENNNYKIYWDRSIITDKTVHSNRPDIVIHDKNNSVVYLVDIAVCNTHNLTNTHSQKIAKYVDLSIELKTQWHVSKVLTVPIVISSTGVIPKTLHKSLQLLNINPLIYKLIQKAVILNTCRIVRKFLT

SEQ ID NO: 22860 - protein, 1329 aa, Junonia vestina
MKMKKKLGTFLHIFPPTSSLFPSIASSPPSYMDHFNHNSPTLSVSSSSSHQTTDGVVQVAISAFNSTPTAVKRCTRKKWTKDMNIFIIRTYLMITALETNMQNYLDQLHLKFTHQFPEMQVNKQRVGDQRRAIIRRKLLSAEILQAIKEDVEKDIQSQNSLPQNTTQTYNNSQVQSQQSSNSTVGNRSRMKWSNEVNEAIMRSYYTITKLESNKTAYRRQLYENIKEQFPQLSHVSEQRIADQRRVIVTNQLINSHRLQEIKQEVEHFLSSCNDAGQQTELNRNLSLNTTTQNINSIDGRANFSDNNLNNDNAPQMINSHDKFINTDIAILINKNFENALNIYTNTNPTERPFIPIQKSSRKLSYIVDYINTDILPKHLTTEQDFATLQTIIYCAAHTAAVSNGSKIHNISNNNKTPANRTPKWQKRLKNKIENLRKDLGRLIQYNQGNRSQRIIAHINRIKNRHRIHTQHEEPNITESQFIDTVKQKLNVASSRLRRYSNCTLRKLQNKQFNSNEKQFYRQLNKNSTIGQISENVNVPKPEEFHQYWSHLWSEPVQHNQSAEWIKSLPNDSYPQMQFEYIPLETFATVINKTHNWKTPGTDHIHNYWYKKFTAIYPYLHNHINNFIQKPETMPKYLSQGITFLIPKDTDYHNPEKYRPITCLQTLYKIITSCLADIIYNHITINNILAEEQKGCKKHSQGCKEQLTIDTIAMKQAVKNKRDISTMYVDYRKAFDSVPHSWLIHILHIYKIHPTITAFLKNTMQKWSTNLRIKIGANTTQTAAIPIRRGIFQGDALSPLWFCLAVNPLSELLNRSNSGFCFKSNTVQTILSHLLFMDDIKLFSNNTQSLHQLADITETFSRDIGMEFGINKCKTFTIRKGKIEQHDYTTDSGQIIEALGANNLYKYLGFQQAKEINTKLTKTQITKQFKHRLNMIMKTQLSSRNLIKAINTYAIPILTYSFGIIKWSQTELNNLQRIINTTMTQHRKHHPRSCIQRLILPRSEGGRGIINIKNLHNKQIKRLREFFHSQAQHTILHQVTTESDFQYTPLNLKDYQVQQNERITDSKELIATWEQKSLHGRHRSDLLQPHVDKNASNAWLQQGDLFPETEAFMLAIQDQVIETRNYKKYIIHDQNSSNDICRHCHEASETIQHITGACKSIAQTDYKHRHDQVASIIHQHLAHQHRFINEKQPYYKYQPKSILENNNYKIYWDRSIITDKTVHSNRPDIVIHDKNNSVVYLVDIAVCNTHNLTNTHSQKIAKYVDLSIELKTQWHVSKVLTVPIVISSTGVIPKTLHKSLQLLNINPLIYKLIQKAVILNTCRIVRKFLT

SEQ ID NO: 22861 - protein, 1373 aa, Junonia litoralis
MEGTNARYNLRPLPGGRRGASGANAGCHSMRSVGDGGLNRRVPLEQNTTADDHLSLPSSPTSSLFPSIASSPPSYMDHFNHNSPTLSVSSSSSHQTTDGVVQEAISAFNSTPTVVKRCTRKKWTKDMNIFIIRTYLMITALETNMQNYLDQLHLKFTHQFPEMQVNKQRVGDQRRAIIRRKLLSAEILQAIKEDVEKDIQSQNSLPQNTTQTYNNSQVQSQQSSNSTARNRSRMKWSNEVNEAIMRSYYTITKLESNKTAYRRQLYENIKEQFPQLSHVSEQRIADQRRVIVNNQLINNHRLQEIKQEVERFLSSCNDAGQQTELNRNLSLNTTTQNINSIDGRANLPDNNLNNDNAPQMINSHDKFINTDIAVLINKNFENALNIYTNTNPTQRPFIPIQKSSRKLSYIVDYINTDILPKHLTTEQDFATLQTIIYCAAHTAAVSNGSKIHNISNNNKTPANRTPKWQKRLKNKIENLRKDLGRLIQYNQGNRSQRIIAHINRIKNRHRIHTQHEEPNITESQFIDTVKQKLNVASSRLRRYSNCTLRKLQNKQFISNEKQFYRQLNNNSTIGQISENVNVPKPEEFHQYWSHLWSEPVQHNQSAEWIKSLPNDSYPQMQFEYIPLENFATVINKTHNWKTPGTDHIHNYWYKKFTAIYPYLHNHINSFIQKPETMPKYLSQGITFLIPKDTDYQNPEKYRPITCLQTLYKIITSCLTDIIYNHITINNILAEEQKGCKKHSQGCKEQLTIDTIAMKQAVKNKRDISTMYVDYRKAFDSVPHSWLIHILHIYKIHPTITAFLKNTMQKWSTNLRIKIGENTTQTAEIPIRRGIFQGDALSPLWFCLAVNPLSELLNRSNSGFCFKSNSIQTILSHLLYMDDIKLFSNNTQSLHQLADITETFSRDICMEFGINKCKTFTIRKGKIEQHDYTTDSGQIIEALGANNLYKYLGFQQAKEINTKLTKTQITKQFKHRLNMIMKTQLSSRNLIKAINTYAIPILTYSFGIIKWSQTELNNLQRIINTTMTQHRKHHPRSCIQRLILPRSEGGRGIINIKNLHNKQIKRLREFFHSQAQHTILHQVTTESDFQYTPLNLQDYQVQQNERITDPKELIATWEQKSLHGRHRSDLLQPHVDKNASNAWLQQGDLFPETEAFMLAIQDQVIETRNYKKYIIHDQNSSNDICRHCHEASETIQHITGACKSIAQTDYKHRHDQVASIIHQHLAHQHRFINEKQPYYKYQPKSILENNNYKIYWDRSIITDKTVHSNRPDIVIHDKNNSVVYLVDIAVCNTHNLTNTHSQKIAKYVDLSIELKTQWHVSKVLTVPIVISSTGVIPKTLHKSLQLLNINPLIYKLIQKAVILNTCRIVRKFLT

SEQ ID NO: 22862 - protein, 1373 aa, Junonia neildi
MEGTTTRYNLRPLPGGRRGASGANAGCHSMRSVGDGGLNRRVPLEQNTTADDHLSLPSSPTSSLFPSIASSPPSYMDHFNHNSPTLSVSSSSSHQTTDGVVQEAISAFNSTPTVVKRCTRKKWTKDMNIFIIRTYLMITALETNMQNYLDQLHLKFTHQFPEMQVNKQRVGDQRRAIIRRKLLSAEILQAIKEDVEKDIQSQNSLPQNTTQTYNNSQVQSQQSSNSTARNRSRMKWSNEVNEAIMRSYYTITKLESNKTAYRRQLYENIKEQFPQLSHVSEQRIADQRRVIVNNQLINNHRLQEIKQEVERFLSSCNDAGQQTELNRNLSLNTTTQNINSIDGRANLPDNNLNNDNAPQMINSHDKFINTDIAILINKNFENALNIYTNTNPTQRPFIPIQKSSRKLSYIVDYINTDILPKHLTTEQDFATLQTIIYCAAHTAAVSNGSKIHNISNNNKTPANRTPKWQKRLKNKIENLRKDLGRLIQYNQGNRSQRIIAHINRIKNRHRIHTQHEEPNITESQFIDTVKQKLNVASSRLRRYSNCTLRKLQNKQFISNEKQFYRQLNNNSTIGQISENVNVPKPEEFHQYWSHLWSEPVQHNQSAEWIKSLPNDSYPQMQFEYIPLENFATVINKTHNWKTPGTDHIHNYWYKKFTAIYPYLHNHINSFIQKPETMPKYLSQGITFLIPKDTDYQNPEKYRPITCLQTLYKIITSCLTDIIYNHITINNILAEEQKGCKKHSQGCKEQLTIDTIAMKQAVKNKRDISTMYVDYRKAFDSVPHSWLIHILHIYKIHPTITAFLKNTMQKWSTNLRIKIGANTTQTAEIPIRRGIFQGDALSPLWFCLAVNPLSELLNRSNSGFCFKSNSIQTILSHLLYMDDIKLFSNNTQSLHQLADITETFSRDICMEFGINKCKTFTIRKGKIEQHDYTTDSGQIIEALGANNLYKYLGFQQAKEINTKLTKTQITKQFKHRLNMIMKTQLSSRNLIKAINTYAIPILTYSFGIIKWSQTELNNLQRIINTTMTQHRKHHPRSCIQRLILPRSEGGRGIINIKNLHNKQIKRLREFFHSQAQHTILHQVTTESDFQYTPLNLQDYQVQQNERITDPKELIATWEQKSLHGRHRSDLLQPHVDKNASNAWLQQGDLFPETEAFMLAIQDQVIETRNYKKYIIHDQNSSNDICRHCHEASETIQHITGACKSIAQTDYKHRHDQVASIIHQHLAHQHRFINEKQPYYKYQPKSILENNNYKIYWDRSIITDKTVHSNRPDIVIHDKNNSVVYLVDIAVCNTHNLTNTHSQKIAKYVDLSIELKTQWHVSKVLTVPIVISSTGVIPKTLHKSLQLLNINPLIYKLIQKAVILNTCRIVRKFLT

SEQ ID NO: 22863 - protein, 1344 aa, Junonia grisea
MRSVGDGGLNRRVPLEQNTTADDHLSLPSSPTSSLFPSIASSPPSYMDHFNHNSPTLSVSSSSSHQTTDGVVQEAISAFNPTPTVVKRCTRKKWTKDMNIFIIRTYLMITALETNMQNYLDQLHLKFTHQFPEMQVNKQRVGDQRRAIIRRKLLSAEILQTIKEDVEKDIQSQNSLPQHTTQTYNNSQVQSQQSSNSTVGNRSRMKWSNEVNEAIMRSYYTITKLESNKTAYRRQLYENIKEQFPQLSHVSEQRIADQRRVIVNNQLINNHRLQEIKQEVERFLSSCNDAGQQRELNRNLSLNTTTQNINSIDGRANLPDNNLNNDNAPQMINSHDKFINTDIAILINKNFENALNIYTNTNPTQRPFIPIQKSSRKLSYIVDYINTDILPKHLTTEQDFATLQTIIYCAAHTAAVSNGSKIHNISNNNKTPANRTPKWQKRLKNKVENLRKDLGRLIQYNQGNRSQRIIAHINRIKNRHRIHTQHEEPNITESQFIDTVKQKLNVASSRLRRYSNCTLRKLQNKQFNSNEKQFYRQLNNNNTIGQISENVNVPKPEEFHQYWSHLWSEPVQHNQSAEWIKSLPNDSYPQMQFEYIPLETFATVINKTHNWKTPGTDHIHNYWYKKFTAIYPYLHNHINNFIQKPETMPKYLSQGITFLIPKDTDYQNPEKYRPITCLQTLYKIITSCLTDIIYNHITINNILAEEQKGCKKHSQGCKEQLTIDTIAMKQAVKNKRDISTMYVDYRKAFDSVPHSWLIHILHIYKIHPTITAFLKNTMQKWSTNLRIKIGANTTQTAEIPIRRGIFQGDALSPLWFCLAVNPLSELLNRSNSGFCFKSNTIQTILSHLLYMDDIKLFSNNTQSLHQLADITETFSRDIGMEFGINKCKTFTIRKGKIEQHDYTTDSGQVIEALGANNLYKYLGFQQAKEINTKLTKTQITKQFKHRLNMIMKTQLSSRNLIKAINTYAIPILTYSFGIIKWSQTELNNLQRIINTTMTQHRKHHPRSCIQRLILPRSEGGRGIINIKNLHNKQIKRLREFFHSQAQHTILHQVTTESDFQYTPLNLQDYQVQQNERITDPKELIATWEQKSLHGRHRSDLLQPHVDKNASNAWLQQGDLFPETEAFMLAIQDQVIETRNYKKYIIHDQNSSNDICRHCHEASETIQHITGACKSIAQTDYKHRHDQVASIIHQHLAHQHRFINEKQPYYKYQPKSILENNNYKIYWDRSIITDKTVHSNRPDIVIHDKNNSVVYLVDIAVCNTHNLTNTHSQKIAKYVDLSIELKTQWHVSKVLTVPIVISSTGVIPKTLHKSLQLLNINPLIYKLIQKAVILNTCRIVRKFLT

SEQ ID NO: 22864 - protein, 1160 aa, Junonia pacoma
MGTRNRMKWSNEINEAIMRSYYTITRLESNKTAYRRQLYENITQQFPQLSHFSEQRIADQRRVIVNNKLNSNIRLHKIKQEVEHTLLTSNRTDQQTEPNRNSSFNTATNNFNSEDGIPNIIINGNMQDNPTLPDNTSNDLASQTILNNDKFLNTDITTLINNNFKNALDMYTNSNPTQRPFIPKQKTSRKLSYIIDYINTNILPKHLTIEQDFATLQTIIYCAAYTAAICNGSKIHHTSNNQKPHTKSIPKWQRRLKNKIENLRKDLGRLMQYSRGNRTPRIIAHINRIKNRHRIHTQHEEPNITDSQFIDTVKQKLNVASSRLRRYLNCTLRKVQNKEFNSNEKQFYRQLDNNSNIGQTSNTSETATMPQPEEFHQYWSHIWSNPIQHNHSAEWIKSLSKDGYHEMQFEHISLETLTTVINKTHNWKTPGTDHIHNYWYKKFTLVHPFLHKHINNFIQQPDTMPIYLTQGITYLIPKDTECLSPDKYRPITCLQTLYKIITSCLSYLINDHITANNILAEEQKGCRKHSKGCKEQLTIDAVVMKQAVKSKGDISTMYIDYRKAFDSVPHSWLIHVLQIYKIHPKISVFLQSIMQNWRTNLRIKNGATVTQTTDISIRRGIFQGDALSPLWFCLAINPLSELLNRSESGFRFNGNNIQTTLSHLLYMDDIKLFSNNTESLHQLADVTHKFSRDIGMEFGINKCKTFTVCKGKVENNEYTTESGEIIEALGNNSLYKYLGFQQAKQINTKLTKNQITKQFRHRLNMIMKTQLNSRNLIKAINTYAISILSYSFGIIKWSQTELNNLQRIINTTMTQHRKHHPRSCIQRLILPRLEGGRGIINIKNLHNKQIKSLRKFFHFRAQHSILHQATTESDFRYTPLNLHDCQVQQNERITEPKELIATWAEKSLHGRHQSDLLQPHVDKQASNAWLRHGDLFPETEAFMLAIQDQVIDTRNYKKHIIHDPNSSNDICRHCHDAPETIQHITGACKSIAQTDYKHRHDQVAAIIHQYLAHQHKFINEKNPYYKYQPKSILEDNYYKIYWDRSIITDKTVHSNRPDIVMHDKNKNVVYLIDIAVCNTHNLMNTYAQKIAKYTELSIEIKSQWHVGRVFTVPIVISSTGVIPKTLHKSLQLLNINPSTYILMQKAVILNTCRTVRKFLT

SEQ ID NO: 22865 - protein, 1314 aa, Junonia vestina
MDHSNHSSPTLSASSPLSHQSFDGVVQKAVPAFISTPTVVKRCTRRKWTKDMNIFIIRTYLTITALETNTQNYLDQLHLKFTEQFPEIQVNKQRVGDQRRAIIRRQLLPAETLQVIKEEVEKEIQNLNSSPQNTTHSINSQVQPHHTTQTSNNTIGTRNRMKWSNEINEAIMRSYYTITRLESNKTAYRRQLYENITQQFPQLSHFSEQRIADQRRVIVNNKLISNSRLHEIKQEVEHTLLTSNRTDQQTEPNRNSSFNTATNNFNSEDGILNIIINGNMQDNPTLPDNTSSDLASQTILNNDKFLNTDITTLINNNFKNALDMYTNSNPTQRPFIPKQKTSRKLSYIIDYINTNILPKHLTIEQDFATLQTIIYCAAYTAAICNGSKIHHTSNNKKPHTKSIPKWQRRLKNKIENLRKDLGRLMQYSRGNRTPRIISHINRIKNRHRIHTQHEEPNITDSQFIDTVKQKLNVASSRLRRYLNCTLRKVQNKEFNSNEKQFYRQLNNNSNVGQTSNTPETVTMPQPEEFHQYWSHIWSNPIQHNHSAEWIKSLSNDGYHEMQFEHISLETLTTVINKTHNWKTPGTDHIHNYWYKKFTLVHPFLHKHINNFIQEPDTMPIYLTQGITFLIPKDTECLSPDKYRPITCLQTLYKIITSCLSYLINDHITANNILAEEQKGCRKHSKGCKEQLTIDAVVMKQAVKSKGDISTMYIDYRKAFDSVPHSWLIHVLQIYKIHPKISVFLQSIMQNWRTNLRIKNGATVTQTTDISIRRGIFQGDALSPLWFCLAINPLSELLNRSESGFRFNGNNIQTTLSHLLYMDDIKLFSNNTESLHQLADVTHKFSRDIGMEFGINKCKTFTVCKGKIENNEYTTESGEIIEALGNNSLYKYLGFQQAKQINTKLTKNQITKQFRHRLNMIMKTQLNSRNLIKAINTYAISILSYSFGIIKWSQTELNNLQRIINTTMTQHRKHHPRSCIQRLILPRLEGGRGIINIKNLHNKQIKSLRKFFHFRAQHSILHQATTESDFRYTPLNLHDCQVQQNERITDPKELIAAWAEKSLHGRHRSDLLQPHVDKQASNAWLRHGDLFPETEAFMLAIQDQVIDTRNYKKHIIHDPNSSNDICRHCHDAPETIQHITGACKSIAQTDYKHRHDQVAAIIHQYLAHQHKLINEKNPYYKYQPKSILEDNYYKIYWDRSIITDKTVHSNRPDIVMHDKNNNVVYLIDIAVCNTHNLMNTYAQKIAKYTELSIEIKSQWHVGRVFTIPIVISSTGVIPKTLHKSLQLLNINPSTYILMQKAVILNTCRTVRKFLT

SEQ ID NO: 22866 - protein, 1390 aa, Junonia grisea
MEGTNARYNLRPLPGGRRGASGANAGCHSMRSVGDGGLNRRVPLEQNTTADNHFSSPSSPTSSLFPSIASSPPSYMDHSNHSSPTLSTSSPLSHQSFDGVVQKAVPAFISTPTVVKRCTRRKWTKDMNIFIIRTYLTITALETDTQNYLDQLHLKFTEQFPEIQVNKQRLGDQRRAIIRRQLLPAETLQVIKEEVEKEIQNLNSSPQNTTQSINNSQVQPHHTTQTSNNTMGTRNRMKWSNEINEAIMRSYYTITRLESNKTAYRRQLYENITQQFPQLSHFSEQRIADQRRVIVNNKLISNSRLHEIKQEVEHTLLTSNRTDQQTEPNRNSSFNTATNNFNSEDGIPNIIINGNMQDNPTLPDNTSNDLASQTILNNDKFLNTDITTLINNNFKNALDMYTNSNPTQRPFIPKQKTSRKLSYIIDYINTNILPKHLTIEQDFATLQTIIYCAAYTAAICNGSKIHHTSNNKKPHTKSIPKWQRRLKNKIENLRKDLGRLMQYSRGNRTPRIISHINRIKNRHRIHTQHEEPNITDSQFIDTVKQKLNVASSRLRRYLNCTLRKVQNKEFNSNEKQFYRQLDNNSNIGQTSNTSETATMPQPEEFHQYWSHIWSNPIQHNHSAEWIKSLSKDGYHEMQFEHISLETLTTVINKTHNWKTPGTDHIHNYWYKKFTLVHPFLHKHINNFIQQPDTMPIYLTQGITFLIPKDTECLSPDKYRPITCLQTLYKIITSCLSYLINDHITANNILAEEQKGCRKHSKGCKEQLTIDAVVMKQAVKSKGDISTMYIDYRKAFDSVPHSWLIHVLQIYKIHPKISVFLQSIMQNWRTNLRIKNGATVTQTTDISIRRGIFQGDALSPLWFCLAINPLSELLNRSESGFRFNGNNIQTTLSHLLYMDDIKLFSNNTESLHQLADVTHKFSRDIGMEFGINKCKTFTVCKGKIENNEYTTESGEIIEALGNNSLYKYLGFQQAKQINTKLTKNQITKQFRHRLNMIMKTQLNSRNLIKAINTYAISILSYSFGIIKWSQTELNNLQRIINTTMTQHRKHHPRSCIQRLILPRLEGGRGIINIKNLHNKQIKSLRKFFHFRAQHSILHQATTESDFRYTPLNLHDCQVQQNERITEPKELIATWAEKSLHGRHQSDLLQPHVDKQASNAWLRHGDLFPETEAFMLAIQDQVIDTRNYKKHIIHDPNSSNDICRHCHDAPETIQHITGACKSIAQTDYKHRHDQVAAIIHQYLAHQHKFINEKNPYYKYQPKSILEDNYYKIYWDRSIITDKTVHSNRPDIVMHDKNKNVVYLIDIAVCNTHNLMNTYAQKIAKYTELSIEIKSQWHVGRVFTVPIVISSTGVIPKTLHKSLQLLNINPSTYILMQKAVILNTCRTVRKFLI

SEQ ID NO: 22867 - protein, 904 aa, Junonia villida
MINSHDKFINTDIAILINKNFKNALNTYTNTNPTQRPFIPIQKSSRKLSYIVDYINIDILPKHLTTEQDFATLQTIIYCAAYTTAICNGSKIHHSSNNKKPHTKSMPKWQRRLKNKIENLRKDLGRLIQYSQGNRSPRIIAHINRIKNRHRIHTQHEDPNITENQFIDTIKQKLNVASSRLRRYLNCTLRKVQNKQFNSNEKQFYRQLNNNNNAEQTSNTSNSVNIPQPEEFHQYWSHIWSNPIQHNHSAEWIKSLSNDSYHEMQFEHISLETLTTVINKTHNWKTPGTDHIHNYWYKKFTSVHPFLHNHINNFIQQPDTMPIYLTQGITFLIPKDTDSLSPDKYRPITCLQTLYKIITSCLSYLINNHITTNNILAEEQKGCRKHSKGCKEQLTIDAVVMKQAVKNKGDISTMYIDYRKAFDSVPHSWLIHVLQIYKIHPKISVFLQSIMQNWRTNLQIKNGATITQTTEIPIRRGIFQGDALSPLWFCLAVNPLSELLNRSESGFRFNSNNIQTTLSHLLYMDDIKLFSNNTESLHKLADVTHKFSRDIGMEFGINKCKTFTVCKGKIENNEYTTESGEIIEALGINSFYKYLGFQQAKQINTKLTKNQITKQFKHRLNMIMKTQLNSRNLIKAINTYAISVLSYSFGIIKWSQTELNNLQRIINTTMTQHRKHHPRSCIQRLILPRLEGGRGITNIKNLHNKQIKSLRKFFHSRAQHSILHQATAESDFRYTPLNLHDCQAQQNERITDPKELIAAWEEKSLHGRHRSDLLQPHVDKQASNAWLQHGDLFPETEAFMLAIQDQVIDTRNYKKYIIHDPNSSNDICRHCHDAPETIQHITGACKSIAQTDYKHRHDQVAAIIHQYLAYQHKFINEKNPYYKYQPKSILEDNDYKIYWDRSII

SEQ ID NO: 22868 - protein, 890 aa, Junonia neildi
MQYSRGNRTPRIISHINRIKNRHRIHTQHEEPNITDSQFIDTVKQKLNVASSRLRRYLNCTLRKVQNKEFNSNEKQFYRQLDNNSNIGQTSNTSETATMPQPEEFHQYWSHIWSNPIQHNHSAEWIKSLSKDGYHEMQFEHISLETLTTVINKTHNWKTPGTDHIHNYWYKKFTLVHPFLHKHINNFIQQPDTMPIYLTQGITFLIPKDTECLSPDKYRPITCLQTLYKIITSCLSYLINDHITANNILAEEQKGCRKHSKGCKEQLTIDAVVMKQAVKSKGDISTMYIDYRKAFDSVPHSWLIHVLQIYKIHPKISVFLQSIMQNWRTNLRIKNGATVTQTTDISIRRGIFQGDALSPLWFCLAINPLSELLNRSESGFRFNGNNIQTTLSHLLYMDDIKLFSNNTESLHQLADVTHKFSRDIGMEFGINKCKTFTVCKGKIENNEYTTESGEIIEALGNNSLYKYLGFQQAKQINTKLTKNQITKQFRHRLNMIMKTQLNSRNLIKAINTYAISILSYSFGIIKWSQTELNNLQRIINTTMTQHRKHHPRSCIQRLILPRLEGGRGIINIKNLHNKQIKSLRKFFHLRAQHSILHQATTESDFRYTPLNLHDCQVQQNERITEPKELIAAWAEKSLHGRHRSDLLQPHVDKQASNAWLRHGDLFPETEAFMLAIQDQVIDTRNYKKHIIHDPNSSNDICRHCHDAPETIQHITGACKSIAQTDYKHRHDQVAAIIHQYLAHQHKFINEKNPYYKYQPKSILEDNYYKIYWDRSIITDKTVHSNRPDIVMHDKNNNVVYLIDIAVCNTHNLMNTYAQKIAKYTELSIEIKSQWHVGRVFTVPIVISSTGVIPKTLHKSLQLLNINPSTYILMQKAVILNTCRTVRKFLT

SEQ ID NO: 22869 - protein, 1361 aa, Junonia litoralis
MRSVGDGGLNRRVPLEQNTTADNHFSSPSSPTSSLFPSIASSPPSYMDHSNHSSPTLSASSPLSHQSFDGVVQKAVPAFISTPTVVKRCTRRKWTKDMNIFIIRTYLTITALETNTQNYLDQLHLKFTEQFPEIQVNKQRVGDQRRAIIRRQLLPAETLQVIKEEVEKEIQNFNSSPQNTTQSINNSQVQPHHTTQTSNNTIGTRNRMKWSNEINEAIMRSYYTITRLESNKTAYRRQLYENITQQFPQLSHFSEQRIADQRRVIVNNKLISNSRLHEIKQEVEHTLLTSNRTDQQTEPNRNSSFNTATNNFNSEDGIPNIIINGNMQDNPTLPDNTSNDLASQTILNNDKFLNTDITTLINNNFKNALDMYTNSNPTQRPFIPKQKTSRKLSYIIDYINTNILPKHLTIEQDFATLQTIIYCAAYTAAICNGSKIHHTSNNKKPHTKSIPKWQRRLKNKIENLRKDLGRLMQYSRGNRTPRIISHINRIKNRHRIHTQHEEPNITDSQFIDTVKQKLNVASSRLRRYLNCTLRKVQNKEFNSNEKQFYRQLDNNSNVGQTSNTPETVTMPQPEEFYQYWSHIWSNPIQHNHSAEWIKSLSNDGYHEMQFEHISLETLTTVINKTHNWKTPGTDHIHNYWYKKFTLVHPFLHKHINNFIQQPDTMPIYLTQGITFLIPKDTECLSPDKYRPITCLQTLYKIITSCLSYLINDHITANNILAEEQKGCRKHSKGCKEQLTIDAVVMKQAVKSKGDISTMYIDYRKAFDSVPHSWLIHVLQIYKIHPKISDFLQSIMQNWRTNLRIKNGATVTQTTDISIRRGIFQGDALSPLWFCLAINPLSELLNRSESGFRFNGNNIQTTLSHLLYMDDIKLFSNSTESLHQLADVTHKFSRDIGMEFGINKCKTFTVCKGKVENNEYTTESGEIIEALGNNSLYKYLGFQQAKQINTKLTKNQITKQFRHRLNMIMKTQLNSRNLIKAINTYAISILSYSFGIIKWSQTELNNLQRIINTTMTQHRKHHPRSCIQRLILPRLEGGRGIINIKNLHNKQIKSLRKFFHLRAQHSILHQATTESDFRYTPLNLHDCQVQQNERITEPKELIAAWAEKSLHGRHRSDLLQPHVDKQASNAWLRHGDLFPETEAFMLAIQDQVIDTRNYKKHIIHDPNSSNDICRHCHDAPETIQHITGACKSIAQTDYKHRHDQVAAIIHQYLAHQHKFINEKNPYYKYQPKSILEDNYYKIYWDRSIITDKTVHSNRPDIVMHDKNNNVVYLIDIAVCNTHNLMNTYAQKIAKYTELSIEIKSQWHVGRVFTVPIVISSTGVIPKTLHKSLQLLNINPSTYILMQKAVILNTCRTVRKFLT

SEQ ID NO: 22870 - protein, 1390 aa, Junonia evarete
MEGTNARYNLRPLPGGRRGASGANAGCHSMRSVGDGGLNRRVPLEQNTTADNHFSSPSSPTSSLFPSIASSPPSYMDHSNHSSPTLSASSPLSHQSFDGVVQKAVPAFISTPTVVKRCTRRKWTKDMNIFIIRTYLTITALETNTQNYLDQLHLKFTEQFPEIQVNKQRVGDQRRAIIRRQLLPAETLQVIKEEVEKEIQNFNSSPQNTTQSINNSQVQPHHTTQTSNNTIGTRNRMKWSNEINEAIMRSYYTITRLESNKTAYRRQLYENITQQFPQLSHFSEQRIADQRRVIVNNKLISNSRLHEIKQEVEHTLLTSNRTDQQTEPNRNSSFNTATNNFNSEDGIPNIIINGNMQDNPTLPDNTSNDLASQTILNNDKFLNTDITTLINNNFKNALDMYTNSNPTQRPFIPKQKTSRKLSYIIDYINTNILPKHLTIEQDFATLQTIIYCAAYTAAICNGSKIHHTSNNKKPHTKSIPKWQRRLKNKIENLRKDLGRLMQYSRGNRTPRIISHINRIKNRHRIHTQHEEPNITDSQFIDTVKQKLNVASSRLRRYLNCTLRKVQNKEFNSNEKQFYRLLDNNSNVRQTSNTSETVTMPQPEEFYQYWSHIWSNPIQHNHSAEWIKSLSNDGYHEMQFEHISLETLTTVINKTHNWKTPGTDHIHNYWYKKFTLVHPFLHKHINNFIQQPDTMPIYLTQGITFLIPKDTECLSPDKYRPITCLQTLYKIITSCLSYLINDHITANNILAEEQKGCRKHSKGCKEQLTIDAVVMKQAVKSKGDISTMYIDYRKAFDSVPHSWLIHVLQIYKIHPKISDFLQSIMQNWRTNLRIKNGATVTQTTDISIRRGIFQGDALSPLWFCLAINPLSELLNRSESGFRFNGNNIQTTLSHLLYMDDIKLFSNSTESLHQLADVTHKFSRDIGMEFGINKCKTFTVCKGKVENNEYTTESGEIIEALGNNSLYKYLGFQQAKQINTKLTKNQITKQFRHRLNMIMKTQLNSRNLIKAINTYAISILSYSFGIIKWSQTELNNLQRIINTTMTQHRKHHPRSCIQRLILPRLEGGRGIINIKNLHNKQVKSLRKFFHLRAQHSILHQATTESDFRYTPLNLHDCQVQQNERITEPKELIAAWAEKSLHGRHRSDLLQPHVDKQASNAWLRHGDLFPETEAFMLAIQDQVIDTRNYKKHIIHDPNSSNDICRHCHDAPETIQHITGACKSIAQTDYKHRHDQVAAIIHQYLAHQHKFINEKNPYYKYQPKSILEDNYYKIYWDRSIITDKTVHSNRPDIVMHDKNNNVVYLIDIAVCNTHNLMNTYAQKIAKYTELSIEIKSQWHVGRVFTVPIVISSTGVIPKTLHKSLQLLNINPSTYILMQKAVILNTCRTVRKFLT

SEQ ID NO: 22871 - protein, 776 aa, Alatina alata
MFANSNPTKCYSIPNWIPPYDCSKIPFEASCPSYKKITKIIKGMKTSGSPCPLDQISIICFKKCPYLRSYITKLIEVIWKTKRIPTCWRKTATILIPKIDDANHPQNFRPITLESVSFKIFTSVIRDRIYSFLLSNGYIENHIQKGFAHAISGTYEHIAHLTFILKQAKLKQRSVTITLLDLKNAFGEVNHNLINTVLAYHHLPPEIVKLVGTIYSDMYTTIATKKYITSYIKVSKGVLQGDCLSPLAYNMVMDTFVQHIKSEKFSELSYKFAEGFSPRHWYQFADDAVAVTGQERESQILLNAFQRWCSWSDMTIRSDKCKSFAIKKTGSKVKQFSPKLYINNKLIPAVEQDQSFKYLGKHFDFSMSEERHKTEVVNYVTTILSTIDQLPLHPRNKLLIYSRYLLTKISWHLTISELSKTWLDQNVDNLIKYYIRKWLEIPISATTDILFLSKKKFGLSLQTAGMKLEQCKVVFRKCLKTSKNKDLHKIHNLSSSGINCKYDSFNNTRDILKASRLSKELRIGSELTSQKLVISAFWEICSEKGRQQWYKVLEKLPKNIYNFCIRYINNSLPNATNMAKWMQTTNTQCPACGKRQTLGHVVAGCFVHLQEKRYNWRHDSVILNLVKSFPSSSNIRIYADLNTNEHTYLNPSIITGDEERPDIVLVKDNKIIVIEVTAGFETNIVSNRKRKAEKYKKLIERLKESSDVTFINLNIGSLGILDKGSENFFRELLTLNILEQDILFITRKLINICIRTTYFIFCRRDKDWPNPALLHF

SEQ ID NO: 22872 - protein, 1313 aa, Paraescarpia echinospica
MSSFHLREVAASPSAADANGVERSDELSGHGMNSDNATEAYVCELCKAPFYNPRGLSQHLRRMHAEYYHRANVPIFCKARWSREELVLLAREENRLVEAGCRTINITLIRKYRESRSADAIRCVRKNPVYKNLRDELRLAPLSEDELATTNKVSIDGTESTSSQPERVLHTDESADAAAPPVGTPRGREPDSVSGNDGRVCDGPPSPIEVGTPTGTTHYDRAARVVFSTPEPKSRKGPKNLWTEDMLRRMAAEDSRLAAIDCRCINQELLKLFPERTLNAIKAMRRLVKYKTIRDGVPAPAVPTRGHASTQVVACAVRGGSTPSSTQYVFNQEGVRGSTSAPPVEVNVSEGTGSTPPSPSMLDGPSLSTEVVHEEEVTVNRTFSSDLMTSPPCNPRLAYQAVAGSGEELDSPSVILPHVQADSPIMANANGFANWQEILFEELASNQLYLCGMDSTEVGDFVVGHLTNEQKAHIDDEYVAWLRAEQLAAPRRKGPRRRERRREARRNDAAGPAAVGGRRARRRAQYARVQKLYRKNRTACADQVLSGEWERDMTPGTTLDDQVFFWSRVFGEESCEDHRDPMAIGPVFWDLISPVTMQELCSTLRNTRSGAVGLDKISLSEVRALDPRALLAHFNLWLFAGYQPADFRRGRTVLIPKVAVPSGPGDYRPISISSYICRTFHRLLATRLSDLLEFSSRQRAFIKGDGLADNVFLLRCLLRDRCEDLKPLSVAFLDVSKAFDSVSHASLMLAARRMGVPGPFVEYLRSLYSDASTTLQVGDQFSDPLQQHRGVRQGDPLSPLLFNCIIDWAVSTLDTELGVRIGESGPRLNHLAFADDIVLLAESRVGIQNLCQRLSKALSKCGLSLNLEKSKTLRIAVDGKAKRWVCDPHPLVTLAGRSLPVVTISQCYKYLGISISAREADSTPEELLTRGLNHLTRAPLKPQQRLFMLRTNLIPKLHHRLVLSRSNCSVLKRLDKLIRRGLRSWLKLPHDTVNAYFHTEIKEGGLGVPSLRLTIPFMKAMRLARLSRSTDPAIVALATISSNFAKERFRCHSPPNRVGTEVVYDPASAKRALASSLHASVDGRGLRASSEVPSVNSWVTDGTALMTGASFIHAIQIRAGTVATKLRASRGRTGANTRCDACWRTESIGHILQVCPRTWGHRIMRHDTVLEKFLQRMEYRGWSVMRTPTIPVRGDSPQKPDAVLYSPTHCWVIDASVVADNAVLDDAHMSKCRKYDTPAVRDWCRSNRPSPDVSEGVLFGALIFNWRGAMSARSASMCRVLKLSQSDLKILSVCVVEWGWKIYRAFHRSTAWQ

SEQ ID NO: 22873 - protein, 1358 aa, Paraescarpia echinospica
MVSKIEDSNAEGRGGGRGGADCGVFGGRGGTTGVTVSTFKVVVVPQVSLSPPQGLGVSERLHAVQPGQLTLRKEVRPNVRSFTVGRGFSQQCRKRDFVLLLIFAMAFNLQEVAASLSAANVSGDERSGGPPGHGFDLAKGMFICEVCQIPYNTSRGLSLHMRAKHSEIYHRTNVPKFVKARWSREEMVIVAREEIRLARADCGSVNMALIRTFSDFRSADAIRNVRQNPIYREIRDRLYQDTTSVELEPEPAGDTSGSDPIIESGEGRADLDLSRGPPSPGHVVTPTRVTEGSRRGPMSRWEPVMLERMAAEERRLVAAGCTKLNMELLKMFPERTLHAIKAMRRLVKYKTLRDSGAAPTDLTPGHASQQEVACTPEVGGSTPAPEPLVFVVDEQLVVEDRGSTPASSPTGVDDLFASQQEEAEDSVNRAFSPTVSSPSCKPQSEMATAGVDGEQPIFTPPSSTQAETSVDSMVNQFAQWRGRLFNELVLTQGYLSGLDSTEICDFSVGQLSQQQKTRLDEEYTKWLAAEHLAAPRRKGPRRRERRREARREEATGPAAAGGRRARRRTQYARIQKLYHKNRTACADQVLTGEWERELTPSIPLEDQVFFWRTVFGEESCEDHRDPMTEGPVIWDLISPITIGELHATLRKSRSGAVGLDKISLSKLKELDPRALLAHFNLWLFAGYQPADFRRSRTVLIPKVSVPSRPGEYRPIAISSYVCRIFHRLLADRLSGHLEFGSRQRAFVKGDGIADNVFLLRSLLGDKCNSLKPLSLAFLDVSKAFDSVSHVSLMLAARRLGLPDPFIKYLRNLYTEASTTLQVGDRLSDPLPQNRGVRQGDPLSPLLFNCVIDWVVASLDRELGVNIGRNGPHINHLAFADDVVLMAESRIGIQRLCREFKEALGRCGLSLNLEKSRTLRIEVDGKAKKWVCDPNPLVRLGRSYLPVVSISNCYKYLGISLSAREVDSAPEEILSRGLNHLTRAPLKPQQRLFMLKSNLLPKLYHRLVLSRSNCSVLRRLDKLIRKSLRSWLRLPHDTVSAFFHSETREGGLGVPSLRLTIPLLKASRLERLSNSHDPAITALAACSRTFARERFKCWNPPLKVGEVIVNDSTSVKKQLAASLHGSVDGRGLRASGEVPSVNSWVSDGSALMTGANYIHSIQIRAGTVATKLRASRGRPGTDTRCDACWRTESLGHILQVCPRTWGHRIMRHDAVMEKFLRFTENRGWSVLRAPVISVRGGSPQKPDAVLYSRKCCWVVDASVVADNADLEDAFISKCVKYDTEAVRDFCRVNRPSLDVSGDVLFGALIFNWRGAMSAPSAKMCQAFALSLSDIKLLSVCVVEWGWKVYRAFHRSTAWQ

SEQ ID NO: 22874 - protein, 1781 aa, Araneus ventricosus
MKKLHDTWKVPSNLICLDDLSDNSSDAEKSDSTNDKVEGDMLSSSDIVPNGNEKLAVSGVEMDLPACSEKASENNDTLFIEMNDVKQKVSNQTGASLEKGDIPDLPPNPALSYLDTDQLITLRNMKTEQLSPLAPSADNLKYDELSPNNLSVEEQLKLTPSPGFIPAVTVESDNTPAKMPKVKYFPDSLRCSFCEQEMSSPRSYFEHVKEFLHYEASTPALASPTLCKRCGTCFGDEESLQSHTCSPLTNTFAGIEKGLLLPPHAVSVEEMMSLTTNFHSGLVGKENSSTPPGVSVEGGSGNSDSGSPSDFLCLTCNERFHSEAMFLQHPCLSQPLACETMVRCPRCNYYASSMDLLKIHLANFHSPLFSEPEEEVCNKKSPIPSDMNAMVLYNPFSLRNCLLPPSPGPNRNCPVCGFVVRAIHNAKVPGILSRHMRKKHSCPNCEFVEEENGLLGKHLRSCRPSTLVKRNPAVRNLENSFTPTLNVSRNLPSRGLVSVSDYSRGQNPLSPAHTCAGCQTKFTFAVLLDVHCARCDKFLQLVDDPSAFAKRRTLYSCNSCGFVGKGERELEIHLLNIHGSRLPAIPSSLGTTPSAPNDLPKTRCAFNVDFTVTPPVSQDQLDADDPPPHSGTQGNRPDNERIQALRPQSIPSDNCRIQDSVNIIFPFIGGLTCTEPDCAKHFLTKSWYSTRGDLVRHLKRDHKLAIAKTFYWCSVCKMHIAKNPTNHSCLRQTGTLVRPSVPLSWNCNLCADSFTTETGLRNHKNAHAKKSIIDSGPKLQVVTPVKTRRRGRLPQVEIPEGVNEVIDSNGINVTNDTPLDILTPPQTGQETEQSLLQVYIDDIATLIEEEPSAERFSFFCSLVEQAIEEVRISQLSTPAHVNTQRSKAKRVDPKDQKTIQPLFKKNRKRAVRIITGQEGEFCKINPQVLQPYFTNAWSHSDYAGGVFVPTTEARSQILEVPFSAKEVGRKLKDAENTSAGPDRLTYFHWKSLESSSLFLSTVFNACLHFRKIPPSWKLSSTILIPKAGNLNDPVNWRPIALSSTIYKLFTKCLASRLTQWLEKYDILSPCQKGFTPFDGVVEHNYVLQRSIELARKRKKDLCIAFLDISNAFGSLPHSTIIDALNACAVGPAFVDIIKDIYSGATTKVLSESGATDSIPILSGVKQGCPISGILFDICIDPVIREIQGSHSEHRILAFADDVCLLAPSVVELQAQLDRIDVLFNSLNLKLNPKKCVSFHLSGAKPAGARDTSFFIDRTRLTSLKDGEFTKFLGKPVGFNPCPNYSSLNDMYEAAKAVMESGLSQWMRIDALKSFIYPAFQFPMRTSQFPKKAWHSIDKALRKSIKQTLSLPERASNDYLYGHRKFGSYAIPILAEECELNRLDSAFKLLTSKDEKIKIMALEHLSSTVRARMQKDSVSDADLEAYLSATFHDNDNAFSNTFTCARIASSRLKVHWQFNDGAPTLKLEDLTIKPSDRKKVLFSLRDRFRTMRSNRLLLCPKQGKAMECVAKSTASTHFLFSGEYTSFAVYRFFGSARLDLLSLRGNQPWKKNTDMSCRGCDECDLETLPHVLNHCKGRSRAWTLRHNCVADRLKKALLTKGTLLAENQCVGPLGKRPDLVFQIGKEIYIIDVTIPFENRYESFERARQEKIDKYQHLVDQYAKDGVKATVVPIIVGSLGSWDPKNDKFLLKVMSKSYLNKFRKLCCSDVLEWSRKIFVEHVTGHRQFTDPARTSHLSTNVSTTNNATASTSGLADPLAASDFNTPTDSGSSPSTYAEIAASG

SEQ ID NO: 22875 - protein, 2012 aa, Araneus ventricosus
MSNCSNMKTISLLEPPAPSGTNSVLLSPPKPLATPLARVPKNCFVSIKDILLSPSPISSRTRQQLRERKTAKLVLSSPEKVSASIDYSVNLSPSILPLRSLSEDVSSTTSEAVMPLDLSPRRSWGVQQVASSSQGLNSSQLQDAPINLSSAIDGEKCDSIPDLKSVNSSAHSSKTCVSYAEIDKQIEKYANELVPVSTLHTPTSMYPPVSLINDMTVSAIRQLEVIESTFSLSVDDVLGKSECAQKSSSSSGVKSGSVKSNHRCPVCSSEFQTNLQLMVHECLDKVIVENSPSTILNGYSSAKNDDIGESELIKKVDSPPSTRDSVRTCPTCRSTFQNASLFGLHECQKSEKACLKCPSCEFVAKKRGGMRLHMKRAHNVWKPRHNLIQFSDEEPPSPSHGSSSIVHNESITSNGNIDSALSSNLPESELDLHSPARKTKYSSVLEKGNSPDIPLEEQLKLTPSPPYIPAITVELNKTPAKLQDVQYFPDSLRCSFCEKVLSSPRSYFAHVREFMHFERSSQAHGNPLSCDKCDKEFVSIEMFKNHNCNVLVPFGTQHRRCLFCEYLPTCLADRDEHELKFHAWLVGGASPRLPSSKSSDGLLPYTELNSPDGYDCLTCKGHFVNEAIFLQHPCKEPLPKRETPVKCLSCRYVANSKEIMVSHMHKMHPSGSATPVSPSADQNVINCGKCSFHCSSAEALDGHKCQIVEDSHGPLCTSPCRNCPTCRFVVRIKDNARVEDILLLHIDKKHTCQKCSFKETVCGQLKEHTKTCGPLRKNSAVRDLGSSLATFDPKTPSFSEMAKSSNSSSSSRRLPPNPGHVCSGCDMRFTFAFHLDIHCARCPAFLAKTDNPTSFKNRRPLFSCNLCGFICKNEKELHSHLMSTHGTSLPVHPSFANNIPALPAPLGPKGFSFDVGFSNTPPPSGEEPSVDDPPLSSRTPTVPLAQGPRISPVPCSIPQANCRIGNSINLIFPFSGGLTCTEMQCTKHFLTKSWYSTRGDLVRHLNRDHKIRILKSYYWCYLCYQHIPKNPSNHPCLKRSFLMSRPSDPLQWVCTTCTDSFSSEVGLRNHEIAHKKSEIANSGIQPNIIPPKKSRRRGKLPQVPAPDGVSEVIATPASSDAESIAANILTPPPTGEDGNESYHSILTLLSEEATDDNFHLFCEFVGNAIEEVRKNEISPPPASASQRDRSKRIDPKEPKLIQPLFKKNRKRAVRLITGNEGDFCKINPSILQPYFTTAWKHSTYGGGVYVPSSENRTPVLESPFTVGEIGKKLKEAENTSAGPDRLTYYHWKSIEDSGSFLCSVFKACVHFRKVPPSWKLSTTILIAKEGDPSDPGNWRPIALSSTIYKLFTKCLATRLTSFIDKYSILSPCQKGFTPFDGVVEHNYVLQRSLERARASHKDLCVAFIDISNAFGSLPHAAIIDALEACAVGPAFVDVITDIYTNSSTKVLSESGNTEYIPIMSGVKQGCPISGILFDICIDPVIREIQGTHSEHSILAFADDVCLIANSPQELQVLLDRIDVLFSALNLSLNPRKSVSFHLSGAKPTGSRNTSFYVRGNLLPSIQEGDFHKFLGKQVGFNPCPNFQSLNDLYAAAKAVMESGLAPWMRIDALKSFIYSAFQFPMRTSQFAKKHWDAIGKALRKGIKQTLSLPERASNDYLYGHRKYGCYAIPILSEECELNRIDSAFKLLTSKDTRIANMAFEHISSVVKARMRKSSVTDEDLEAYLSSTFNDNDNAYSNTWTCARIASSRLGVYWQFEEGVPKLKMEDLSIQASERKKVLFSIRDRLRTMRSNRLLLCPKQGKAMECVAKSKASSHFLFTGDYTSFAVYRFFGSARLDLLALRGNQPWKKNGDTSCRGCDECDLETLPHVLNHCKGRSRAWTLRHNVVVDKIERALSTKSIILAKNQAVGPLGKRPDLVVQIGKEVFIIDVCIPFDNRYESFDRDRQEKLDKYAHLIPHYSVNRCKASIIPIIVGALGSWDPKNDKFLSKHMTKSYLNKFRKLCCSDVLQ

SEQ ID NO: 22876 - protein, 1937 aa, Araneus ventricosus
MSNSPVLQTISLLEPPVPSNMNNVIISPPRPVCVSLPRRDLVACSVVIEDILLSPSPISSRTRRQLRERQTATISPDVSIQLAPRCLETSDFSSSVCSPSYPDLVSNDPKDLEIPLDLSPVRASELPLEICPISQRNGNNVSSCTNVDQLLELKLAECFEQLDVPPMDLMVRPRIHELTESNLEILRNLTVVESEVCLIANPVLETSPPTDSKSVGPESDNEYDYNKGIEDDKPSGPSCSDKKTALESLESEKEHVCLSVTVPKFDCHLCPFSGVKRSGLRLHLKKNHGIWKIPKQSNDLSENSSKCTVVAESATDPNNVNMSAPSAFSEDVSPGNMCFSSSKPTVKSSVVALDYSNKLTEDKNKLAPSSNMIPPVIIELDKSPATFKPVKYFPDSLRCSFCEQVMSSPRSYFEHVREFLHFEKSAPASFEDLLTVNSPPHSGLVTRCETLVSPPAPDEGVDNLPDDDSPSDFLCLTCNNRFPSEATFLQHECMSQSSLCETMVRCPKCTYFATSLDLMKIHLNTFHSPFFSDSEDEQVGRKSPVPNEMNALMVYNPLSIRNQLLPPSPGPNRNCPVCGFVVRAIHDSKVEKILHRHVVSKHSCQNCKFIEKANGQLADHARLCRKQTLGKSSSVVRNLVRSFEPAPGNISNMQMNNSDLSSGSNMNRLPPTPSHTCSGCNMRFTFAFMLDIHCARCEAFLRLSEDHSRLANRRVLYSCNKCSFIGKNEKELEIHLLNIHGIRLLGHEFSTGDPSSGSQAITDGRCSFNVDFTITPPASQDIVDPDDPPSLVVSHSSTASSNRVHSLLLKSIPAENCRIQDTLNIIFPFLGGLTCPEPECSKHFLTKSWYSTRGDLVRHLKRDHKLPIAKTFYWCSVCKLHIAKNPSTHPCIRQTGTLIRPTVPLSWCCSKCNDSFTTETGLRNHLNAHRNSEILQSGVQPSIVPPTKTRRRNRPPQVEVPDGTNETIADPTIQNQSEDIPDLLTPPLTGEESENSLLRAYIDDISVIIDEDPSDSNFTYFCSLVEQAVEEVRISEVSAPVHSASQKSRPRNIDPKDQKVIQPLFKKNRKRAVRVITGQEGDFCKIPSNVLHPYFEKVWSRSDYDGGVFVPTSEVRSPILELPFTVQEVAKKLKDAENTSAGPDRLTYFHWKSVEGAASFLCNVFNACIHFRKIPPSWKNSTTILLPKSGDPNLPANWRPIALSSTIYKLFTKCLAARLTNWIEKFEVLSPCQKGFTPFDGVIEHNYVLNRALEDARKKRKDLCVAFLDISNAFGSLPHSAIFDGLTACGVGPAFVDIIMDIYTGSSTKVLSESGATENINILSGVKQGCPISGILFDICIDPVIREIQGSHSGHRILAFADDICLLAPSAIELQVMLDRINQLFESLNLKLNPAKCVSFHLSGIKPAGVRDSAFYINGTRLVSLKDGEFHKFLGKPIGFNPCPNYKSLNDLYQAAKAVMESGLSQWMRIDALKSFIYPAFQFPMRTSQFAKKHWHEIDRALRKSIKQTLSLPDRASNDYLYGHRKYGSFAIPILAEECELNRIDTAFKLLTSKDEVIKAISLEHLKATVRARMQKSSVSDEDLEAYMSATFSDNDNAFSNEFTCARIASARLKVHWQFDEGVPKLKHENISINASERKKVLFALRDHFRTGRSNRLLLCPKQGKAMECVAKSRASTHFLFNGDYTSFAVYRFFSSARLDLLSLRGNQPWKKNVDMSCRGCDECDLETLPHVLNHCKGRSRAWTLRHDCVCNRLVKALLPKGKIIARNQDVGPLGKRPDIVFQMGKEIFIIDVTIPFENRYASFESARKAKLDKYEHLVEFYSTNGFKASVVPILVGALGSWDPKNDKFLLKVMSRSYLKKFQRLCCSDVLQWSRDIFIEHVTGHRQFVDPSAASSRRATNVVNPSVPVVASNNSVDSSLVSVAGTSRSTYAAITAM

SEQ ID NO: 22877 - protein, 2051 aa, Araneus ventricosus
MSNCSNIETISLLEPPAPSGMNSILISPPKPLAKPPLRGQNCFVTIKDILLSPSPISSRTRQQLRERNTAKLVFSPSGKVSASSVHNVDHLSAAPPLKSLSEDVSPSLCEHVMPLDLSPKRTCGVQQVASSVQGPTSIQLQDTQMDLSSDIDGANLESIPNLKSTSTSDYSHSTRVSNAEIDLQIEKYANDLIPVNTVNTSTSLLPPVSLVNEVTVSEIRKLEVTESPFSLSVDDAAQKSECDLKGSFSDGVQSGSVKSHTKCPTCLAVFQTNLQLMVHECLDKMAVENSSSTNLNGSSSSKNDDIGESGINPKVDSHSSTRDSAFVCSICRSSFQNASLFGLHDCQKSEKATLKCSSCDFVAKKRSGLRLHKKRVHNTWKTGHNLIQFSDEETPSPSNGTSSNSNNVPSTPISSIGPVLSSNLPEIEFNLHSPVRETMQCSIMERGNSPDIPLEKQLELTPSPPYTPAVTVELNKTPAKIQDVQYFPDSLRCSFCEKVLSSPRSYFAHVREFMHFERSSQAHGNPLSCDKCGKEFCSSEVFKGHNCNVLVPFGTQHRRCLFCEYLPTCLADREEHESKFHAWLVGNVNPRLPSIKSSDNIIPQNELNSPDGYDCLTCKGHFSNEAIFLQHPCKEPLPKRETPVKCPSCRYVANSKDILVSHINKMHPSGPATPVSPSADLNIITCGKCSFQCSSTEALNGHKCQNADVSLSSPCASPCRNCPTCGFVVRTKNNARVEDILLLHIDRKHTCQNCSFKEVVCGQLRDHAKSCGPLRKNKAVRDLGNSLATLDSKKPSYSEIAKSHNSSSSSRRLPPVPGHVCSGCGMRFTFAFHLDVHCSRCPAFLARIDDPASILNRRPLFSCNLCDFIGKNENELRYHMLSSHGTSFSLLPSSESNTPALPASVDHKVLSFDVGFGNTPPPSGVEHTVDDPPMSGRTPNAPLAQGPKITPVPNSIPQANCRIGNSINLLFPFSGGLTCTELQCSKHFITKSWYSTRGDLVRHLNRDHKIRILKTYYWCSLCFQYIPKNPSNHPCLKRSFLMSRPSDPLQWACTTCSESFSSEVGLRNHVIAHKKSEIANSGVQPNIIPPKKSRRRGKLPQVPAPDGVAEIISTPASADADTIAANILTPPPTGEDGTESYLKPFTDSILTLLSEEATDDNFHLFCEFVGNAIEEVRKNEVSPPTTVSSQRGRPTKIDPKEPKLIQPLFKRNRKRAVRLITGNEGDFCKISPSILQPYFTTAWEHSTYSGGVFVQSTENRSPVLESPFTVGEIGKKLKEAENTSAGPDRLTYYHWKSIEDSGSFLCSVFNACVHFRKVPPSWKLSTTILIAKDGDPSDPGNWRPIALSSTIYKLFTKCLATRLSSFIEKYSVLSPCQKGFTPFDGVVEHNYVLQRSLEQARASHKDLCVAFIDISNAFGSLPHAAIIDALEACAVGPAFVDVITDIYTNSSTKVLSESGNTEYIPIMSGVKQGCPISGILFDICIDPVIREIQGTNSEHSILAFADDVCLIAKSPQELQDMLDRIDVLFSALNLSLNPRKSVSFHLSGVKPTGSRNTPFYVKGNLLPSIQEGDFHKFLGKPVGFNPCPNFQSLNDLYAAAKAVMESGLAPWMRIDALKSFIYSAFQFPMRTSQFAKKHWDAIDKALRKGIKQTLSLPERASNDYLYGHRKFGCYAIPILSEECELNRIDAAFKLLTSKDTRIATMAHEHLSSVVKARMRKSTVSDEDLEAYLSSTFNDNDNAYSNTWTCARIASSRLGVYWQFDEGVPKLKMEDLSIQASERKKVLFSLRDRLRTMRSNRLLLCPKQGKAMECVAKSKASSHFLFTGDYTSFAAYRFAGSARLDLLALRGNQPWKKNGDTSCRGCDECDLETLPHVLNHCKGRSRAWTLRHNVVVDKIERALSTRGVILAKNQAVGPLGKRPDLVVQIGKEVFIIDVCIPFDNRYESFDRARQEKLDKYAHLIPHYSVNGCKASVIPIIVGALGSWDPKNDKFLLKHMSKSYLNKFRKLCCSDVLQWSRDIFVEHVTGHRQFTDNSNSSRSAVAAGSASNN

SEQ ID NO: 22878 - protein, 1522 aa, Araneus ventricosus
MHFERSSQAQDNPLSCEKCEKEFSSIEVFKSHNCNVLVPFGTQHSRCLFCEYLPTCLADRDEHESKFHAWLVGSVNPRLPSNKSSDTILPQNELNSPDGYDCLTCKGHFVNKAIFLQHPCKEPLPKRETPVKCMSCRYVANSKEILVSHMNKMHPSGPASPVSPSADQNIINCGKCSFQCSSTEALNGHKCQNVDVSLGPPCTSPCRNCPTCGFVVRTKDNAKVEDILLLHIDRKHTCQKCSFKEVICGQLKDHAKTCGPMRKNSAVRDLGNSLATLDNKKPSCSEIAKSYNSSSSSRRLPPVPGHVCSGCDMRFTFAFHLDIHCARCPAFLAKIDDPSRFMNRRPLFSCNLCDFIGKNEMELHSHLMSYHGTSFPVPSSSANNIPALPASVGPKVFSFDVGFGNTPPPSGEERSVDDPPPSGRTPTVPLAQGPKISPVPDSIPQANCRIGNSINLLFPFSGGLTCTELQCTKHFLTKSWYSTRGDLVRHLNRDHKIRILKTYYWCSLCFQYIPKNPSNHPCLKRTTCSESFPSEVGLRNHEISHKKSEIAKSGVQPNIIPPKKSRRRGKLPQVPAPDGVTEVITTPASVDADAIAANILTPPPTGEDGNDSYLKPFTDSILTLLSEEATDDNFHLFCEFVGNAIEEVRKNEVSPPPAFASQRGRPTRIDPKEPKLIQPLFKKNRKRAVRLITGNEGDFCKINPSILQPYFTTAWEHSTYSGGVYVPSTENRSPVLESPFTVGEIGKKLKEAENTSAGPDRLTYYHWKSIEDSGSFLCSVFNACVHFRKVPPSWKLSTTILIAKDGDPSDPGNWRPIALSSTIYKLFTKCLAARLTSFIDKYSVLSPCQKGFTPFDGVVEHNYVLQRSLERARASHKDLCVAFIDISNAFGSLPHAAIIDALEACAVGPAFVDVITDIYTNSSTKVLSESGNTEYIPIMSGVKQGCPISGILFDICIDPVIREIQGTNSEHSILAFADDVCLIAKSPQELQVMLDRIDVLFSALNLSLNPRKSVSFHLSGVKPTGSRNTPFYVRGNLLPSIQEGDFHKFLGKPVGFNPCPNFQSLNDLYAAAKAVMESGLAPWMRIDALKSFIYSAFQFPMRTSQFAKKHWDAIDKALRKGIKQTLSLPERASNDYLYGHRKYGCYAIPILSEECELNRIDSAFKLLTSKDTRIATMAFEHLSSVVKARMRKSSVTDEDLEAYLSSTFNDNDNAYSNTWTCARIASSRLGVYWQFEEGIPKLKMEDLSIQASERKKVLFAIRDRLRTMRSNRLLCPKQGKAMECVAKSKASSHFLFTGDYTSFAVYRFFGSARLDLLALRGNQPWKKNGDTSCRGCDECDLETLPHVLNHCKGRSRAWTLRHNVVVDKIERALSTRGVILAKNQAVGPLGKRPDLVVQIGKEVFIIDVCIPFDNRYESFDRARQEKLDKYAHLIPHYSVNGCKASIIPIIVGALGSWDPKNDKFLSKHMSKSYLNKFRKLCCSEVLQWSRDIFVEHVTGHRQFTDNSNSSRPAVTAGSASNN

SEQ ID NO: 22879 - protein, 1315 aa, Araneus ventricosus
MSCRYVANSKEILVSHMNKMHPSGPASNVSPSADQNIINCGKCSFQCSSTEALNGHKCQNVDVSLGPPCTSPCRNCPTCGFVVRTKDNAKVEDILLLHIDRKHTCQKCSFKEVICGQLKEHAKTCGPMRKNSAVRDLGSSLATFDNKKPSYSEIAKSFNSSSSSRRLPPVPGHVCSGCDMRFTFAFHLDIHCARCPAFLAKIDDPTSFMNRRPLFSCNLCDFIGKNEMELHNHLMSNHGTSFPVLSSSANNIPALPASVGPKGFSFDVGFGNTPPPSGEEPSVDGPLPSSRTPTVPLAQGPKISPVPNSIPQANCRIGNSINLLFPFSGGLTCTELQCTKHFLTKSWYSTRGDLVRHLNRDHKIRILKTYYWCSLCFQYIPKNPSNHPCLKRSFLMSRPSDPLKWACTTCSESFPSEVGLRNHEIAHKKSEIAKSGVQPNIIPPKKSRRRGKLPQVPAPDGVTEVITTPASADADAIAANILTPPPTGEDGNDSYLKPFTDSILTLLSEEATDDNFHLFCEFVGNAIEEVRKNEVSPPPASSSQRGRPTRIDPKEPKLIQPLFKKNRKRAVRLITGNEGDFCKINPSILQPYFTTAWEHSTYSGGVYVPSTENRSPVLESPFTVGEIGKKLKEAENTSAGPDRLTYYHWKSIEDSGSFLCSVFNACVHFRKVPPSWKLSTTILIAKDGDPSDPGNWRPIALSSTIYKLFTKCLATRLTSFIDKYSVLSPCQKGFTPFDGVVEHNYVLQRSLERARASHKDFCVAFIDISNAFGSLPHAAIIDALEACAVGPAFVDVITDIYTNSSTKVLSESGNTEYIPIMSGVKHGCPISGILFDICIDPVIREIQGTNSEHSILAFADDVCLIAKSPQELQVLLDRIDVLFTALNLSLNPRKSVSFHLSGVKPTGSRNTPFYVKGNLLPSIQEGDFHKFLRKPVGFNPCPNFQSLNDLYAAAKAVMESGLAPWMRIDALKSFIYSAFQFPMRTSQFAKKHWDAIDKALRNGIKKTLSLPERASNDYLYGHRKYGCYAIPILSEECELNRIDSAFKLLTSKDTRIATMAFEHLSSVVKARMRKSSVTDEDLEAYLSSTFNDNDNAYSNTWTCARIASSRLGVYWQFEEGVPKLKMEDLSIQASERKKVLFSIRDRLRTMRSNRLLLCPKQGKAMECVAKSKASSHFLFTGDYTSFAVYRFFGSARLDLLALRGNQPWKKNGDTSCRGCDECDLETLPHVLNHCKGRSRAWTLRHNVVVDKIERALSTGVSSLPKIRPLVHLAKDLILLCKLGRKSSLSMCAYPLTIGMRASIEPDKKNLINMLT

SEQ ID NO: 22880 - protein, 1190 aa, Osmia lignaria
MELFMLWVHNYLKKKKMESESDEASDAGAPDPGTPVAEYSATDRRVFDDEPGTSNDNENEQIIILPLSNTIICSVCGDVGQQKHFLNDKDFLKHAQTAHSRLKIKWCCHYCRKEYVRPQALKCHIPKCKGVVQSVQKEYKCGSCDASFDTKRGLSTHERHRHPGVRNEARAKATAPGTKKKRRCPVWTDEETALLRVLNERFKNVKQINAEIIKYMPNKTLKQISDKRRILTPDVTTVETRIEAGPENSLELDENPPNEEDNAQLEEEENEQTWKERLKESIQSSPPPDNPELLVINDRIKEIACIENQEVNENDNNEIEKIIKILTDTLKSQQDEEEQKNDEETDDTCNRRNNQRLNNYRKRDKHNERPKKPGNNNNKIDRDRVNERNRFNKYRYARFQELYKKCPKKLVDMAVLDISIENNKKNTNTNCTELPAKEEIEKCYSELWGVTGSDEGLPRLKDLIRAPTIPINEIYPPITDENIIEKMKKIKANTAPGVDGLRKLHLRRKGAVQVLANLYNLLILKQYYPKCWRINRTVLIPKPNKDPKDIKNWRPLTIGSIVSRIFSAMIDNRLRVKIEQSLRQKGFTKEDGCKQNVALLGASIAQMKQQKGGIITVVDIAKAFDTVPHSAIEDCLKLKGVPRRMAQYIRKAYIACETKIKTKNSEINIAVNRGVKQGDPLSPLIFNLIIDPIINHINQQTKGIKIGNNNISILAFADDMVLLAENKKEAEKQVQVLSKYLIRLGMNIAASKCSAFEIVSKNKTWYIQNPGLNVNGEPIPDTRPDEILNYLGAGIDVWRGSMQPHRIEVILGVAENIARMKLKPYQKIELIKTYMLPRFIHKLVISHPPIKTLKEIDNGLRQIVKKILHLHPSTTDGIIYSSKSHGGLGVQRVENIVKLAVIRNMIKMSESADEVVREVAGDLEEIGIKYANSIELAWPTTMEELDNVRIKLKKGETQRWLQLISQGQGVADYRGDKIGNYWLHNPTLLKSSRYLDALKLRTNTFGTRMVLSRANKQHDTKCRRCNMQFETLGHVLGSCIHTKPKRIKRHDEIKNFIADKVSKNCTVFIEPTVNVLGELKKPDLVIKDQDRLMIVDVTVRYEYKDNLRNAFTDKIRKYRETAEYIRLKLGCVKASVMPIVIGSRGIIPRETIKNAKELGLTKNDMITLSMITLRSSIELANAFIDYDTIR

SEQ ID NO: 22881 - protein, 1055 aa, Sinonovacula constricta
MTLTGEVATSVCVCGKVCKNVRGLRIHQARSKSCSAGNQIRRTEFSSGKTVEVASQDQTHSTSDVFVDDVQQDRSPMAQESRGTQQNATDPQHKDRILWPKGHEKAVWRKFDEDFEVILNSVLQGPAERRINTLTTMVYNIGKERFGVQQKKGSSQPPRENRREREIKNARKELNSLKRRFRKAPETERIGLQQLREDLRGKLKRLRKAERLRTGRKSRAKKRAQFVKDPFKFTRTLLSDECSGRMESTQEEIQQHLHRMHSDPDRDVPLGNCPRVDEAPLPSVPFDMQEPSWKEVKEVVRKARAGSAPGPSGITYSVYKQCPGLLRRLWGLIRILWKKGLIPESWKRAEGCFIPKEKESRTVEQFRTISLLSVECKIFFAVMAKKLTTYLTGNKYVDTSSQKGAIPGFSGCIEHTSVLSKMMREAKTEKGDLSVVWLDLTNAYGSIPHKLMEEALHHYHVPEHVQTMISQYFSGMKIRFTAGSTITAWQDLEKGIVTGCTVSPILFIMGMNIIMKAGERETRGPRMKSGSYQPVLRGFMDDLTVTTTSIVQARWVLNALDDAVTWARMKFKPKKSRFAVIKKGCLIRNVTMRIQGEEIPQLVDNPVKALGKWYDDSLGDHRNVDNIKTLASTWLTKVDKSGLPGKYKAWIYQHGILPRLSWHLTLYEIPMSMVEALEKKVNQKLRRWLGVPQSFCSIGLYSRPCQLQLPLSSVVEEFKVAKCRLVLTLRESADAKVREAGVVTRSGRKWAACSAVAEAESSLQLKDVIGNTCIGRQGIGMSQFKEWNKAQGKATRDLVLGEVRKEEEQKRRSKAVELGKQGAWTRWNLPERQVSWPELWKLEPARISFLLRSVYDTLPSPANLHTWGLIEDPSCHLCGGRATMAHILSGCKTALQQGSYRWRHDQVLAVLADNFEKERKQKRAVGGKQHSIQFVKAGQTKTTTQGGQLGLLHQAASWEMKADLRKKLVFPDVVQTSLRPDIVLWSEVSRKIIMIELTYPGRMLARRPMRERVPNMQSWQTPADRKDGVLGFFQSRWGPEVFQHSLSGECTRRLA

SEQ ID NO: 22882 - protein, 982 aa, Chrysaora quinquecirrha
MFKTKAGRSIHIRSQHPDIYHSTNLPNPRIKARWNREEIYLLAKAEARMSLSNVRFLNQELAKEFTDRTIESIKGARKKADYKAQVKEIIQELNSPEALHQEVTSEELDSDHESENQQKSWHELLKDNIYPSRVNVNLDSIRPGCPNSTTRKLIDDDFDNWLKTLNIPTKTGRPKRNPSKLSSNKKKRRRQLYAITQRAYKNDRSRCADEILSGEWKIEKEVPLTLEEMENPWRDIMEKPSKKDSRSPTPVAPISWSLLQPITATLVSDTIKATSKSAPGPDNITLKAVRSINAEDLASRYNLWLYASYQPKNLRSGSTIFIEKEANTKDPLKHRPITIASFIIRILHKIIGKRLAHQIPWNIRQKGFMDGDGIAENLMLLRSIIKNHQQELLPLNAVFIDVKKAFDSVSHESVIKAAYRLGVPTPLLTYIREFYNDSSTVFVINGKTSEKVSTTRGVRQGDPLSGYLFNMVVDWALEELDPAVGINLNESKISSLAYADDVVLFSSTPRGLQQQLTAFCNHLNNSGLDISAGAGGKSASLRIVIDGKKKKYIVNPHPFLRIDDQEIPSLSASTSYKYLGIKISSLGTKTNTKKLLDIGLQNLTQAPLKPQQRLYILNSHLLPKLQHQLILADVSQSILKWMDKSIRSATRKWLRLPKDTPIAYFHASASDGGLQIPYMSCLIPLQRRNRIEKMMSSSDPAVRAAIMTKQFQNIYDQSLKPLKLWNREDVTSKASLRNELRASLIKSNDGRGLTSHRQVNIHGWVTNGTSIMKGSMFIGAIQLRGNLLPTQCRLARGRPARSVSCDACLKPESLGHILQQCPRTHATRVKRHDKIVSYIFNNLDQRRFETMREPPIPTPAGLRKPDLVVLDRETMISYVIDITICADNTDDIDDVRQRKITYYNTTAVSTWIMDKQKSSSVLFDAVVFNWRGAIAPLSKNLLKYILKFGSHHIELMSIITLEWGFMCWLAFKKSTFILDTSF

SEQ ID NO: 22883 - protein, 982 aa, Chrysaora chesapeakei
MFKTKAGRSIHIRSQHPDIYHSTNLPNPRIKARWNREEIYLLAKAEARMSLSNVRFLNQELAKVFTDRTIESIKGARKKADYKAQVKEIIQELNSPEALHQEVTSEELDSVHESENQQKSWHELLKDNIYPSRVNVNLDSIRPGCPNSTTRKLIDDDFDNWLKTLNIPTKTGRPKRNPSKLSSNKKKRRRQLYAITQRAYKNDRSRCADEILSGEWKIEKEVPLTLEEMENPWRDIMEKPSKKDSRSPTPVAPISWSLLQPITATLVSDTIKATSKSAPGPDNITLKAVRSINAEDLASRYNLWLYASYQPKNLRSGSTIFIEKEANTKDPLKHRPITIASFIIRILHKIIGKRLAHQIPWNIRQKGFMDGDGIAENLMLLRTIIKNHQQELLPLNAVFIDVKKAFDSVSHESVIKAAYRLGVPTPLLTYIREFYNDSNTVFVINGKTSEKVSTTRGVRQGDPLSGYLFNMVVDWALEELDPAVGINLNESKISSLAYADDVVLFSSTPRGLQQQLTAFCNHLNNSGLDISAGAGGKSASLRIVIDGKKKKYIVNPHPFLRIDDQEIPSLSASTSYKYLGIKISSLGTKTNTKKLLDIGLQNLTQAPLKPQQRLYILNSHLLPKLQHQLILADVSQSILKWMDKSIRSATRKWLRLPKDTPIAYFHASASDGGLQIPYMSCLIPLQRRNRIEKMMSSSDPAVRAAIMTKQFQNIYDQSLKPLKLWNREDVTSKASLRNELRASLIKSNDGRGLTSHRQVNIHGWVTNGTSIMKGSMFIGAIQLRGNLLPTQCRLARGRPARSVSCDACLKPESLGHILQQCPRTHATRVKRHDKIVSYIFNNLDQRRFETMREPPIPTPAGLRKPDLVVLDRETMISYVIDITICADNTDDIDDVRQRKITYYNTTAVSTWIMDKQKSSSVLFDAVVFNWRGAIAPLSKNLLKYILKFGSHHIELMSIITLEWGFMCWLAFKKSTFILDTSF

SEQ ID NO: 22884 - protein, 781 aa, Habropoda laboriosa
MTGMPSCPRVERQPGTRGPFARGIHLEGVGASADAEGPDTGSPPPQGGCGKASLWMSITPSDVDRQSVRAGSAPGLDGVSPRLWNSVPTVLRALLYNLLLLAREVPDCMSRTRTVFLRKSDRPRPSDYRPLSIGSVPLRQLHRILAGRLSKLNIFDERQRGFRAVDGACENITVLSAALHEARRKCRSLHMACVDVSKAFDTVSHKAIFNQRPYATRLHPVLYSGAETILDLPGLDGSAVSIGRGVRQGDPLSPQLFNLVMDRALGALSEDVGFSMGSGRVNALAYADDVMLLSSTSNGLQVNLQRLQNAFSRCGLEINAKKTWVMSLVASGREKKVTVVKDPTFRLGETTLRPKSPTDAWTYLGALYEGARVNPTPPALAPALGLLSRAPLKPQQRLKMLRDHLLPRFYHRWVLGPITAKALKRFDVQVRTAVRTWLRMPHDVPAGYFHAQTREGGLGLPILSKVIPILKFQRLQRLCRSTLPPARAAAETPFVARQLVWCENQFRYGGVRVSTTAELGNSCAAGLHGSCDGKGLRESGASRLSTHWVYEGSSCIPGADYVHYHHVRANCLPSRARVSRGRSGRDVRRRAGCPDIETPAHCVQRCFWTHGGRILRYNDLCRRVAGFLREKGWQVDEELSYSTAAGQRRPDLTIARQGVAVIVDAQVVSSETALTIAHTRKVEKYEQEPGLRERVAGHTGVLPENVGFSAITISWRGVWSPQSEAELRHLGLTTSQLRTLTTRVLWGSWMNWRRFNAITSRYCPTRTRTSGRIAPVGRRDE

SEQ ID NO: 22885 - protein, 1282 aa, Coccinella septempunctata
MLRPVYGRSIIQDAIVYGPKTMYGRNIVCWINIYIYIYIYIYIYIYIYIYIYIYIYIYIYIYIYIYIYIYIYIYIYTQGSVMLSGTDGPAYPSRPTSKVSSLEVDVIVAPIITRSMKQGGRGQRAGPLRSRLEEEPDGVSCGASGAAPRDGTVSQILQPLRRERRSISLDGIRTRPAEDPYRQDGRTRWNEEENILLLRVHYIAKDLELNRNANYRQALTNTWNDLNPLKQSYANLLSNRVRWLLNNEKFTETELFNIKLSCYPRGAVVDHNENSAEEAPAPTPLAVENTPKAGRLERALIKNYLLYAGLPPESRPRIPRLKGSKVMLQKVKDLNDIMQTNLLTTWKLENVVDYVYAGAITICSELGIEIKNTQPKKKEAPPPWKHRLEKKINDMRKNIGIIHTYLNSEAPSKRVEKLTRRIASAFKIKARNNRFRESVTEIYDRLKQKIKVLGSRLQRYNERIKRYQNNQLYYRNKQQFFRLLEQEITDDGSAPTEESMHSFWSKIWEEDKKHDDRAHWIRDAEAESAKFQMEDINITTEHIRTALKKTNNWSSPGVDKIQNYWWKHFTASHEHLARLFRETLTDPTRIPEFFTLGVTHMLPKGINTTDPKKYRPITCLPTIYKILTGVLTSHIWQHVNKNNIMEQEQNGCRGNSRGCKELLITDLIVTRQAKKKQRNISMAWVDYQKAFDSVPHTWLIKTLQLYGISRPIINLLEHLMKTWRTQLVVNTKQENYKTAVIRIRRGIFQGDTLSPLWFCLALNPLSRLLKNQIYGYILQKARNIKINHQFYVDDLKLYAANEEQLKKQLRIVAAFSKDIGMELGIDKCAVVHVKRGRVQEGTGLSVMEDLTIPQLGKQESYKYLGVQQALDIKTTEMKNTYKEKFLNRLKKVLQSRLNSKAMFEAVNIWAIPCIAYSFGVIKWSNSELKEIDKRARALLTKQGIHHPHASMNRLYVPRHEGGRGLQNLEIVHDRTVRSMREYFQKKNSPFHRAVCQEDNNLSPLNLAGHLEPARLTTEMLIQEWHSKALHGRYPGCLKNNQVKKKESLTYLTAGYLFPETEGRLIAIQDQVVPTRSYIKNITGRNIPTDKCRKCSQVTESIQHVTSSCSVLAPVDYMQRHNAMAKVYHQAIAKKYGLITKTVKPFEYCPNNILENEGYKLYWDNFITTDRPIQHNRPDILLFKKKERTIEILDVAIPADDNIQKAFVEKLTKYHDLAFEMKTMYGLKSTSIVPLVMSTNGLVETHLVDNTLNLGLDKELVSTAQKEVILANTKIVRKFLTSV

SEQ ID NO: 22886 - protein, 1201 aa, Coccinella septempunctata
MLSGTDGPAYPSRPTSKVSSLEVDVIVAPIITRSMKQGGRGQRAGPLRSRLEEEPDGVSFGASGAAPRDGTVSQILQPLRRERRSISLDGIRTRPAEDPYRQDGRTRWNEEENILLLRVHYIAKDLELNRNANYRQALTNTWNDLNPLKQSYSNLLSNRVRWLLNNEKFTETELFNIKLSCYPRGAVVDHNENSAEEAPAPTPLAVENTPKAGRLERALIKNYLLYAGLPPESRPRIPRLKGSKVMLQKVKDLNDIMQTNLLTTWKLENVVDYVYAGAITICSELGIEIKNTQPKKKEAPPPWKHRLEKKINDMRKNIGIIHTYLNSEAPSKRVEKLTRRIASAFKIKARNNRFRESVTEIYDRLKQKIKVLGSRLQRYNERIKRYQNNQLYYRNKQQFFRLLEQEITDDGSAPTEESMHSFWSKIWEEDKKHDDRAHWIRDAEAESAKFQMEDINITTEHIRTALKKTNNWSSPGVDKIQNYWWKHFTASHEHLARLFRETLTDPTRIPEFFTLGVMHMLPKGINTTDPKKYRPITCLPTIYKILIGVLTSHIWQHVNKNNIMEQEQNGCRGNSRGCKELLITDLIVTRQAKKKQRNISMAWVDYQKAFDSVPHTWLIKTLQLYGISRPIINLLEHLMKTWRTQLVVNTKQENYKTAVIRIRRGIFQGDTLSPLWFCLALNPLSRLLKNQIYGYILQKARNIKINHQFYVDDLKLYAANEEQLKKQLRIVAAFSKDIGMELGIDKCAVVHVKRGRVQEGTGLSVMKDLTIPQLGKQESYKYLGVQQALDIKTTEMKNNYKEKFLNRLKKVLQSRLNSKAMFEAVNIWAIPCIAYSFGVIKWSNSELKEIDKRARALLTKQGIHHPHASMNRLYVPRHEGGRGLQNLEIVHDRTVRSMREYFQKKNSPFHRAVCQEDNNLSPLNLAGHLEPARLTAEMLIQEWHSKALHGRYPGCLKNNQVKKKESLTYLTAGYLFPETEGRLIAIQDQVVPTRSYIKNITGRNIPTDKCRKCSQVTESIQHVTPSCSVLAPVDYMQRHNAMAKVYHQAIAKKYGLITKTVKPFEYCPNNILENEGYKLYWDNFITTDRPIQHNRPDILLFKKKERTIEILDVAIPADDNIQKAFVEKLTKYHDLAFEMKTMYGLKSTSIVPLVMSTNGLVETHLVDNTLNLGLDKELVSTAQKEVILANTKIVRKFLTSV

SEQ ID NO: 22887 - protein, 1144 aa, Coccinella septempunctata
MLGVNFQVGLKSRLYSLLYTENFRMRRSISLDGIRTCPAEALRRDGRTRWNEEENTLLLRVHYIAKDLEHENNRNYRQILTNIWNEINPQKQSYTNLLANRVRWLLENEKFTETELHNIKLSCYPRGASFDPNHIEENVPIQVPESPEQRMSTAGKLERAILKNYLLYAGMPPENRPRIPRMKGSKNMSKRVQETNEILKRILPTTCKLEDMVDFVYAAAITVCTELGMRIKEVLPKKDERPPPWKCRLEKKINEMRKNIGILHTYLNTASPTSRVEKLTRKIASEFKIKARSSNFKECIIVINDRLKQKIKALGSRLQRYNERVKRYKNNQLYYTNKQKFFRRLEQEFSEVQNAPTEAAMYQFWKGIWEEERTHDDMAHWIGSAEVDSTKYHMEDINISEIDIREALKKTSNWSAPGVDKIQNYWWKYFTATHNPLAELFRGALLDPTKIPYYFTLGISHMLPKANNNTMDPEKYRPITCLPTIYKILTAVLTRHIWKHVNKYDILARQQGGCRRDVRGCKELLITDLIITKYAKKKQRNISVAWIDYRKAFDSVPHSWLIKILQLYGISQQVITILEHLMKTWRTQLVINNSRTNYKTAEIKIKRGIFQGDTLSPLWFCLAMNPLSRLLNNQTYGYVVKKAPMKKINHQLYVDDLKLYAANEEQLRKELRIVAEFSKAIGMELGIEKCAVLHVKRGRVQGGTSMSVMEDLALPELGIEESYKYLGVQQALDIRATDMKNALKEKFFNRLKKVIQSKLNSKSMFEAINIWATPCIAYSFGVIKWSKQDLKDTDQKVRALLTRHGIHHPHASVNRLYIPRHSGGRGLRGLEVTHDETVYDMRQYFLRKNSPFHQAICQEDENLSPLNLAGQLEMPQHALETLLQEWQCKALHGRYPGTLQSNHVDKSESLTYLKAGYLFPETEGRVVAIQDQVIPTRSYIKNITGRNIPTDKCRKCSQVTESIQHITSSCSVLAPVDYMQRHDAMARVYHQAIAKKYGLINKITRPFEYRPTNILENGDYKLYWDSFITTDRVIKHNRPDIILLDKKQKRVDILDVAVPADDNISKAYIEKLTKYNDLAFEMKRIYGLKSTSIIPLVVSTNGLVERHLMENTIRLGLEKETVSAAQKEVIVANCRIVRKFLTSL

SEQ ID NO: 22888 - protein, 1147 aa, Coccinella septempunctata
MYIYIYIYIYIYIYIYIYIYIYIYIYIYIYIYIYIYIYIYIYIYTETELHNIYIYIYIYIYIYIYIYIYVVKFGFSIYIYIYIYIYIYIYIYIYIYIYIYIYIYIYIYIYIYIYIYIYIYIYIYIYTETELHNIKLSCYPRGASFDPNHIEENVSIQVPESPEQRMSTAGKLERAILKNYLLYAGMPPENRPRIPRMKGSKNMSKRVQETNEILKRILPTTCKLEDMVDFVYAAAITVCTELGMRIKEVLPKKDERPPPWKCRLEKKINEMRKNIGILHTYLNTASPTSRVDKLTRKIASEFKIKARSSNFKECIIVINDRLKQKIKALGSRLQHYNERVKRYKNNQLYYTNKQKFFRRLEQEFSEVQNAPTEVAMYQFWKGIWEEERTHDDMAHWIGSAEIDSTKYHMEDINISEMDIREALKKTSNWSAPGVDKIQNYWWKYFTATHNPLAELFRGALLDPTKIPYYFTLGISHMLPKANNNTMDPEKYRPITCLPTIYKILTAVLTPHIWKHVNKYDILARQQGGCRRDVRGCKELLITDLIITKHAKKKQRNISVAWIDYRKAFDSVPHSWLIKILQLYGISQQVITILEHLMKTWRTQLVINDSRTNYKTAEIKIKRGIFQGDTLSPLWFCLAMNPLSRLLNNQTYGYVVKKAPMRKINHQLYVDDLKLYAANEEQLRKELRIVAEFSKAIGMELGIEKCAVLHVKRGRVQGGTSMSVMEDLALPELGIEESYKYLGVQQALDIRATDMKNALKEKFFNRLKKVIQSKLNSKSMFEAINIWATPCIAYSFGVIKWSKQDLKDTDQKVRALLTRHGIHHPHASVNRLYIPRHSGGRGLRGLEVTHDETVYDMRQYFLRENSPFHQAICQEDENLSPLNLAGQLEMPQHALETLLQEWQCKALHGRYPGTLQSNHVDKSESLTYLKAGYLFPETEGRVVAIQDQVIPTRSYIKNITGRNIPTDKCRKCSQVTESIQHITSSCSVLAPVDYMQRHDAMARVYHQAIAKKYGLINKITRPFEYRPTNILENGDYKLYWDSFITTDRVIKHNRPDIILLDKKQKRVDILDVAVPADDNISKAYIEKLTKYNDLAFEMKRIYGLKSTSIIPLVVSTNGLGLEKETVSAAQKEVIVANCRIVRKFLTSL

SEQ ID NO: 22889 - protein, 1201 aa, Harmonia axyridis
MPSGTDGPAYPSHPASKVGSLEVEELVAPITRSMIQGGRGQQAGPLRSRPEVEPVGVSCGASGAAPRDGTVSPISFSLRRGRRSNSLDGIRVRPADVLRRDGRIRWTEEQNVLLMRVHFISKELEQRENLNYRQTLTQTWNEINPEKPSYPNLLANRIKWLLNNDKFTAIELDNIKLSCYPRSAIYDCREQSTGTVPTQTPEEEESCAVKPSTLERQLLKNYLLYAGIPPQNRPRIPRMKGSKLMLQKVHEIDKLLERNLPLTGTLEQVTDFVYAGAITACTELGAKIVDTQPKKQETAPPWKQRLEKKITDIRKKIGILHTYLSTQPPSGRVEKLTRQIASTFKIKARNSCFRESVVMISDRLKQKIKVLGCRLQRYNERVKRYKNNQLFYKNQQQFFRQLEDETSVGEEPPTEEEMHLFWKNIWEEEKIHDDSPQWVREAERESSKYRMDDVTITEEDIKATLKKTNNWSAPGVDKIQNYWWKYFAATHQHLAKLFQETLEDPTKIPDFFTLGISHMLPKGNNAANPKNYRSITCLPTIYKVLTGVLTRHIWKHVNESNILAPEQKGCRRGARGCKEMLITDFIITKQVKRRQRNISLAWVDYRKAFDSIPHSWLKKTLHLYGISKPVIAFLEHMMKTWRTQLVVNSKNKYYKTAEIKIRRGIFQGDTLSPLWFCLALNILSKLLKNQIYGYVIHKARNIKINHQMYVDDLKLYAANEEQIKQQLKIVASFSETIGMEMGLEKCAVVHVKRGKVQDGAGLHVMDDITIPGLGPQESYKYLGVQQALDIKTTEMKGVFREKFLTRLRKVLQSKLNSKEMFNAINIWAIPCIEYSFGVIKWSTSDLQDLDRKARALLTRHGIHHPHASVNRLYIPRHEGGRGLKNLEIVHNNTVSNMRDYLLSKRSPFIQAICQEDENLSPLNLAGQLDTPRSTLEQLSQEWRGKALHGRYPGSLEKSEINKRESLTYLRAGYLFPETEGRRMVAIQDQVIPTRSYIKNITGRNIPTDKCRKCLQATESVQHITSSCPILAPTDYTQRHNAMARVYHQAIAKRCGLIRNLKKPFEYHPIGVLENDNFKIYWDTFIHTDRPIKHNRPDIMLFNKKERTVEIVDITIPADDNVYKAYVEKTTKYHDLAFEVKTIYNLKSTAILPLIISTNGLVEKHLVENTVKLKLDVDLISTAQREVILANVRIVRKFLTSI

SEQ ID NO: 22890 - protein, 1162 aa, Harmonia axyridis
MNQGGRGQRAGPLRSRPEEEPDGVSCGASGTAPRDGTVSQISNAPRRERRSLSLDGIRNPPAEVPRRDGRARWNEEENILLLRVHYIAKDLELNTNANYRKSLADIWNDLNPRKQSYANLLANRVKWLLTNEKFTNTELNHIKLSCYPRGATVGCDDEIEEEIATPTPETPGSGKIEQELLKNYLLYAGVLPESRPRIPRLKGSKIMQQKVKEVNEIIQNNLPATWELRNVVDYVYAGAITVCSELGMKIKDTPPKKRNTLPPWKHRLEKKITAIRKNIGILHTYLNAETPSSRVAKLTRRIASEFKIKARNNRYRESIAEISDKLKQKIKALGSRMQRYNDRVKRYQNNHLYYKNKQQFFRRLEQSSPKNENAPTEESIHSFWKEIWEEERTHNNRAHWIGDVEAESGKYSMDNIKITEEDIKATLKKANNWSSPGVDQIQNYWWKHFTAIHNHLAKLLQEALSNPTKIPDFFTLGVTHMIPKGENTSDPKQYRPITCLPTVYKILTGVLTHHIWKHVNKNKILAPEQNGCRGSTRGCKELLISDLIITKKVKKRQRNISVAWLDYRKAFDSVPHTWLIKTLQFYGISKPVIDLLKHLMETWRTQLVVNTGKVNYKTSLIRIKRGIFQGDTLSTLWFCLALNPLSKLLKDQIYGYVIQKTPSTKISHQLYIDDLKLYAANEDQLKKQLKIVASFSQDIGLELGIDKCAVVHVKRGRVQEGAGLAVMEDLTIPQLGTRESYKYLGVQQALDIKTTEMKTIFKEKFLSRLKKILQSKLNSKAMFEAINIWAVPCISYSFGVIKWFNTELKDIDQKVRALLTKHGIHHPHASVNRLYVPRHEGGRGLQNLEMIHDRTVRDTREYFLNKNLPFHRTICREDDRLSPLNLAGQIEPQQLTIEKLTQEWHSKALHGRYPGTLKNDHVNKEYSLTYLKSGYLFPETEGRLIAIQDQVVPTRSYIKNITRRNIPTDKCRKCSQVTESIQHVTSSCSILAPTDYTQRHDAMARVYHQAIAKKCGLIKKTVRPFEYRPSNILENEHYKLYWDNFITTDQTIKHNRPDILLHNKIERTMEILDVAIPADDNIAKAFTEKLTKYQDLAFEMKTIYGLKSTTILPLVMSTNGLVEKHLVDNTLRLGLEKELVSTAQKEVILANTRLVRKFLTSL

SEQ ID NO: 22891 - protein, 1054 aa, Propylea japonica
MNPHRQSYANLLSNRVKWLLDNEKFTNTELNNIKLSCYPWTTVVDDDDTLQEEVPIQIQETTQEAGKTEHTLIKNYLLYAGIPPENRPKIPRIKGSKLTLKKVQEMNTIINKNLPTTCKLEDITDFVYAGAVTVCLELGMKIGDPRPKRNETTPPWKNRLEIKIKNIRRNIGILYTYLNTSKPSSRVEKLTRKITSEFKIKVRNGHFSESVMEIMDRLKQKIKALGSRIQRYNERVKRYKNNQLYYKNKQQFFRKLEQETSDEQNPPTEESMYQFWKKIWEEEKMHDDQAHWIRDAEADATKYNMEEVNITEEDIRETLKKSNNWSAPGVDGIQNYWWKYFPATHNHLARLFREALSDPTKIPNFFTLGISHMLPKENNTTDPKNYRPITCLPTIYKILTGVLTRHIWKHINKHKILAQEQNGCRGSARGCKELLITDLIITKQVKKKQRNISVAWVDYQKAFDSVPHSWLIKTLQLYGISKPVITLLEHLMRTWRTQLVVNHQQVNYKTAEIKIRKGIFQGDKLSTLWFCLSLNPLSRLLRDQIYGYVVQKARNTKISHQLYIDDLKLYASNEEQLKKQLRIVAAFSETIGMKLGIDKCAVVHVKRGRVQEGESLTVMENLTISDLGTHEYYKYLGVQQALDINTTNMKTVFREKFFARLKKVLQSKLSSKSMFEAINIWAIPSLTYSFGVIKWSNAELKEIDRKVRALLTRHGIHHPHASVSRLYIPRHNGGRGLQNLEIVHDKTVYSMRAYFLSKNLPLHRAVCQEDRELSPLNLAGQLETPQLSVEKLSQEWHGKALHGRYPGSLQSNHVDKSESLTYLKAGYLFPETEGRLMAIQDQVVPTRSYIKNITGRYLPTDKCRKCSQTTESIQHVTSSCPVLAPVDYMQRHDAMARVYHQAIAKNCGLVKKTLKPFEYHPTNILENENYRLYWDSFITTDRAVKHNRPDILLFNKKERTVEIIDVAIPADDNVSKAFIEKLTKYHDLAFEMKKMYKLKSTSILPLVISTNGLVERHLVENTTRLQLDRGLVSTAQKEVILANTRIVRKFLTSL

SEQ ID NO: 22892 - protein, 1162 aa, Harmonia axyridis
MNQGGRGQRAGPLRSRPEEEPDGVSCGASGTAPRDGTVSQISNAPRRERRSLSLDGIRNPPAEVPRRDGRARWNEEENILLLRVHYIAKDLELNTNANYRKSLADIWNDLNPRKQSYANLLANRVKWLLTNEKFTNTELNHIKLSCYPRGATVGCDDEIEEEIATPTPETPRSGKIEQELLKNYLLYAGVLPESRPRIPRLKGSKIMQQKVKEVNEIIQNNLPATWELRNVVDYVYAGAITVCSELGMKIKDTPPKKRDTLPPWKHRLEKKITAIRKNIGILHTYLNAETPSSRVAKLTRRIASEFKIKARNNRYRESIAEISDKLKQKIKALGSRMQRYNDRVKRYQNNHLYYKNKQQFFRRLEQSSPKNENAPTEESIHSFWKEIWEEERTHNDRAHWIGDVEAESGKYSMDNIKITEEDIKATLKKANNWSSPGVDQIQNYWWKHFTAIHNHLAKLLQEALSNPTKIPDFFTLGVTHMIPKGENTSDPKQYRPITCLPTVYKILTGVLTHHIWKHVNKNKILAPEQNGCRGSTRGCKELLISDLIITKKVKKRQRNISVAWLDYRKAFDSVPHTWLIKTLQFYGISKPVIDLLKHLMETWRTQLVVNTGKVNYKTSLIRIKRGIFQGDTLSTLWFCLALNPLSKLLKDQIYGYVIQKTPSTKISHQLYIDDLKLYAANEDQLKKQLKIVASFSQDIGLELGIDKCAVVHVKRGRVQEGAGLAVMEDLTIPQLGTRESYKYLGVQQALDIKTTEMKTIFKEKFLSRLKKILQSKLNSKAMFEAINIWAVPCISYSFGVIKWFNTELKDIDQKVRALLTKHGIHHPHASVNRLYVPRHEGGRGLQNLEMIHDRTVRDTREYFLNKNLPFHRTICREDDRLSPLNLAGQIEPQQLTIEKLTQEWHSKALHGRYPGTLKNDHVNKEYSLTYLKSGYLFPETEGRLIAIQDQVVPTRSYIKNITRRNIPTDKCRKCSQVTESIQHVTSSCSILAPTDYTQRHDAMARVYHQAIAKKCGLIKKTVRPFEYRPSNILENEHYKLYWDNFITTDQTIKHNRPDILLHNKIERTMEILDVAIPADDNIAKAFTEKLTKYQDLAFEMKTIYGLKSTTILPLVMSTNGLVEKHLVDNTLRLGLEKELVSTAQKEVILANTRLVRKFLTSL

SEQ ID NO: 22893 - protein, 1166 aa, Coccinella septempunctata
MVQGGRGQRAGPLRSRPEEEPVGVSCGASGAAPRDGTVSQDSRPFSRLRRSISLDGLHARPAEALRRDGRTRWNEEENILLLRVHYIAKELERNKGMNYRQTLTNVWNEINPHRQSYTNLLTNRVRWMLDQEKFTEIELNSIMLSCYPRGATLDSDDESVGDIPIQPQRESAAPKTGNLERKLLENYLKYAGIPPQNRPRIPRMKGSKTMLKKVQEVNELIQQNFSTIRKIEEVVDLVYAGAITVCTELGMKIRDSVQPMRKETTPPWKRRLEEKIKNIRKNIGILHTYLNTGTPSSRVEKRARQIASEFKIKSNKHHFRESVVEICDRLKQKIKALGSRIQRYNDRVKRFKNNQLYYKDKQKFFRQLEQGTPDQESPPVKEAMHAFWKEIWEDEKVHNDKAHWIGEAEANAARYHMDDVKITEDDIKLVLKKTNNWSTPGVDQIQNYWWKHFTTTHGHLARFFQAALTDPSGLPDFFTLGVSYMLPKENNTADPKKYRPITCLPTIYKILTGVLTRYIWRHVNKNNILAQEQNGCRGDARGCKELLITDYIITKQVKKKQRNISMAWVDYQKAFDSVPHSWLIKTLQLYGIAKPIISLLEHLMKTWRTQLVVNSAKSQYKTTEVRIKRGIFQGDTLSPLWFCLALNPLSQLLRNQIYGYIVHKARKIRISHRLYIDDLKLYAANEEQLKKQLKIVASFSESIGMVMGIDKCAVVHVKRGRIQEGSGMQVMEDVIIPQLGTEEAYKYLGVQQALDIKSAEMKRAFRERLFCRLKKVVQSKLNSRSMFEAINIWAIPCIAYSFGVIRWTNTELKDLDKKVRAILTTHGIHHPHASVNRLYIPRNEGGRGLLNLEITHYKTVCSLREYFISNSSPLHQALLQEDNNLSPLNLAGRMESPQLTTEVLSQEWRSKALHGRYPGALQNKDVNRSESLTYLKAGYLFAETEGRLVAIQDQVVPTRSYIKNITGRNILTDRCRKCSQAIESIQHVTSSCSVLAPTDYTQRHNEMAKVYHQAIAKKYGLLNKTVRPFEYRPSSILENESYKLYWDTFITTDRSVKHNRPDILLHDKKGKTVVIIDVAIPADDNLSKAFIEKLTKYHDLAFELKTIHSLQSTAILPLVMSTNGLVEKHLVENTQRLELDKEVISTAQKEVILANTRLVRKFLTSL

SEQ ID NO: 22894 - protein, 1162 aa, Harmonia axyridis
MNQGGRGQRAGPLRSRPEEEPDGVSCGASGTAPRDGTVSQISNAPRRERRSLSLDGIRNPPAEVPRRDGRARWNEEENILLLRVHYIAKDLELNTNANYRKSLADIWNDLNPRKQSYANLLANRVKWLLTNEKFTNTELNHIKLSCYPRGATVGCDDEIEEEIATPTPETPRSGKIEQELLKNYLLYAGVLPESRPRIPRLKGSKIMQQKVKEVNEIIQNNLPATWELRNVVDYVYAGAITVCSELGMKIKDTPPKKRDTLPPWKHRLEKKITAIRKNIGILHTYLNAETPSSRVAKLTRRIASEFKIKARNNRYRESIAEISDKLKQKIKALGSRMQRYNDRVKRYQNNHLYYKNKQQFFRRLEQSSPKNENAPTEESIHSFWKEIWEEERTHNNRAHWIGDVEAESGKYSMDNIKITEEDIKATLKKANNWSSPGVDQIQNYWWKHFTAIHNHLAKLLQEALSNPTKIPDFFTLGVTHMIPKGENTSDPKQYRPITCLPTVYKILTGVLTHHIWKHVNKNKILAPEQNGCRGSTRGCKELLISDLIITKKVKKRQRNISVAWLDYRKAFDSVPHTWLIKTLQFYGISKPVIDLLKHLMETWRTQLVVNTGKVNYKTSLIRIKRGIFQGDTLSTLWFCLALNPLSKLLKDQIYGYVIQKTPSTKISHQLYIDDLKLYAANEDQLKKQLKIVASFSQDIGLELGIDKCAVVHVKRGRVQEGAGLAVMEDLTIPQLGTRESYKYLGVQQALDIKTTEMKTIFKEKFLSRLKKILQSKLNSKSMFEAINIWAVPCISYSFGVIKWFNTELKDIDQKVRALLTKHGIHHPHASVNRLYVPRHEGGRGLQNLEMIHDRTVRDTREYFLNKNLPFHRTICREDDRLSPLNLAGQIEPQQLTIEKLTQEWHSKALHGRYPGTLKNDHVNKEYSLTYLKSGYLFPETEGRLIAIQDQVVPTRSYIKNITRRNIPTDKCRKCSQVTESIQHVTSSCSILAPTDYTQRHDAMARVYHQAIAKKCGLIKKTVRPFEYRPSNILENEHYKLYWDNFITTDQTIKHNRPDILLHNKIERTMEILDVAIPADDNIAKAFTEKLTKYQDLAFEMKTIYGLKSTTILPLVMSTNGLVEKHLVDNTLRLGLEKELVSTAQKEVILANTRLVRKFLTSL

SEQ ID NO: 22895 - protein, 1166 aa, Adalia bipunctata
MVQGGRGQRAGPLRSRPEEEPVGVSCGASGAAPRDGTVSQDSRPFSRLRRSISLDGLHARPAEALRRDGRTRWNEEENILLLRVHYIAKELERNKGMNYRQTLTNVWNEINPHRQSYTNLLANRVRWMFENEKFTEIELNSIMLSCYPRGATLDSDDESVGDIPIQPQRESAAPKTGNLERKLLENYLKYAGIPPQNRPRIPRMKGSKTMLKKVQEVNELIQQNFSTIRKIEEVVDLVYAGAITVCTELGMKIGDSVQPMRKETTPPWKRRLEEKIKNIRKNIGILHTYLNTGTPSSRVEKRTRQIASEFKIKSNKHHFRESVVEICDRLKQKIKALGSRIQRYNERVKRFKNNQLYYKDKQKFFRQLEQGTPDQENPPVKEAMHAFWKEIWEDEKVHNDKAHWIGEAEANAARYHMDDVKVTEDDIRLVLKKTNNWSTPGVDQIQNYWWKHFTTTHGHLARFFQAALTDPSGLPDFFTLGVSYMLPKGNNTADPKKYRPITCLPTIYKILTGVLTRYIWRHVNKNNILAQEQNGCRGDARGCKELLITDYIITKQVKKKQRNISMAWVDYQKAFDSVPHSWLIKTLQLYGIAKPIISLLEHLMKTWRTQLVVNSAKSQYKTTEVRIRRGIFQGDTLSPLWFCLALNPLSQLLRNQIYGYIVHKARKIRISHRLYIDDLKLYAANEEQLKKQLKIVASFSESIGMVMGIDKCAVVHVKRGRIQEGSGMQVMEDVIIPQLGTEEAYKYLGVQQALDIKSAEMKRAFRERLFCRLKKVVQSKLNSRSMFEAINIWAIPCIAYSFGVIRWTNTELKDLDKKVRAILTTHGIHHPHASVNRLYIPRNEGGRGLLNLEITHYKTVCSLREYFISNSSPLHQALLQEDNNLSPLNLAGRLESPQLTTEVLSQEWRSKALHGRYPGALQNKDVNRSESLTYLKAGYLFAETEGRLVAIQDQVVPTRSYIKNITGRNILTDRCRKCSQAIESIQHVTSSCSVLAPTDYTQRHNEMAKVYHQAIAKKYGLLNKTVRPFEYRPSSILENESYKLYWDTFITTDRSVKHNRPDILLHDKKGKTVVIIDVAIPADDNLSKAFIEKLTKYHDLAFELKTIHSLQSTAILPLVMSTNGLVEKHLVENTQRLELDKEVISTAQKEVILANTRLVRKFLTSL

SEQ ID NO: 22896 - protein, 956 aa, Harmonia axyridis
MQQKVKEVNEIIQNNLPATWELRNVVDYVYAGAITVCSELGMKIKDTPPKKRDTLPPWKHRLEKKITAIRKNIGILHTYLNAETPSSRVAKLTRRIASEFKIKARNNRYRESIAEISDKLKQKIKALGSRMQRYNDRVKRYQNNHLYYKNKQQFFRRLEQSSPKNENAPTEESIHSFWKEIWEEERTHNNRAHWIGDVEAESGKYSMDNIKITEEDIKATLKKANNWSSPGVDQIQNYWWKHFTAIHNHLAKLLQEALSNPTKIPDFFTLGVTHMIPKGENTSDPKEYRPITCLPTVYKILTGVLTHHIWKHVNKNKILAPEQNGCRGSTRGCKELLISDLIITKKVKKRQRNISVAWLDYRKAFDSVPHTWLIKTLQFYGISKPVIDLLKHLMETWRTQLVVNTGKVNYKTSLIRIKRGIFQGDTLSTLWFCLALNPLSKLLKDQIYGYVIQKTPSTKISHQLYIDDLKLYAANEDQLKKQLKIVASFSQDIGLELGIDKCAVVHVKRGRVQEGAGLAVMEDLTIPQLGTRESYKYLGVQQALDIKTTEMKTIFKEKFLSRLKKILQSKLNSKAMFEAINIWAVPCISYSFGVIKWFNTELKDIDQKVRALLTKHGIHHPHASVNRLYVPRHEGGRGLQNLEMIHDRTVRDTREYFLNKNLPFHRTICREDDRLSPLNLAGQIEPQQLTIEKLTQEWHSKALHGRYPGTLKNDHVNKEYSLTYLKSGYLFPETEGRLIAIQDQVVPTRSYIKNITRRNIPTDKCRKCSQVTESIQHVTSSCSILAPTDYTQRHDAMARVYHQAIAKKCGLIKKTVRPFEYRPSNILENEHYKLYWDNFITTDQTIKHNRPDILLHNKIERTMEILDVAIPADDNIAKAFTEKLTKYQDLAFEMKTIYGLKSTTILPLVMSTNGLVEKHLVDNTLRLGLEKELVSTAQKEVILANTRLVRKFLTSL

SEQ ID NO: 22897 - protein, 1116 aa, Propylea japonica
MQGGILPSGTDDPAYLSHPAPRLAAWEAEEYKAPITRSMIQGGRGQRAGPLRSRPEIEPVGVSCGASGAAPRDGTVSQSSFPGRRERRSISLDGLRTQPADVPRRDGRTRWNEEENILLLRVHYIAKDLELSNNNYRQTLTNIWNDMNPHRQSYANLLSNRVRWLLDNEKFTNTELNNIKLSCYPWTTVVDNDDTLQEEVPIQIQETTQEAVKTEHTLIKNYLLYAGIPPENRPKIPRIKGSKLTLKKVQEMNTIINKNLPNTCKLEDITDFVYAGAVTVCLELGMKIGDPLPKRNETTPPWKNRLEIKIKNIRRNIGILYTYLNTSKPSSRVEKLTRKITSEFKIKVRNGHFSESVMEIMDRLKQKIKALGSRIQRYNERVKRYKNNQLYYKNKQQFFRKLEQETSDEQNPPTEESMYQFWKKIWEEEKMHDDQAHWIRDAEADATKYNMEEVNITEEDIRETLKKSNNWSAPGVDGIQNYWWKYFPATHNHLARLFREALSDPTKIPNFFTLGVSHMLPKENNTTDPKNYRPITCLPTIYKILTGVLTRHIWKHINKHKILAQEQNGCRGSARGCKELLITDLIITKQVKKKQRNISVAWVDYQKAFDSVPHSWLIKTLQLYGISKPVITLLEHLMRTWRTQLVVNHQQVNYKTAEIKIRKGIFQGDKLSTLWFCLSLNPLSRLLRDQIYGYVVQKARNTKISHQLYIDDLKLYASNEEQLKKQLRIVAAFSETIGMKLGIDKCAVVHVKRGRVQEGESLTVMENLTISDLGTHEYYKYLGVQQALDINTTNMKTVFREKFFARLKKVLQSKLSSKSMFEAINIWAIPSLTYSFGVIKWSNAELKEIDRKVRSLLTRHGIHHPHASLSRLYIPRHNGGRGLQNLEIVHDKTVYSMREYFLSKHLPLHRAVCQEDRELSPLNLAGQLETPQLSVEKLSQEWHGKALHGRYPGSLQSNHVDKSESLTYLKAGYLFPETEGRLMAIQDQVVPTRSYIKNITGRYLPTDKCRKCSQTTESIQHVTSSCPVLAPVDYMQRHDAMARVYHQAIAKNCGLVKKTLKPFEYHPTNILENENYRLYWDSFITTDRAVKHNTRYFTLQQKRENSGNYRRRYPGR

SEQ ID NO: 22898 - protein, 1167 aa, Coccinella septempunctata
MCQGGRGQRAGPLRSRPEEEPDGVNCGASGVVPRDGTVSQNSVPARRERRSISLDSCRARPAEAPRRDGRARWNEEENILLLRVHYIAKDLERNTNSNYRQALTNIWNDLNPQKQTYANLLSNRVKWLLNNEKFTDTELNSIMLSCYPRGAVMDCDDHLAEEAPVRIPEATEETILKEDQLERALIKNYTLYAGITPENRPKIPRMKGSRIMLQRVQEVDEIMKSKLSATLQLEDITDFVYAGALTVCSELGMKIEDALPKKGETTPPWKYRLEKKINNIRRSIGILHTYLNTDTPSNRVEKLTRQIASEFKIKARSGNFRQSIMVVFDRLKQRIKALGSRIQRYNERVKRYKNNQLYYKNRQQFFRHLEQETSEELNPPDEESMHLFWKKVWEEEKRHDEQAHWITDLERESNEYHMEDIEITEKDIKDALKKTNNWSAPGVDKIQNYWWKHFTAAHCHLARLFQEVLLDPTKIPGFFTLGISYMLPKGNDTMDPKNYRPITCLPTIYKILTAVLTRNLWKHVNENSILAREQNGCRGNARGCKELLITDLIITKQVKKKQRNISVAWVDYRKAFDSVPHTWLIKALQLYGISKPIITLLEHLMKTWRTQLVINTENKYYKTTEIKIRRGIFQGDTLSPLWFCLALNPLSRLLKKQIYGYKLQRAQNMRINHQLYIDDLKLYAANDEQLRKQIRIVAAFSEAIGMELGVEKCAVVHVKRGRVQEGEVFSVMESLEIPELGAQETYKYLGVQQALDIKTADVKKIFRDKFLSRLKKVLQSKLNSKSMFEAVNTWAVPCIAYSFGVVRWSNAELRDIDQKVRALLTRHGIHHPHASVNRLYIPRRDGGRGLQNLEMVHDKTVRSMREYFLSKNLPFYSALCQADENLSPLNLAGQLEPVRLTNEGLIQEWHGKALHGRYPGSLKNSHVDKSESLTYLKAGYLFPETEGRLVAIQDQVVSTRSYIKNITGRNIPTDKCRKCSQMTESIQHVTSSCSVLAPVDYTQRHDAMARVYHQEIAMKCGLIRKIMKPFEYRPCNILENENYKLYWDTFITTDRAIKHNRPDILLFDKKKKTVEILDVAIPADDNVPRAFVEKLTKYHDLAFEMKTIYGLKSTSILPLVISTNGLVERHLVENTLRMGLDRKLISLAQREVILANTRIVRKFLTSL

SEQ ID NO: 22899 - protein, 1162 aa, Harmonia axyridis
MNQGGRGQRAGPLRSRPEEEPDGVSCGASGTAPRDGTVSQISNAPRRERRSLSLDGIRNPPAEVPRRDGRARWNEEENILLLRVHYIAKDLELNTNANYRKSLADIWNDLNPRKQSYANLLANRVKWLLTNEKFTNTELNHIKLSCYPRGATVGCDDEIEEEIATPTPETPRSGKIEQELLKNYLLYAGVLPESRPRIPRLKGSKIMQQKVKEVNEIIQNNLPATWELRNVVDYVYAGAITVCSELGMKIKDTPPKKRDTLPPWKHRLEKKITAIRKNIGILHTYLNAETPSSRVAKLTRRIASEFKIKARNNRYRESIAEISDKLKQKIKALGSRMQRYNDRVKRYQNNHLYYKNKQQFFRRLEQSSPKNENAPTEESIHSFWKEIWEEERTHNNRAHWIGDVEAESGKYSMDNIKITEEDIKATLKKANNWSSPGVDQIQNYWWKHFTAIHNHLAKLLQEALSNPTKIPDFFTLGVTHMIPKGENTSDPKQYRPITCLPTVYKILTGVLTHHIWKHVNKNKILAPEQNGCRGSTRGCKELLISDLIITKKVKKRQRNISVAWLDYRKAFDSVPHTWLIKTLQFYGISKPVIDLLKHLMETWRTQLVVNTGKVNYKTSLIRIKRGIFQGDTLSTLWFCLALNPLSKLLKDQIYGYVIQKTPSTKISHQLYIDDLKLYAANEDQLKKQLKIVASFSQDIGLELGIDKCAVVHVKRGRVQEGAGLAVMEDLTIPQLGTRESYKYLGVQQALDIKTTEMKTIFKEKFLSRLKKILQSKLNSKAMFEAINIWAVPCISYSFGVIKWFNTELKDIDQKVRALLTKHGIHHPHASVNRLYVPRHEGGRGLQNLEMIHDRTVRDTREYFLNKNLPFHRTICREDDRLSPLNLAGQIEPQQLTIEKLTQEWHSKALHGRYPGTLKNDHVNKEYSLTYLKSGYLFPETEGRLIAIQDQVVPTRSYIKNITRRNIPTDKCRKCSQVTESIQHVTSSCSILAPTDYTQRHDAMARVYHQAIAKKCGLIKKTVRPFEYRPSNILENEHYKLYWDNFITTDQTIKHNRPDILLHNKIERTMEILDVAIPADDNIAKAFTEKLTKYQDLAFEMKTIYGLKSTTILPLVMSTNGLVEKHLVDNTLRLGLEKELVSTAQKEVILANTRLVRKFLTSL

SEQ ID NO: 22900 - protein, 1205 aa, Coccinella septempunctata
MRRVVAGLSGSDDPAYPSRPAPRLAAWEAEHEAPITRSMCQGGRGQRAGPLRSRPEEEPDGVNCGASGAVPRDGTVSQNSVPARRERRSISLDSCRARPAEAPRRDGRARWNEEENILLLRVHYIAKDLERYNNSNYRQALTNIWNDLNPQKQAYANLLSNRVKWLLNNEKFTDTELNSIMLSCYPRGAVMDCDGHSAEEAPARIPEATEETTPKKDQLERALIKNYTLYAGITPENRPKIPRMKGSKIMLQRVQEVNEIMKSKLTATLQLEDITDFVYAGAFTVCSELGMKIEDALPKKGETTPPWKYRLEKKINNIRRSIGILHTYLNTETPSNRVERLTRQIASEFKIKARSGNFRQSIMVVFDRLKQRIKALGCRIQRYNERVKRYKNNQLYYKNRQQFFRHLEQETSKELNPPDEGSMHLFWKKVWEEEKRHDEQAHWITDLERESNEYHMEDIEITEKDIKDALKKTNNWSAPGVDNIQNYWWKHFTAAHCHLARLFREVLLDPTKIPGFFTLGISYMLPKGNDTIDPKNYRPITCLPTIYKILTAVLTRNLWKHVNENNILAREQNGCSGNARGCKELLITDLIITKQVKKKQRNISVAWVDYRKAFDSVPHTWLIKALQLYGISKPIITLLEHLMKTWRTQLVINTKNKYYKTAEIKIRRGIFQGDTLSPLWFCLALNPLSRLLKKQIYGYKLQRAQNMRINHQLYIDDLKLYAANEEQLRKQIRIVAAFSEAIGMELGVEKCAVVHVKRGRVQEGEVFSVMESLEIPELGAQETYKYLGVQQALDIKTADMKKIFRDKFLSRLKKVLQSKLNSKSMFEAVNTWAVPCIAYSFGVVRWSNAELRDIDQKVRALLTRHGIHHPHASVNRLYIPRRDGGRGLQNLEMVHDKTVRSMREYFLSKNSPFYSALCQADENLSPLNLAGQLEPVRLTNEGLIQEWHGKVLHGRYPGSLKNSHVDKSESLTYLKAGYLFPETEGRLVAIQDQVVSTRSYIKNITGRNIPTDKCRKCSQMTESIQHVTSSCSVLAPVDYTQRHDAMARVYHQEIAMKCGLIRKIMKPFEYRPCNILENENYKLYWDTFITTDRAIKHNRPDILLFDKKNKTVEILDVAIPADDNVPRAFVEKLTKYHDLAFEMKTIYGLKSTSILPLVISTNGLVERHLVENTLRMGLDRKLISLAQKEVILANTRIVRKFLTSL

SEQ ID NO: 22901 - protein, 843 aa, Coccinella septempunctata
MVVFDRLKQRIKALGSRIQRYNERVKRYKNNQLYYKNRQQFFRHLEQETSEELNPPDEESMHLFWKKVWEEEKRHDEQAHWITDLERESNEYHTEDIEITEKDIKDALKKTNNWSAPGVDKIQNYWWKHFTAAHCHLARLFQEVLLDPTKIPGFFTLGISYMLPKGNDTMDPKNYRPITCLPTIYKILTAVLTRNLWKHVNENSILAREQNGCRGNARGCKELLITDLIITKQVKKKQRNISVAWVDYRKAFDSVPHTWLIKALQLYGISKPIITLLEHLMKTWRTQLVINTENKYYKTTEIKIRRGIFQGDTLSPLWFCLALNPLSRLLKKQIYGYRLQRAQNMRINHQLYIDDLKLYAANEEQLRKQIRIVAAFSEAIGMELGVEKCAVVHVKRGRVQEGEVFSVMESLEIPELGAQETYKYLGVQQALDIKTADVKKIFRDKFLSRLKKVLQSKLNSKSMFEAVNTWAVPCIAYSFGVVRWSNAELRDIDQKVRALLTRHGIHHPHASVNRLYIPRRDGGRGLQNLEMVHDKTVRSMREYFLSKNLPFYSALCQADENLSPLNLAGQLEPVRLTNEGLIQEWHGKALHGRYPGSLKNSHVDKSESLTYLKAGYLFPETEGRLVAIQDQVVSTRSYIKNITGRNIPTDKCRKCSQMTESIQHVTSSCSVLAPVDYTQRHDAMARVYHQEIAMKCGLIRKIMKPFEYRPCNILENENYKLYWDTFITTDRAIKHNRPDILLFDKKKKTVEILDVAIPADDNVPRAFVEKLTKYQDLAFEMKTIYGLKSTSILPLVISTNGLVERHLVENTLRMGLDRKLISLAQREVILANTRIVRKFLTSL

SEQ ID NO: 22902 - protein, 1086 aa, Coccinella septempunctata
MRVHYIAKELELRENYNYRQILTQTWNEVNPEKHSYTNLLANRVKWLLNNDKFTSIELNNIRLSCYPRGAMCDLSEQLTVEDSTRAPETKEDRKGKHSKLEQHFQKNFLLYAGIPPENRPRIPRMKGSKTMLQKVQEVNKIIEKNLPSTGTLEQMTDLVYAGAITVCTDLGMKITEAQQKKQENTPPWKHRLERKITDIRKNIGIVHTYLNMPSPSSRVVKLTRRIVSEFRIKARNNSFKDSVTVVHDRLKQKIKVLGSRLQRYNERVKRYKNNQLFYKNQQQFFRQLEHETSAEEDPPTEKDMHQFWKDIWEEEKTHDDGAHWIKDAEKESSKYRMDDVNITEEDIRATLRKTNNWSAPGVDKIQNYWWKHFSTTHQHLAKLFQEALEDPTKIPDFFTLGISHMLPKSNNAANPKNYRPITCLPTIYKVLTGVLTRHIWKHVNKNDILAHEQKGCRRDARGCKEMLVTDFIITKQAKKKQRNISVAWVDYKKAFDSVPHSWLKKTLHLYGISKPVIALLEHMMKTWRTQLIVNTKNKNYKTSQIKIRRGIFQGDTLSPLWFCLALNLLSKLLKNQTYGYTVHKARNIKISHQIYVDDLKLYAANEEQIKQQLKIVASFSETIGMEMGLEKCAVIHVKRGKIQKGAGLRVIEDVTIPGLGPEDSYKYLGVQQALEIKTTEMKSVFKEKFLTRLKKVLQSKLNSKPMFDAINIWAIPCIEYSFGVIKWSNADLKDLDRKARALLTRHGVHHPHASVNRLYIPRNEGGRGMKNLEIVHNDAVSNMRDYLLSKHSPFMQTVCQEDENLSPLNLAGQLEPPRNTLERMSQEWLSKALHGRYPGNLEKNEVNKKESLTYLRAGYLFPETEGRMVAIQDQVIPTRSYIKNISGRNIPTDKCRKCLYATESVQHITSSCPVLAPTDYTQRHNAMARVYHQAIAKKCGLIQKLKKPFEYLPASILENNNYKLYWDTFIDTDRPIKHNRPDMVLFNNKERSVQILDVTSPADDNLYKAYVEKTTKYQDLAFELKTIHSLKTTTIMPLIISTNGLVEKHLVENTLKLGLDGDLISTAQKEVILANVRTVRKFLTTI

SEQ ID NO: 22903 - protein, 1086 aa, Coccinella septempunctata
MRVHYIAKELELRENYNYRQILTQTWNEVNPEKHSYTNLLANRVKWLLNNDKFTSIELNNIRLSCYPRGAVCDLSKQLTVEDSTQAPKTKEDSKGKHSKLEQHFQKNFLLYAGIPPENRPRIPRMKGSKTMLQKVQEVNKIIEKNLPSTGTLEQMTDLVYAGAITVCTDLGMKITEAQQKKQENTPPWKHRLERKITDIRKNIGIVHTYLNMPSPSSKVVKLTRRIVSEFRIKARNNSFKDSVTVVHDRLKQKIKVLGSRLQRYNERVKRYKNNQLFYKNQQQFFRQLEHETSAEEDPPTEKDMHQFWKDIWEEEKTHDDGAHWIKDAEKESSKYRMDDVNITEEDIRATLRKTNNWSAPGIDKIQNYWWKHFSTTHQHLAKLFQEALEDPTKIPDFFTLGISHMLPKSNNAANPKNYRPITCLPTIYKVLTGVLTRHIWKHVNKNDILAHEQKGCRRDARGCKEMLVTDFIITKQAKKKQRNISVAWVDYKKAFDSVPHSWLKKTLHLYGISKPVIALLEHMMKTWRTQLIVNTKNKNYKTSQIKIRRGIFQGDTLSSLWFCLALNLLSKLFKNQTYGYTVHKARNIKISHQIYVDDLKLYAANEEQIKQQLKIVASFSETIGMEMGLEKCAVIHVKRGKIQKGAGLRVIEDVTIPGLGPEDSYKYLGVQQALEIKTTEMKSVFKEKFLTRLKKVLQSKLNSKPMFDAINIWAIPCIEYSFGVIKWSNADLKDLDRKARALLTRHGVHHPHASVNRLYIPRNEGGRGMKNLEIVHNDAVSNMRDYLLSKHSPFMKTVCQEDENLSPLNLAGQLEPPRNTLERMSQEWLSKALHGRYPGNLEKNEVNKKESLTYLRAGYLFPETEGRMVAIQDQVIPTRSYIKNISGRNIPTDKCRKCLYATESVQHITSSCPVLAPTDYTQRHNAMARVYHQAIAKKCGLIQKLKKPFEYLPASILENNNYKLYWDTFIDTDRPIKHNRPDMVLFNNKERSVQILDVTIPADDNLYKAYVEKTTKYQDLAFELKTIHSLKTTTIMPLIISTNGLVEKHLVENTLKLGLDGDLISTAQKEVILANVRTVRKFLTTI

SEQ ID NO: 22904 - protein, 962 aa, Harmonia axyridis
MKGSKLMLQKVHEIDKLLERNLPLTGTLEQVTDFVYAGAITACTELGAKIVDTQPKKQETAPPWKQRLEKKITDIRKKIGILHTYLSTQPPSGRVEKLTRQIASTFKIKARNSCFRESVVVISDRLKQKIKVLGCRLQRYNERVKRYKNNQLFYKNQQQFFRQLEDETSVGEEPPTEEEMHLFWKNIWEEEKIHDDSPQWVREAERESSKYRMDDVTITEEDIKATLKKTNNWSAPGVDKIQNYWWKYFAATHQHLAKLFQETLEDPTKIPDFFTLGISHMLPKGNNAANPKNYRPITCLPTIYKVLTGFLTRHIWKHVNESNILAPEQKGCRRDARGCKEMLIADFIITKQVKRRQRNISLAWVDYRKAFDSIPHSWLKKTLHLYGISKPVIALLEHMMKTWRTQLVVNSKNKYYKTAEIKIRRGIFQGDTLSPLWFCLALNILSKLLKNQIYGYVVHKARNIKINHQMYVDDLKLYAANEEQIKQQLKIVASFSETIGMEMGLEKCAVIHVKRGKVQDGAGLHVMDDITIPGLGPQESYKYLGVQQALDIKTTEMKGVFREKFLTRLRKVLQSKLNSKAMFNAINIWAIPCIEYSFGVIKWSTSDLQDLDRKARALLTRHGIHHPHASVNRLYIPRHEGGRGLKNLEIVHNNTVSNMRDYLLSKRSPFIQAICQEDENLSPLNLAGQLDPPRSTLEQLSQEWRGKALHGRYPGSLGKSEINKRESLTYLRAGYLFPETEGRMVAIQDQVIPTRSYIKNITGRNIPTDKCRKCLQATESVQHITSSCPILAPTDYTQRHNAMARVYHQAIAKRCGLIRNLKKPFEYHPIGVLENDNFKLYWDTFIHTDRPIKHNRPDIMLFNKRERTVEIVDITIPADDNVYKAYVEKTTKYHDLAFEVKTIYNLKSTAILPLIISTNGLVEKHLVENTVKLKLDVDLISTAQREVILANVRIVRKFLTSI

SEQ ID NO: 22905 - protein, 1177 aa, Anentome helena
MVANAVVRFILLSTTAVSLAYPPVVAVVDNTASSRQNIGLTMRPFLDLGNAFKVALQSGKIRQVSNSLKRNVNNMAAPTRTARPAIINTIFDATPWTRYVKHLSEGEWKDFEKLESIFRQSIATKPLIEKLVFQHPNPSHWCTVYNMVTSYFFREGVFVFTKPNKIPYSLPFLKYVHRILRCFPVDIPEPFPPIPKFTAEAYLFDIEYTLTYIADHIRPCLARSCESNNKPSRKATTEKKASDDTKNESEEFTYINRGDLTRLWCEQQSKAIDLIDNNCRISRQSQCAISLLTIEDSFSKKCQRSLPSAPTEFPWDINIPAPEWTPTTNPFTIEEILVAIDSLPRRKAPGADGVCYDTVKQQKQRLAPVLCAIANVCLLNRRVPADWKHGIITLIPKKNGDPTNVDDWRPISLLATSYKLFMKLITNRLMPWIVDTGRLSKRQKGSMPRNGLQEHVFCLRSDISDFLHSASTLYTAFFDIKDAFGSIDHEFMINEMTSAGYPQVYVDLTRDIYSASTFQVRTAVGLSRRIQRGKGIIQGCPWSVIAFEQGIDKWLRWIEQPYPPVCTPNPVQGYVDDVSASATSEEQIREAVRRTDVFMTTSGMEVKHRKCGVLHGKRSGNSWRGDRTGNTQLHIQHEALPMYGRDQPYTYLGHSINISNNAALQQAADVVHNFVSTLEKIDASPLPIVAKLQAINVMACSKLSFYFPNIPFTVKALRDMEDEIVSCVRNWLKLNNSSTRSFMFSPRSEGGLGIFNPSALYAARHLSFKLSVLNSDDAQVRETARASLALHMARRKVPDAPPDAPTSFGGYQTTDDCTLDKQSRVTWPRSDWVHLQELCVRENVMLEKRTDGMYALNFGVDDEVSVSITDAKVASVMCKKKRLAQYVSEWKEKEWQGRVVREGTEIDHTLSNAFLSNMKLKDSIISFAVRGRLQLLQCNSLMALYYPDQCHRRCTLCNHPTETVSHIVNGCTKYQLIYQARHNRIVDIVYSYIPKINDSVQVIKDTCLSPRMFDTETGAFVTTAVRPDIAVIDHSNRQVFIVEVAVPFDAFIDRCYASKFEKYLPLCMEISALGFACRTVILVFGSLGNVHRRVVSGLRLVGVHASTATADGQLNERELKNVNKCKCTPGFNHCMTMVKNVNNCTCVYSNVDQVMNKIDIFNSSIDKHPPACCVGYH

SEQ ID NO: 22906 - protein, 884 aa, Cherax destructor
MLDYGKRCVEQMKAGFGVTFSEECKYNVKELLDDMSNELVACVSANERGEGRERDVPQYGNNRGGRRQRRRQIYRNLQKLYYKDRTKCAKIVLEGKWPQVGLPEERIVPQDVLCDFWVNLFERRSEVDNRPRDKVVENELWQLQVPIEVEEFKKAVKDSNHGSAPGPDGWSLKDLKLFPDQFWVDFFNTMLYIGYLPKVFCKARTVLLPKVERPDQPGQFRPITISSIIVRIYHKIIAARCVRNIPLHMAQKAFLPTDGLAQNIMLVDAILSEAKRKIKPLYLIFLDVRKAYDSVNHDSVRRALEIHNIPPLVIEYIMSTYEESTTQVLGREARMNRGVKQGDPLSCILFNVVLNEALLTLDSQIGWLLEGCDQKVSALAFADDMVLVAESEHGLNVQLGKLLANLALSGLEVNAQKCATLKIKTVPHVKKWYVDTRNKTFINEVPVQVLKPTTIYKYLGMHFTSSGRGRPDIHKLIEKLEVLDEAPLKPQQRLFFLIKHLIPGIIHTMVLGGVCQNTLKSADKEIRKKIRKWLKFPKDTSLGVFYADTAAGGLGCPCLSSRVPILRKNRMNAFHGSEDDVIKALAIHPNTIKALRFVGKSRVRSVIVTTRKQEMKEWRVALANSMDGAGLREHHQVPQVHRWISNGTGLLRGATYIDALKIKHNLMPTKARKSRGGRPIGIACEGCGQRESLGHLLQVCPRLHGQRVQRHDQIVDAIAVDCKTKHAVIKEPQIPTAAGTRKPDLLICNVEKRKVFILDVKVASDSQVASMSDQFQQKVNYYDKLQIREWAASWATQQIHIYNDHHDVVGTQNIIDARPFDPGDIVFGAVIITWRGAISPRTFGLLNKELSISSSKIELYVIKALEGSIVQWKMHNQWGAYRAV

SEQ ID NO: 22907 - protein, 1200 aa, Anastatus disparis
MDQSTNAQCLGAAESGELVVTPSVVGEYIPETLAAGREAALSASVNTYPRRNPGRNARASISEPVVAVDNALLRTEKLEVRVPFEDPRPCPKCLQGGRNYQFIKPTELAKHIKEKHLGVVVNWACDGCARIFEKIHAWSVHRTHCTGVKPVEQQYKCEACSKSFPTKVGLSQHERHDHPVLRNEKRARELNKSPKKGGAPTTVWTSAEADLLVLKSVEFREERLINKKLQPLFPDKTLKQISDKRRVLNSRIQAALKALENISSSSSSSSSEEAEDYDTAEEVESGDITSDRPSDSNERIPSSPAESGPLDPPWRKILIDAVLGQSSKHECWKPIIDQIKLNVDNREVAIDALYAELVEKILTKEITRTAIGSDVRVKYRNRQSRKRRHHGRAKRPPNRSDLRRYAYARCQELFDNEPKKLAEIVASNDFSLITRHKPPGSEDVSRLYTSLWGVEGPAPVRDMYPDSQSSWPIEAFYTPITSAEVGRRISRLDSSTAAGPDKIKKCDLRAGVADVLAGFYNLLLVHQLYPSEWRNNRTTLIPKTGKNEEDVKNWRPITISSILSRLFSGLIDGRLRRHIKQISRQKGFTSENGCYANVSILGQCLRTAKEESATFTIQDVQKAFDTVPHAAIAPALGRKGVSGEICEYISSMYENCQTTIKTADGDVSIGIRRGVKQGDPLSPLIFNLCMEPLLQTLQNSTKGLMLSGENVSALAFADDLVTVGATPEEGQKQAEIVNSYMTKLGMSLAIEKCKVFEIISKNKTWYVKNPLISLNGTEMPFAQADEAVKYLGARITPWRGIIEGYEKIAIQELIHRTRSLPLKPMQKLELINVYMLPRCTYGLIINPPSKGSLQDIDQMIREEIKDMMHISSKTSTPFLYVPRKKGGLGLPKLEHIVLVAALRNGVKALASDDPVTSGTMRCESLEKQLGGFAEALNVQWPITLAELDQVKEDLKKSHLQEWAKQRTQGQGAYEFGNPASNEWLRRCGYLRHSRIADAIKMRTNTYPTRVVLKRAGYVNNPAFDTKCRHCSMPRETLGHIIGECISTKPQRIRRHDEIKELISERLSSQEGTQVYAEQTFVTEQGEALRPDLVVKTNEGCDVIDVSVRFEKGNFLDLAMLEKETKYSPLKSVIRARLKTKNVKIVPIIVGSRGAIPSRTANELRKLGFTNADLVTVSMIALRSSLEMANEFMDYGRAQNN

SEQ ID NO: 22908 - protein, 990 aa, Asobara japonica
MEGQPTGHGALSGSGLARAGSRTALAPDRQRLITAAERSSTAEDLECLADSLAGFLRASSGKTSAQRPPRNGAGGRGRVDRGRSDNPGVRGVNNADTRTGRNEGPVFHRGMRQVEEAKTIQALYRTNRKRAMQKILGESEGHCQVPKAEIDQHFRSMYSLARRNVEDTDIAWPEWPEEGRDALNANLVKPFEAAEVNRRLRKAHNSSPGPDGLTYSDLKRADPGCLVLTAVYNACLRLAAFPNRWKVSNTVLIHKGDDPQLLGNWRPLAMGDTVAKLFAAVLADRLTEFATVGGKLGKEQKGFLQFEGCAEHNYVLQEIIEHSKRSGNELVVAWLDLSNAFGSVPHNSIEKALEGAAVPASTRKLVKSMYYQCTTRVRTSEGFTDPIRIDAGVKQGCPASPIIFNLTLESLIRATTGVGAGYTIGSKRWSNLAYADDLALTASSKEEMDRMLNVAVSEAAKIGLTFNPGKCATLHLRGKASKQKTLSTQFTMGEAPLRSLAVGDAYKHLGIPTGFQVRQTPATTIEQLVTDAGAVDVSMLAPWQKFDALATFILPRLDFVLRGAQVEKRPLTVADKVIRRMGKRWMNLPQRASPELVFIPPYRGGGGLVPLADLADALTVAHAFRMLTCADEPVRELAELTLRETVQSKIRRMPEGRDLATYLSGSQEGEFSGLVSGVASFWSRVRTSTRRASSRLGLAWRYDELTEELCLECRGSKGATTVIPPSARAQAIARVRRSIQEYYLSTLLAKPDQGKVYEVSSGERSANHFMRNGSYTRFAEWRFIHRARLDVLPLNGARRWGTGDKRCRRCGYELESLPHVLCHCTPHAAARQRRHDAILGRMAKAVQVNQRVQGLTDPDLGALRPDLVIKDENSRTITVVDITVPFENGKDSLAIARESKIVKYTPLSHALHSQGYNVNVEAIVFGALGTWDPGNEPVLKRLRVTERYASMLRKLIVSETIHWSRDIYVEHASGIRQYVLPPLGPGNAVP

SEQ ID NO: 22909 - protein, 994 aa, Blattella germanica
MNTETNEQSDHTTINVDFSHAEVGLSQTQVSSQNPCPHCGGLFKGTHGVAIHISRAHPPEHRQSILTRQSRTKQSTSSEPQLRNPTDNDQSIVDRQVDVTEINDCSVLNDDLATYKNEMQKWKLEFSKNNTNDSFNTKVQEFLNFLARAVHLLPGPKHPAVRFYEARRQRRQFSNQVRYKQSSNPERGTKRARDKRRELYEYQKTQFLFYNQRRKAVRSALNDRHTACKVDINKIFNYFSSRLSTENSCERPAYSSNVTEPERAVLDSTEDSVITKQEVAVAVSKIAADTAPGPDHVLVRALKDATCYEIIAKIATTMLQHSFVPECLQKARTVLIYKGGDDKDLGNWRPITICSVVRRIIERILDARLRALVNLCENQRGFTNSPGTLINTSILESILVAAKSKKKDCTIVFLDISKAFDNVGHNHLQNSLSALRIPFKLSSLILQLQRGNKTQIETGRCRTKPIDIKRGIMQGSPLSPILYNISTDHILDELSNQELQDEYGFSVSPGLSNITALGFADDTLIAAKSMNSARILVELAMSRFKEIGLDINTDKCRCISIIKGCVRYNPLNLTSGQTIASITPDENIKYLGVSYNATILDAANSIEELKNKLDRLASTPLLQPHQKYTVLCSFICPTLIYKFQTTPLKKLPAKFLSDADVLIKTTLKEVLQLPTDTPDSMLYTDRKYKGLGLFNSSWEAFLQHINACQRLQQSQNIHVNTCRNLSHEIKTCIENLGLETTESETYSVKKIRKELRERAFQSWCSLSQKGKGVILYKEHTPANKWIRQPDRLSSSDWRLALKMTANVCPLRAVPGRSRDGNHCRRCSSEMETLAHVLGACPFSESLRNSRHHHIRSVIADALRKKGLVVHEEVHGISTNGSSRRIDMLAIPPGSTSAYIIDPTVRFETDEQQPAEVNAEKCRIYNPTVPFYLEKYQLTSIEVIGLLVGARGTIPGFFVKFCRKFQLNNNLIRDVSHAAIKGSLAILRNHLYSLC

SEQ ID NO: 22910 - protein, 995 aa, Blattella germanica
MNTETNEQSDHTTINVDFSHAEVGLSQTQVSSQNPCPHCGGLFKGTHGVAIHISRAHPPEHRQSILTRQSRTKQSTSSEPQLRNPTDNDQSIVDRQVDVTEINDCSVLNDDLATYKNEMQKWKLEFSKSNTNDSFNTKVQEFLNFLARAVHLLPGPKHPAVRFYEARRQRRQFSNQVRYKQSSNPERGTKRARDKRRELYEYHKTQFLFYNQRRKAVRSALNDRHTACKVDINKIFNYFSSRLSTENSCERPAYSSNVTEPERAVLDSTEDSVITKQEVAVAVSKIAADTAPGPDHVLVRALKDATCYEIIAKIATTMLQHSFVPECLQKARTVLIYKGGDDKDLGNWRPITICFVVRRIIERILDARLRALVNLCENQRGFTNSPGTLINTSILESILVAAKSKKKDCTIVFLDISKAFDNVGHNHLQNSLSALRIPFKLSSLILQLQRGNKTQIETGRCRTKPIDIKRGVMQGSPLSPILYNISTDHILDELSNQELQDEYGFSVSPGLSNITALGFADDTLIAANSMNSARILVELAMSRFKEIGLDINTDKCRCISIIKGCVRYNPLNLTSGQTIASITPDENIKYLGVSYHNATILDAANSIEELKNKLDRLASTPLLQPHQKYTVLCSFICPTLIYKFQTTPLKKLPAKFLSDADVLIKTTLKEVLQLPTDTPDSMLYTDRKYKGLGLFNSSWEAFLQHINACQRLQQSQNIHVNTCRNLSHEIKICIENLGLETTESETYSVKKIRKELRERAFQSWCSLSQKGKGVILYKEHTPANKWIRQPDRLSSSDWRLALKMTANVCPLRAVPGRSRDGNHCRRCSSEMETLAHVLGACPFSESLRNSRHHHIRSVIADALRKKGLVVHEEVHGISTNGSSRRIDMLAIPPGSTSAYIIDPTVRFETDEQQPAEVNAEKCRIYNPTVPFYLEKYQLTSIEVIGLLVGARGTIPGFFVKFCRKFQLNNNLIRDVSHAAIKGSLAILRNHLYSLC

SEQ ID NO: 22911 - protein, 995 aa, Blattella germanica
MNTETNEQSDHTTINVDFSHAEVGLSQTQVSSQNPCPHCGGLFKGTHGVAIHISRAHPPEHRQSILTRQSRTKQSTSSEPQLRNPTDNDQSIVDRQVDVSEINDCSVLNDDLATYKNEMQKWKLEFSKNNTNDSFNTKVQEFLNFLARAVHLLPGPKHPAVRFYEARRQRRQFSNQVRYKQSSNPERGTKRARDKRRELYEYHKTQFLFYNQRRKAVRSALNDRHTACKVDINKIFNYFSSRLSTENSCERPAYSSNVTEPERAVLDSTEDSVITKQEVAVAVSKIAADTAPGPDHVLVRALKDATCYEIIAKIATTMLQHSFVPECLQKARTVLIYKGGDDKDLGNWRPITICSVVRRIIERILDARLRALVNLCENQRGFTNSPGTLTNTSILESILVAAKSKKKDCTIVFLDISKAFDNVGHNHLQNSLSALRIPFKLSSLILQLQRGNKTQIETGRCRTKPIDIKRGVMQGSPLSPILYNISTDHILDELSNQELQDEYGFSVSPGLSNITALGFADDTLIAAKCMNSARILVELAMSRFKEIGLDINTDKCRCISIIKGCVRYNPLNLTSGQTIASITPDENIKYLGVSYHNATILDAANSIEELKNKLDRLASTPLLQPHQKYTVLCSFICPTLIYKFQTTPLKKLPAKFLSDADVLIKTTLKEVLQLPTDTPDSMLYTDRKYKGLGLFNSSWEAFLQHINACQRLQQSQNIHVNTCRNLSHEIKTCIENLGLETTESETYSVKKNRKELRERAFQSWCSLSQKGKGVILYKEHTPANKWIRQPDRLSSSDWRLALKMSANVCPLRAVPGRSRDGNHCRRCSSEMETLAHVLGACPFSESLRNSRHHHIRSVIADALRKKGLVVHEEVHGISKNGSSRRIDMLAIPPGSTSAYIIDPTVRFETDEQQPAEVNAEKCRIYNPTVPFYLEKYQLTSIEVIGLLVGARGTIPGFFVKFCRKFQLNNNLIRDVSHAAIKGSLAILRNHLYSLC

SEQ ID NO: 22912 - protein, 940 aa, Sardina pilchardus
MSPLIALKEPINPFNQQNTQDSVSSDPFTTKMPCSTPPANNHESEDLDPEISQDQNPNLDPLSARAVYQSGNLFSDFYVADEETAIAIERAKKDTSPGTDGIHMAFWKKVPFMNCHLAKLFNLILNSNQFPEDWLVSRLVLIPKSSDQDFDAQDPANYRPISITQTIYRLFMSVMNRKLASIIELSPSQKGFVASNGCVEHAFVLQEILDDSRRNRNPLFAVWIDLRKAFDTVPHAEIFSQLQKKKAPRNLLNCLRHMYENCYNLVQDKDGNSGLLYPNGRGVRQGCPLSPLLFNLCIDPFLRQIDSSKKGYDLCGNQFGALAYADDITLLSGNHNQLREILRQFESFINNLQLGVNHQKSAALTVTFRGWKRTQNSNVILPFSLQGKFIPWMEDFYKYLGTNKNLTSFKDLPPCFEKFSENLKKVSESPLLHFMKLNLLKTYLNPTLEYTMKNSIMRIEELKKVDREIKSAVRQWFSLPQSTTKSLLYTPCSVGGLGLRCLKLDFPCLRLAAALNLIHSRDERIASVADEAVRSVVGRRTNNTMLPVDYFNRDTELISSRDVRSLISSIRLNTKSLELQLKQDSDENPLKVDIDPEYLQDPEFIPEYRQRCATRVKRLRWHVQCMYLSSWKSMTVQGRSVECFVGNKAANSWITQGDVSPYVYRFGLLGRVNALPTKCVLQVRKLVADANCRRCFKATEHLGHVLGGCRFGERERSARHNHVVNLITEQMKPNKDWVLFTDSIFPQIPSNRRPDIVLLNDKTKEVRICDIAVSFESDSSRLQTVHAHKLNKYTQEQSEWMEQGYSCDLHALVFGALGAHLNVNQEAYKALFIKTKNRRHALNKSLTKSILLDSANIWRSHVKDTAATPHGKFGEFHPQIPKTPTLIQLTKFTNPPKRYDRNNCHKNPKIPKLPLKNPPSRNQNHPKNLKLMIRDVLPPK

SEQ ID NO: 22913 - protein, 924 aa, Lepidurus apus
MELAEFFPERTVESIKGQRRPDSYKNLVITIRNQLLNKPELISPVTPPSKIPSKDISAWLDFLLALPKDKKIRCNEHVLDGIITDAQNGLSVIERFDAYLGSVLIGKDPALSSKFEHKEPVDPENRRKRRDREYARVQNFYKKHRSACINSILDCNTRVHKDIPDLEPYWAGIFESESPPDDEPPEFATDEVPTAIWRYISFFEMRSQYPESQSAPGPDNFTTKALKNLPARILNKILNLLIFIEDLPPILKRHRTVLIPKVDSPDNPGDFRPITISSVVVRHLNKILSSRLVANIPLNKRQKAFLPMDGCAENIFLLDFILRDARKNIKSMNLATVDVRKAFDRVSHHSIFRSLVEVRAPTGFLNYIKNSYQNCSTNLAYGGNILPQTIYMNRGVKQGDPLSPFLFNLVIDSIIRKLPENIGYPISEDLKVNCIAYADDLILLASSRMGLKMLFEILEINLPKRGLELNIDKCHALSLIASGKTKTTYISSSKELDFQGKSVRNLTVSNSWKYLGIEFSHVGRSESFNPELEALLNKIQKSPLKLQQKLYAVRTHLIPRLIHGLTLSKSNLGELNGMDKILRRYIRSWLRLPKDCPTGYFHAPVVAGGLGIMSLRTNILNSRRNRLLRLANSTDEVSIHLSQSEPIKKEISKLTELMTMNGVLLSSVNKIREHWTKALRSSYDGRALAYSDFFPFANHWVIEDKLMQPAHIFADMIKLRINALPTRARCSRGRAAKDTSCRAGCLDQGSKSVETINHIAQVCPRTHGARVKRHDKISAYICKNIPARTGTLLTEPHYQTRSGLRKPDLVILSDTSAKVVDFQVVNDNANLELEYKRKTEKYSLDPDFANALSLKHKNINKFEFFAVTFNIRGHPAKSSANFLRSIGVPSRSIMIASIICLEKTLEIWRMFNQSTALTKQRRLP

SEQ ID NO: 22914 - protein, 992 aa, Pissodes strobi
MQSNLIKYNGIPIENRPKILKLICNKNILSTTRCVNTILGEITNTITSIEDTYHFLYAAAKTVCEAHGVDLEKSKNKINQKGRTPRETDCPPWRRRIETNINKTRTKLGILTEFIKYQGRPSVRVSKKAEKILKDAKISINTPNYQQEIHLFCDRLKQKVAVLGARIRRYNQAKKKRDQLKLFEQNQKQFYRNLENQNINCSTCPSETDMLNYWNGIWGKTERHENSYWLEEEKRRTRQLEDMPDITFSKACIANAINKAPNWKAPGPDGIHNFWLKKFTAIHGIMAKQFQEILEHPEKLPKMMCGGVTYMLPKKENAANPQDYRPITCLSNIYKLLTKLLCTKITEHLDKHHVVATEQNGCRAGSKGSKELLIIDNVVGKQAKNKLRNLSVAWIDYKKAYDSVPHSWLTEVLRLYKINYKIVNLLQQAMADWNTTLIVKGDELSYKSAPVQIKTGIYQGDSLSPIWFCLALNPLSSMLKNSPYGYKITNRNETRLSHLMYMDDLKIYATSKDQLQSMLEMVSRFSKDIKMEFGLTKCATLHLKRGKCTALPNLRLLDDTEIETLSAPAYKYLGMLQTGHIQDKAMRAKTRDLYLKRVKAVAKTYLPAKHKIQAINAWAVPILTYTYGVIKWSNTDLQELDRSTRRMLTQHRMLHPSSSTSRLYLPRTNGGRGLLNVESTCNKEKYKLANYFRNKDTALHQAVVSIDVAYSPINLAQDLEELTIPTAQQTLAEIKGMSLHGRYFNDLETDSVDKEASLSYLNTGSLTGETEGFICAIQEQVVSTRAYRKNILKENMTSDKCRLCQKTAESIQHISSGCSMLAPTDYTERHNNIASILHSHIAKNANLISEVKPYYKSHPPPLLENNNCKLYWDVQMETDRPVTHNKPDIIWIITKERKATIIDIAVPLDQNIQKTFSEKLLKYQDLAYDLKNTYQLKEVVILPFVISCNGIVHKEFRNNLKKLDIGEHTVEQCVKAAILGTVRVVRKTLNKP

SEQ ID NO: 22915 - protein, 1181 aa, Pissodes strobi
MENQNLASDVPTVRASVDTGQDSPVRGTTNLAASSRLRNPLGPASQGPGENGLDDVQQNPAYPTNQPTNTGRMRWTTQLNMSLMYAYYRVTKIETDLTLYRGRLQQLWHQLHPDIPRTEQGLASQVNSIIRRQALSNAELDAIKARLRKEIRPSDERAEGQEDGNQGEDQNNEIQNDNIENEGVAAGEEQTGSEEEAENRKAILRSEMQSNLMKYNGIPIENRPKILKLICNKNILSTTRCVNTILGEITNTITSIEDTYHFLYAAAKTVCEAHGVDLEKSKNKINQKGRTPRETDCPPWRRRIETNINKTRTKLGILTEFIKYQGRPSVRVSKKAEKILKDAKISINTPNYQQEIHLFCDRLKQKVAVLGARIRRYNQAKKKRDQLKLFEQNQKQFYRNLENQNINCSTCPSETDMLNYWNGIWGKTERHENSYWLEEEKRRTRQLEDMPDITFSKACIANAINKAPNWKAPGPDGIHNFWLKEFTAIHGIMAKQFQEILEHPEKLPKMMCGGVTYMLPKKENAANPQDYRPITCLSNIYKLLTNLLCTKITEHLDKHHVVATEQNGCRAGSKGSKELLIIDNVVGKQAKNKLRNLSVAWIDYKKAYDSVPHSWLTEVLRLYKINYKIVNLLQQAMADWNTTLIVKGDELSYKSAPVQIKTGIYQGDSLSPIWFCLALNPLSSMLKNSPYGYKIPNRNETRLSHLMYMDDLKIYATSKDQLQSMLEMVSRFSKDIKMEFGLTKCATLHLKRGKCTALPNLRLLDDTEIETLSAPAYKYLGMLQTGHIQDKAMRAKTRDLYLKRVKAVAKTYLPAKHKIQAINAWAVPILTYTYGVIKWSNTDLQELDRSTRRMLTQHRMLHPSSSTSRLYLPRTNGGRGLLNVESTCNKEKYKLANYFRNKDTALHQAVVSIDLAYSPINLAQDLEELTIPTAQQTLAEIKGMSLHGRYFNDLETDSVDKEASLSYLNTGSLTGETEGFICAIQEQVVSTRAYRKNILKENMTSDKCRLCQKTAESIQHISSGCSMLAPTDYTERHNNIASILHSHIAKNANLISEVKPYYKSHPPPLLENNNCKLYWDVQMETDRPVTHNKPDIIWIITKERKATIIDIAVPLDQNIQKTFSEKLLKYQDLAYDLKNTYQLKEVVILPFVISCNGIVHKEFRNNLKKTRHWRAHCRAMC

SEQ ID NO: 22916 - protein, 944 aa, Pissodes strobi
MQSNLMKYNGIPIENRPKILKLICNKNILSTTRCVNTILGEITNTITSIEDTYHFLYAAAKTVCEAHGVDLEKSKNKINQKGRTPRETDCPPWRRRIETNINKTRTKLGILTEFVKYQGRPSVRVSKKAEKILKDTKISINTPNYQQEIHLFCDRLKQKVAVLGARIRRYNQAKKKRDQLKLFEQNQKQFYRNLENQNINCSTCPSETDMLNYWNGIWGKTERHENSYWLEEEKRRTRQLEDMPDITFSKACIANAINKAPNWKAPGPDGIHNFWLKKFTAIHGIMAKQFQEILEHPEKLPKMMCGGVTYMLPKKENAANPQDYRPITCLSNIYKLLTKLLCTKITEHLDKHHVVATEQNGCRAGSKGSKELLIIDNVVGKQAKNKLRNLSVAWIDYKKAYDSVPHSWLTEVLRLYKINHKIVNLLQQAMADWNTTLIVKGDELSYKSAPVQIKTGIYQGDSLSPIWFCLALNPLSSMLKNSPYGYKITNRNETRLSHLMYMDDLKIYATSKDQLQSMLEMVSRFSKDIKMEFGLTKCATLHLKRGKCTALPNLQLLDDTEIETLSAPAYKYLGMLQTGHIQDKAMRAKTRDLYLKRVKAVAKTYLPAKHKIQTINAWAVPILTYTYGVIKWSNTDLQELDRSTRRMLTQHRMLHPSSSTSRLYLPRINGGRGLLNVESTCNKEKYKLANYFRSKDTTLHQAVVSIDLAYSPINLAQDLEELTIPTAQQILAEIKGMSLHGRYFNDLETDSVDKEASLSYLNTGSLTGETEGFICAIQEQVVSTRAYRKNILKENMTSDKCRLCQKTAESIQHISSGCSMLAPTDYTERHNNIASILHSHIAKNANLISEVKPYYKSHPPPLLENNNCKLYWDVQRETDRPVTHNKPDIIWIITKERKATIIDIAVPLDQNIQKTFSEKLLKYQDLAYDLKNTYQLKEVVILPS

SEQ ID NO: 22917 - protein, 1181 aa, Pissodes strobi
MENQNLASDVPTVRASVDTGQDSPVRGTTNLAASSRLRNPLGPASQGPGENGLDDVQQNPAYPTNQPTNTGRMRWTTQLNMSLMYAYYRVTKIETDLTLYRGRLQQLWHQLHPDIPRTEQGLASQVNSIIRRQAPSNAELDAIKARLRKEVRPSDERAEGQEDGNQGEDQNNEIQNDNIENGGVAAGEEQTGSEEEAENRKAILRSEMQSNLMKYNGIPIENRPKILKLICNKNILSTTRCVNTILGEITNTITSIEDTYHFLYAAAKTVCEAHGVDLEKSKNKINQKGRTPRETDCPPWRRRIETNINKARTKLGILTEFIKYQGRPSVRVSKKAEKILKDAKISINTPNYQQEIHLFCDRLKQKVAVLGARIRRYNQAKKKRDQLKLFEQNQKQFYRNLENQNINCSTCPSETDMLNYWNGIWGKTERHENSYWLEEEKRRTRQLEDMPDITFSKACIANAINKAPNWKAPGPDGIHNFWLKKFTAIHGIMAKQFQEILEHPEKLPKRMCGGVTYMLPKKENAANPQDYRPITCLSNIYKLLTKLLCTKITEHLDKHHVVATEQNGCRAGSKGSKELLIIDNVVGKQAKNKLRNLSVAWIDYKKAYDSVPHSWLTEVLRLYKINYKIVNLLQQAMADWNTTLIVKGDELSYKSAPVQIKTGIYQGDSLSPIWFCLALNPLSSMLKNSPYGYKITNRNETRLSHLMYMDDLKIYATSKDQLQSMLEMVSRFSKDIKMEFGLTKCATLHLKLGKCTALPNLRLLDDTQIETLSAPAYKYLGMLQTGHIQDKAMRAKTRDLYLKRVKAVAKTYLPAKHKIQAINAWAVPILTYTYGVIKWSNTDLQELDRSTRRMLTQHRMLHPSSSTSRLYLPRTNGGRGLLNVESTCNKEKYKLANYFRNKDTALHQAVVSIDLAYSPINLAQDLEELTIPTAQQTLAEIKRMSLHGRYFNDLETDSVDKGASLSYLNTGSLTGETEGFICAIQEQVVSTRAYRKNILKENMTSDKCRLCQKTAESIQHISSGCSMLAPTDYTERHNNIASILHSHIAKNANLISEVKPYYKSHPPPLLENNNCKLYWDVQMETDRPVTHNKPDIIWIITKERKATIIDIAVPLDQNIQKTFSEKLLKYQDLAYDLKNTYQLKEVVILPFVISCNGIVHKEFRNNLKKTLHWRAHCRAMC

SEQ ID NO: 22918 - protein, 1199 aa, Pissodes strobi
MENQNLASDVPTVRASVDTGQDSPVRGTTNLAASSRLRNPLGPASQGPGENGLDDVQQNPAYPTNQPTNTGRMRWTTQLNMSLMYAYYRVTKIETDLTLYRGRLQQLWHQLHPDIPRTEQGLASQVNSIIRRQALSNAELDAIKARLRKEIRPSDERAEGQEDGNQGEDQNNEIQNDNIENEGVAAGEEQTGSEEEAENRKAILRSEMQSNLMKYNGIPIENRPKILKLICNKNILSTTRCVNTILGEITNTITSIEDTYHFLYAAAKTVCEAHGVDLEKSKNKINQKGRTPRETDCPPWRRRIETNINKTRTKLGILTEFIKYQGRPSVRVSKKAEKILKDAKISINTPNYQQEIHLFCDRLKQKVAVLGARIRRYNQAKKKRDQLKLFEQNQKQFYRNLENQNINCSTCPSETDMLNYWNGIWGKTERHENSYWLEEEKRRTRQLEDMPDITFSKACIANAINKAPNWKAPGPDGIHNFWLKKFTAIHGIMAKQFQEILEHPEKLPKMMCGGVTYMLPKKENAANPQDYRPITCLSNIYKLLTKLLCTKITEHLDKHHVVATEQNGCRAGSKGSKELLIIDNVVGKQAKNKLRNLSVAWIDYKKAYDSVPHSWLTEVLRLYKINYKIVNLLQQAMADWNTTLIVKGDELSYKSAPVQIKTGIYQGDSLSPIWFCLALNPLSSMLKNSPYGYKITNRNETRLSHLMYMDDLKIYATSKDQLQSMLEMVSRFSKDIKMEFGLTKCATLHLKRGKCTALPNLRLLDDTEIETLSAPAYKYLGMLQTGHIQDKAMRAKTRDLYLKRVKAVAKTYLPAKHKIQAINAWAVPILTYTYGVIKWSNTDLQELDRSTRRMLTQHRMLHPSSSTSRLYLPRTNGGRGLLNVESTCNKEKYKLANYFRNKDTALHQAVVSIDLAYSPINLAQDLEELTIPTAQQTLAEIKGMSLHGRYFNDLETDSVDKEASLSYLNTGSLTGETEGFICAIQEQVVSTRAYRKNILKENMTSDKCRLCQKTAESIQHISSGCSMLAPTDYTERHNNIASILHSHIAKNANLISEVKPYYKSHPPPLLENNNCKLYWDVQMETDRPVTHNKPDIIWIITKERKATIIDIAVPLDQNIQKTFSEKLLKYQDLAYDLKNTYQLKEVVILPFVISCNGIVHKEFRNNLKKLDIGEHTVEQCVKAAILGTVRVVRKTLNKP

SEQ ID NO: 22919 - protein, 1181 aa, Pissodes strobi
MENQNLASDVPTVRASVDTGQDSPVRGTTNLAASSRLRNPLGPASQGPGENGLDDVQQNPAYPTNQPTNTGRMRWTTQLNMSLMYAYYRVTKIETDLTLYRGRLQQLWHQLHPDIPRTEQGLASQVNSIIRRQALSNAELDAIKARLRKEVRPSDERAEGQEDGNQGEDQNNEIQNDNIENEGVAAGEEQTGSEEEAENRKAILRSEMQSNLMKYNGIPIENRPKILKLICNKNILSTTRCVNTILGEITNTITSIEDTYHFLYAAAKTVCEAHGVDLEKSKNKINQKGRTPRETDCPPWRRRIETNINKTRTKLGILTEFIKYQGRPSVRVSKKAEKILKDAKISINTPNYQQEIHLFCDRLKQKVAVLGARIRRYNQAKKKRDQLKLFEQNQKQFYRNLENQNINCSTCPSETDMLNYWNGIWGKTERHENSYWLEEEKRRTRQLEDMPDITFSKACIANAINKAPNWKAPGPDGIHNFWLKKFTAIHGIMAKQFQEILEHPEKLPKMMCGGVTYMLPKKENAANPQDYRPITCLSNIYKLLTKLLCTKITEHLDKHHVVATEQNGCRAGSKGSKELLIIDNVVGKQAKNKLRNLSVAWIDYKKAYDSVPHSWLTEVLRLYKINYKIVNLLQQAMADWNTTLIVKGDELSYKSAPVQIKTGIYQGDSLSPIWFCLALNPLSSMLKNSPYGYKITNRNETRLSHLMYMDDLKIYATSKDQLQSMLEMVSRFSKDIKMEFGLTKCATLHLKRGKCTALPNLRLLDDTEIKTLSAPAYKYLGMLQTGHIQDKAMRAKTRDLYLKRVKAVAKTYLPAKHKIQAINAWAVPILTYTYGVIKWSNTDLQELDRSSRRMLTQHRMLHPSSSTSRLYLPRTNGGRGLLNVESTCNKEKYKLANYFRNKDTALHQAVVSIDLAYSPINLAQDLEELTIPTAQQTLAEIKGMSLHGRYFNDLETDSVDKEASLSYLNTGSLTGETEGFICAIQEQVVSTRAYRKNILKENMTSDKCRLCQKTAESIQHISSGCSMLAPTDYTERHNNIASILHSHIAKNANLISEVKPYYKSHPPPLLENNNCKLYWDVQMETDRPVTHNKPDIIWIITKERKATIIDIAVPLDQNIQKTFSEKLLKYQDLAYDLKNTYQLKEVVILPFVISCNGIVHKEFRNNLKKTRHCRAHCRAMC

SEQ ID NO: 22920 - protein, 720 aa, Drepana arcuata
MSYRNGSAAGLDGLAPQHLKDLLSGVQGNGAVSLLKNLTALINLMLSGKVNEDILSTLYGANLCALKKKDGGLRPIAVGMTYRRLASKICCRALFQNLTNYFQPFQLGFGSKGGCEAATHSLRTYLSNGFGKILLKVDVKTAFNSVDRSAMLTQVKEKTPQIYPYMFQCYSSPSKLAYHENVLFSSVGCQQGDPLGPVIFSLAIHPIIHKLISNFNVWYLDDGTLGGDANSVYSDLETIIKDFETIGLNLNFSKSELYVSEDVWNKNEIISKFNDLAPGIKILDRSSLRLLGSPIFEESFAPFIDEKIQNFESTSQRLETISTHRAYYIIRHCLFVPKFTHVLRCCHLWNHTNLLTSLDNIILKTLSRILNIHFDNKIWTQASLPIKYGGLGIRKTSSVALPAFLSSVFSSRDLIGKILAPSQSDFEVSWLSEARDAWYLAAGPGAEEPRKLSVQKLWDEPLSVLEYDSLLESASESHERARLLAVARWESGLWLQALPSANTGTVLDNITFRLAVYLRLGAKVNVPHLCHCGEGVDNLGHHGLSCFRSAGRLSRHAAINDLIRRALATARMPAILEPNGLAREDGKRPDGLTLVPWRLGRPLVWDATCVDTLAPSHLPETSVAAGAAAARQECLKRRKYATLSQDYVFVAFGVETLGPWGPDALHFYRDVSRKLFEASRDKRAGEYFAQRISIAIQRGNAASLLGTLPRDTDLGHLFYL

SEQ ID NO: 22921 - protein, 966 aa, Drepana arcuata
MENIAPVLASQQANIVSLDGLIQCPLCTQVRFFKGQRGLRIHIGKSHKNPDETSRAAPEQVTGGLGDSSNRISDSRSFSDYLSDLKRSSPVIRRVPRGVRDTVAEKLSERINIAVTENSGHAWEQLLVFPFQILHISLKKDDRKHTLTHHIRQNCNSPPTIISNSCTQNFRRNVCSIVEKKIDEGDIQGAARLLFSNDTIAPNNQATLDALRSKHPPVSTFQNFPVTSYDSETILQVTKQDVLNAVMSFRNGSAAGLDGLAPQHLKDLLSGVQENGAVSLLKNLTALINLMLSGKVNEDILSTLYGANLCALKKKDGGLRPIAVGMTYRRLASKICCRALFQNLTNYFQPFQLGFGSKGGCEAATHSLRTYLSNGFGKILLKVDVKNAFNSVDRSAMLTQVKEKTPQIYPYMFQCYSSPSKLAYHENVLYSSVGCQQGDPLGPVIFSLAIHPIIHKLISNFNVWYLDDGTLGGDANSVYSDLETIIKDFETIGLNLNFSKSELYVSEDVWNKNEIISKFYDLAPGIKVLDRSSLRLLGSPIFEESFAPFIDEKIQNFESTSQRLETISTHRAYYIIRHCLFVPKFTHVLRCCHLWNHTNLLTSLDNIILKTLSRILNIHFDNKIWTQASLPIKYGGLGIRKTSSVALPAFLSSVFSSRDLIGKILAPSQSDFEVSWLSEARDAWYLAAGPGAEEPRKLSVQKLWDEPLSVLEYDSLLESASESHERARLLAVARWESGLWLQALPSANKGTFLDNITFRLAVYLRLGAKVNVPHLCHCGEGVDNLGHHGLSCFRSAGRLSRHAAINDLIRRALATARMPAILEPNGLAREDGKRPDGLTLVPWRLGRPLVWDATCVDTLAPSHLPETSVAAGAAAARQECLKRRKYATLSQDYVFVAFGVETLGPWGPDALHFYRDVSRKLFEASRDKKAGEYFAQRISIAIQRGNAASLLGTLPRDTDLGHLFYL

SEQ ID NO: 22922 - protein, 966 aa, Drepana arcuata
MENIAPVLASQQANIVSLDGLIQCPLCTQVRFFKGQRGLRIHIGKSHKNPDETSRAAPEQVTGGLGDSSNRISDSRSFSDYLSDLKRSSPVIRRVPRGVRDTVAEKLSERINIAVTDNSGHAWEQLLVFPFQILHISLKKDDRKHTLTHHIRQNCNSPPTIISNSCTQNFRRNVCSIVEKKIDEGDIQGAARLLFSNDTIAPNNQATLDALRSKHPPVSTFQNFPVTSYDSETILQVTKQDVLNAVMSFRNGSAAGLDGLAPQHLKDLLSGVQGNGAVSLLKNLTALINLMLSGKVNEDILSTLYGANLCALKKKDGGLRPIAVGMTYRRLASKICCRALFQNLTNYFQPFQLGFGSKGGCEAATHSLRTYLSNGFGKILLKVDVKTAFNSVDRSAMLTQVKEKTPQIYPYMFQCYSSPSKLAYHENVLFSSVGCQQGDPLGPVIFSLAIHPIIHKLISNFNVWYLDDGTLGGDANSVYSDLETIIKDFETIGLNLNFSKSELYVSEDVWNKNEIISKFNDLAPGIKILDRSSLRLLGSPIFEESFAPFIDEKIQNFESTSQRLETISTHRAYYIIRHCLFVPKFTHVLRCCHLWNHTNLLTSLDNIILKTLSRILNIHFDNKIWTQASLPIKYGGLGIRKTSSVALPAFLSSVFSSRDLIGNILAPSQSDFEVSWLSEARDAWYLAAGPGAEEPRKLSVQKLWDEPLSVLEYDSLLESASESHERARLLAVARWESGLWLQALPSANTGTFLDNITFRLAVYLRLGAKVNVPHLCHCGEGVDNLGHHGLSCFRSAGRLSRHAAINDLIRRALATARMPAILEPNGLAREDGKRPDGLTLVPWRLGRPLVWDATCVDTLAPSHLPETSVAAGAAAARQECLKRRKYATLSQDYVFVAFGVETLGPWGPDALHFYRDVSRKLFEASRDKRAGEYFAQRISIAIQRGNAASLLGTLPRDTDLGHLFYL

SEQ ID NO: 22923 - protein, 920 aa, Chrysotoxum bicinctum
MEDLHTLIYASAVTIAIKMGYKIRYMCNNRISKGPKINQTLKRIEIKIKNLRSDLEKLNSYITGNSSRRLKNKVRKILAMYIRHSRFELNNSNTILTRDTIRQKLCIQVARQRKYKLSNQRRQNNKTFTTNEKSFYRSLKKNPSTEDDSFPSSEDTETYWSSIWSNENNHNTDAKWIRDEKQRHMQLEEMSTYHLTCDRVKQIISKTHNWKAPGPDKIQNFWLKRLPAMHEKLTELLNECIQDPKKFPTSLTNGITYLLAKDKGFNGNPAKGRPITCLPTMYKIMTACLSYLINDHLVQNHIICEEQKGCSKYAKGCKEQLTIDQVILEQTNSQTRNLHACFIDYQKAFDSVPHSWLIEVLRIYKIHPSIIAFLQHNMTQWRTNIQIPTKTGTVKTSDINIKCGIFQGDCLSALWFCIALNPLSTLLKNSKYGYKIKGNSSQEIISHLLYMDDLKIYASTRQSLEQLIKIVTMFSNDINMKFGLDKCRTIHINKGKITSSEGQDSNTQEIKQMEEQDIYKYLGMVQNNRINKRIVKTNLTREFKARIHKIAKANLNGKNLIKAINTYAAPILTYSFGVIKWTATEIQSLQRKIRTMLTEYKFHHPKSCCERMITPRREGGRGLVDLQTLHDNQIQSLRDYFYMKAQTSRLIKTITEADKNLTPLNLNGSFERQSEDRSVMEQNWAIKPIHGRYYRSINAENVDKLMSHKWLLNGNLYAETEAFMIAIQDQVIPTKNYRKTVIKDPNVTDDKCRRCMSQVETIDHIISGCMHLAQNEYTKRHNNVVKILHKKLLEKYKIPSKGTPYYAYSPQTIVENENVKIYYDRTIYSDHTRLHNRPDITILEKKERRGYFIDIAVPATRNTSRTYAEKCSRYAELAVETKRNWNLDEMKIIPIIISAEGVIDKNLKKISTCSDCDKPP

SEQ ID NO: 22924 - protein, 882 aa, Coremacera marginata
MTGIRSRRLKTKVRKIFKIHNKHSRYELNNSNTILTRDTIRQKLYVQITKQRKYKLSYQRRENNRTFKANENKFYRSLRVKTDSNEDTLPNKNDTEKYWSSIWSTKANHSPYVQWINEEKQRYENLEEMSLDCLTPTQVKEIIAKTHNWKSPGLDKIQNFWFKRLPATHEKLTELINECLQDPNKFPPEFSNGITYLLPKGSGFNSNPANGRPISCLPTIYKITTACLNLLIYNHLSQNNIICEEQKGCSKYAKGCKEQLTIDQLILEQTVKQSRNLHACFIDYQKAFDSVPHSWLIEVMEIYKINPKIINFLKDNMANWRTNIEIFSKTGSIKTAEIMIRNGIFQGDCLSALWFCIALNPLSNLLNNTKYGYKIKSTVRQTTLSHLLYMDDLKIYASTRQHLQQLIEIVSMFSNDINMKFGLDKCRTICITRGKMARSQDVDVHVSYIREMEEHEVYKYLGMIQNRRIEKKTVKETLTREFKSRIHKIAKANLSGKHLIKAVNTFAIPILTYSFGIIKWTTTELQALQRKIRTMLTSYKFHHPKSCCERMVTTRKEGGRGLIDLQVLHDNQIQSLRNYFHCKAERSSLIRAIVEADKNLTPLNLDGHFERLAEDKVIRERNWAIKAIHGQYYRDINGDNVDKLMSNRWLLNGDLYAETEAFMIAIQDRVIPTKNYRKHVMKDLTVVEDNCRRCRNQLETINHIISGCTTLAQSEYTRRHNNIAKILHKKLLEKYKITPDKAPYYVYKPQPVVENHNIKVYYDRTIHSEHTRIHNRPDITVIDKVERKGVFIDIAIPATRNISRTYSEKRNRYSELAVEIKRNWNLKEVKIVAIIISAEGVVHNKLQEDVRLLGLRRNIIDAMQKSVIIDTCHITRNFMNIS

SEQ ID NO: 22925 - protein, 1181 aa, Coremacera marginata
MESTNNEVTPGTSDNPIASGLHNSRALGLVTGPIVRSQLQNNENNNTNTQAESEQRAQSDAALTDLGRIRQRRKWTNEINEDLLRTYYIVTIQEQNLTSYRAQLRSIFVAQHPEFNVTEQRLADQIRVIHRNNLIPEIRRNIIKESTRTALDISNNLEQNDPLPNETQQEANHQDQIQPLTSNHVRNSDVEEIFYQQYNIYRDINPLMRPTIPKLNTSVKLSKVIQYINDVIIAREITQINTLGELNCLIYTAAVTISMKMGHNIRLIVRRQREPRDKLTLKRIALKIKELRSDLERLKKYISGSHSRRLRHKMRRIYERHNRHSRYELNNSNALLIMDTIKQKLSVQTAKQRKYKLSNQRRENNKLFKTNEKNFYRTLRTKMDSGEDKLPTKEDTEQYWSSIWSNQATHNKNAEWIKLEKLNYQSLENMPIPCLTIQQVKQVISKTHNWKAPGVDKVQNFWFKRLPALHEKLTMVLNECIQDPDKFPSYLTNGITYLLPKGKGFENNPANGRPITCLPTMYKIMTACLNLLIYDHVTHNNILCEEQKGCSKNAKGCKEQLTIDQIILEHTTSRSKNLLTCFIDYQKAFDSIPHTWLIEVVEIYKIHPSITNFLKRSMEQWITNIEIRSKSEQIRTSNIKINCGIFQGDCLSPLWFCLALNPLSNLLIKSKYGVKIKINNDREILSHLLYMDDLKIYASSKQHLDQLVKIVSVFSEDINMKFGLDKCKTVYITRGKVTKTQDQDIQNIREMEENEVYKYLGMVQNNRIDKKSVKNNLTREFKSRMHKIAKTNLSGKHIIKAVNTYAIPILTYSFGIIKWSTTELQALQRKMRTMLTSYKLHHPKSCCERMLTSRREGGRGLTDLQILHDSQIQSLRNYFYLRSTRSNLIKTLIEIDKNLTPLNLDGGFERRAIDKEQRAQMWAIKPIHGQYYRSINNDNVDKLLSHRWLLNGEVYGETEAFMIAIQDRVIPTKNYKKHVMKDPNMQEDSCRRCGILPETIDHIISACKCLAQTEYTKRHNNVAKILHKKLLDKHKIVVENTPYYKYEPLPVVENDNAKIYYDRTIHSEHTRLHSRPDLTIFDKKEHKGIFIDVAIPANRNISRTYNEKRSRYAELAVEIKRAWNLKEVKIIEIIISAEGIIDKQLKEDIKILGLQQHTIDAMQKAVILDTCHLTRNFMNIN

SEQ ID NO: 22926 - protein, 752 aa, Coremacera marginata
MPIPCLTIQQVKQVVSKTHNWKAPGVDKVQNFWFKRLPALHEKLTMVLNECIQDPDKFPSYLTNGITYLLPKGKGFENNPANGRPITCLPTMYKIMTACLNLLIYDHVTHNNILCEEQKGCSKNAKGCKEQLTIDQIILEHTTSRSKNLHTCFIDYQKAFDSIPHTWLIEVMEIYKIHPSITNFLKRSMEQWITNIEIRSKSEQIRTSNIKINCGIFQGDCLSPLWFCLALNPLSNRLIKSKYGVKIKINNEWEILSHLLYMDDLKIYASSKQHLDQLVKIVSVFSEDINMKFGLDKCKTVYITRGKVTKTQDQDIQNIREMEENEVYKYLGMVQNNRIDKKSVKSNLTREFKSRMHKIAKTNLSGKHIIKAVNTYAIPILTYSFGIIKWSTTELQALQRKMRTMLTSYKLHHPKSCCERMLTSRREGGRGLTDLQILHDNQIQSLRNYFYLRSTRSNLIKTLIEIDKNLTPLNLDGGFERRAIDKEQRAQMWAIKPIHGQYYRSINNDNVDKLLSHRWLLNGKVNGETEAFMIAIQDRVIPTKNYKKHVMKDPNMQEDSCRRCGILPETIDHIISACKCLAQTEYTKRHNNVAKILHKKLLDKHKIVVENTPYYKYEPLPVVENDNAKIYYDRTIHSEHTRLHNRPDLTIFDKKEHKGIFIDVAIPADRNISRTYNEKRSRYAELAVEIKRAWNLKEVKIIPIIISAEGIIDKQLKEDIKILGLKQHTIDAMQKAVILDTCHLTRNFMNIN

SEQ ID NO: 22927 - protein, 1179 aa, Chrysotoxum bicinctum
MKKPSNMENTNNELNPGTSDNPTASGSHNSRALGLVTGQSVTSQLQDNENNNTSTHDESEQHAQTDAALTALGRIRQRRKWTNEINEDLLRTYYIVTIQEQNLTGYRTQLRSIFIAQHPEFNVTEQRLADQIRVIHRNNLIPEIRRNIIKESTRTITDMNNNAEQNHFIPDTQHEASNQNQIQHLTDNPDQRQNANLSVSSYSDVEEIFYLQHNVFTNINHAMRPSIPKLNTSIKLSKVIQYVNDVILVREINQINTLDELNNLIYTAAITISIKMGHKIRYTDRRQREPKENPTLKRIALKIKELRSDIERLKKYISGTHSRRLRHKMRKIFQRHNRHSRYELNNSNALLILDTVKQKLSVQTAKQRKYKLSNRKLSLKTDPPEDKIPTKEDTEHYWSSLWSNQATHNKNAEWIKQEKIRNLSLADMQNHCFTIQQIKQVISKTLNWKSPGVDKIQNFWFKRLPAVHEKLTTLMNECIQDPNKFPSYLTNGITYLLPKGKGFENNPSNGRPITCLPTMYKIMSACLNLLIYDHVMKNNILCIEQKGCSKNAKGCKEQLTIDQIILEHTTSHNKNLHTCFIDYQKAFDSVPHTWLIEIMEIYKIHPSIINFLKCIMKHWRTNIEIRSKSVRMRTSDIKIKCGIFQGDCISPLWFCLALNPLSSLLINSKYGVKIKTNTDIEILSHLLYMDDLKIYASSKQHLDQLIRIVSVFSDDINMKFGLDKCKTVCITRGKVTKTQDPNIQNIKEMEENEVYKYLGMVQNNRIEKRSIKNTLTREFKSRIHKIAKTNLSGKHLIKAVNTYAIPILTYSFGIIKWSTTELQALQRKIRTMLTSYKLHHPKSCCERMTTSRKNGGRGLIDLQILHDNQIQSLRTYFHLKSTRLNLIKVLNELDKNLTPLNLDGGFERRAIDKNQREQMWAIKPIHGQYYRSINNDNVDKLLSHRWLLNGVLFGETEAFMIAIQDRVIPTKNYKKYVMKDPNIQEDTCRRCRIQPETIEHIISGCTCLAQTEYTKRHNNVAKIVHKKLLEKHQILVENTPYYKYEPSPVVENDNIKIYYDRTIHSQHTRLHNRPDLTIIDKKEHKGIFIDVAIPANRNISRTYNEKRSRYAELAVEIKRTWNLKEVRIIPIIISAEGIIDKQLKDDIKRLGLKQNIIDAMQKAVILDTCHLTRNFMNIN

SEQ ID NO: 22928 - protein, 827 aa, Thecocarcelia acutangulata
MSNKRRQNNSKFSANEKNFYRDLRNATNLNGSEDTYPSKESTEMYWSDLWSNEVTHNNGAKWINDEKLIYQEIEEMSRDCITCEQVKHIISKTHNWKSPGIDKVQNFWFKRFPAVHQKLTDLINDCIQNPSNFPQIFTKGVTYLVPKNKGFEGNPGNGRPITCLPTIYKILTACLNYLINGHLVNHNIICEEQKGCNKHTKGCKEQLTIDQIILEQAVSHSRNLNLCYIDYQKAFDSVPHSWLIEVLKIYKINQTIIRFLEHNMKHWRTSINVVKETETIQTSDIHIRRGIFQGDCLSALWFCIALNPLSNLLRNTKKGYKIKGSSNTEVLSHLLYMDDLKIYSSTQQGLEHLIRTVSMFRKDITMAFGLDKCKRIHIFKGKIARAEAENEETQIISQMEEGDVYKCLGIAQSRRINSKMVKNNLTREFKGRMHKIAKSNLNGSNLIKAINTYVVPILMYSFGIIKWTVTEIQGLQRMIRTMLTAYKLHHPKSCCERMITPRSEGGKGLVDLQTLHDNQIESLRKYFQIKGERSRLIKVILEADIKLTPLNLSGRFERHAEDRRTREQKWSIKPIHGRFYRSINADNVDKVMSNKWLINGNLYAETEAFMIAIQDQVIPTKNYRKIVLKDPSMVSDTCRRCLSITETIDHIISGCTSLAQNEYTRRHNNVVKILHKNLLLRHNFKTDKLPYYKYDPQPAAENENVKIYYDRTIHTDNTRSHNRPDITIINKRERSGFFIDVAIPATRNISRAYVEKMNKYSDLAVEIKRNWKLKEIKIIPIIISAEGIIDKQLQNNISIIGLQKNIINPIQKSVILDTCHIARNFLN

SEQ ID NO: 22929 - protein, 828 aa, Thecocarcelia acutangulata
MSNKRRQNNSKFSANEKNFYRDLRNATNLNGSEDTYPSKESTEMYWSDLWSNEVTHNNGAKWINDEKLRYQEIEEMSRDYITCEQVKHIISKTHNWKSPGIDKVQNFWFKRFPAVHQKLTDLINDCIQNPSNFPQIFTKGVTYLVPKNKGFEGNPGNGRPITCLPTIYKILTACLNYLINGHLVNHNIISEEQKGCNKHTKGCKEQLTIDQIILEQAVSHSRNLNLCYIDYQKAFDSVPHSWLIEVLKIYKINQTIIRFLEYNMKHWRTSITVVKETETIQTSDIHIRRGIFQGDCLSALWFCIALNPLSNLLRNTKKGYKIKGSSNTEVLSHLLYMDDLKIYSSTQQDLEHLIRAVSMFSKDITMAFGLDKCKRIHIFKGKIARAEAENEETQIISQMEEGDVYKYLGIAQSRRINSKMVKNNLTREFKGRMHKIAKSNLNGSNLIKAINTYVVPILMYSFGIIKWTVTEIQGLQRMIRTMLTAYKLHHPKSCCERMITPRSEGGRGLVDLQTLHDNQIESLRKYFQIKGERSRLIKVILEADIKLTPLNLSGRFERHAEDRRTREQKWSIKPIHGRFYRSINADNVDKVMSNKWLINGNLYAETEAFMIAIQDQVIPTKNYRKIVLKDPSMVSDTCRRCLTITETIDHIISGCTSLAQNEYTRRHNNVVKILHKNLLLRHNFKTDKLPYYKYDPQPVAENENVKIYYDRPIHTDNTRSHNRPDITIINKRERSGFFIDVAIPATRNISRAYVEKMNKYSDLAVEVKRNWKLKEIKIIYPIIISAEGIIDKQLQNNISIIGLQKNIINPIQKSVILDTCHIARNFLN

SEQ ID NO: 22930 - protein, 1177 aa, Thecocarcelia acutangulata
MSDNHEFNSTASGSHLNSRAFGLVPGSNVISESQNRNNINRNQAVDEQHAHSDAALTTAGIPRQRRKWTNEINENLLRAYYIATDQERNLTGYRSQLHTIFVAQHPNFNVSEQRLSDQVRVIHRNNLIPEIRRNAIKDSLVVQQAQELIDEEEHTESNESSIMEQNTNHQEEIDDDHQFSDINAEFEQELEIYKNLSPLMRPSIPKIHSSQRLSLIINYLNREIISPRISEINNLEDLNTIIYSAAVTVAKRMGYKIKHKCNTRINTKFIKNKTIQRIEIKIKTLRSELERLNSFIAGNKSKRLSNKIVKILKKYEKHSRYESNNSNAILARDTVKQKLNVQVSRQRKYLMSNKRRQNNSKFSANEKNFYRDLRNATNLNGSEDTYPSKESTEMYWSNLWSNEVTHNNGAKWINDEKLRYQEIEEMSRDYITCEQVKHIISKTHNWKSPGIDKVQNFWFKRFPAVHQKLTDLINDCIQNPSNFPQIFTKGVTYLVPKNKGFEGNPGNGRPITCLPTIYKILKACLNYLINGHLVNHNIICEEQKGCNKHTKGCKEQLTIDQIILEQAVSHSRNLNLCYIDYQKAFDSVPHSWLIEVLKIYKINQTIIRFLEYNMKHWKTSITVVKETETIQTSDIHIRRGIFQGDCLSALWFCIALNPLSNLLRNTKKGYKIKGSSNTEVLSHLLYMDDLKIYSSTQQDLEHLIRTVSMFSKDITMAFGLDKCKRIHIFKGKIARAEAENEETQIILQMEEGDVYKYLGIAQSRPINSKMVKNNLTREFKGRMHKIAKSNLNGSNLIKAINTYVVPILMYSFGIIKWTVTEIQGLQRMIRTMLTAYKLHHPKSCCERMITPRSEGGRGLVDLQTLHDNQIESLRKYFQIKGERSRLIKVILEADIKLTPLNLSGRFERHAEDRRTREQKWSIKPIHGRFYRSINADNVDKVMSNKWLINGNLYAETEAFMIAIQDQVIPTKNYRKIVLKDPSMVSDTCRRCLTITETIDHIISGCTSLAQNEYTRRHNNVVKILHKNLLLRHNFKTDKLPYYKYDPQPVTENENVKIYYDRTIHTDNTRSHNRPDITIINKRERSGFFIDVAVPATRNISRAYVEKMNKYSDLAVEVKRNWKLKEIKIIPIIISAVGIIDKQLQNNISIIGLQKNIINPIQKSVILDTCHIARNFLN

SEQ ID NO: 22931 - protein, 1107 aa, Eurytoma brunniventris
MNEMENVVNNSSNNNRVSVRVPVDDLVPCPICGDQSRTGHFANVKDLRAHLSKDHRGVDISWTCRVCAKEFPSYMGIAVHIGKCKGVVDPPAPVDNEFACGDCGQSFTSARGLAAHENARHPRTRNQKRKESTASKGKKGKPGIWTEDEVERLIELDAQYGQQRNCNVLIQQHLPSKTAKQISDKRRLLSAAREAESEIEELVPEVQTSDSVFSPAEVSDEDETTIPMPQEDMGQFDSWFNAIKQSIFETESIPAESLIKPLEDRLLAMVNDGGPTDANREEEFHCLVQQFHDIIKSEEEGALRGPRRRRNTGRIREGQKRYRYARCQEIFRRDPRKIAEMVIKGDMSELSEKPKPPQAQVIQEAYSNLWEKCSNKTWRHNGNNRDIAKFTPITIAEVKTKIKRLRNGTAPGPDRVKKEDLLGHDIQIFLTKLYNFCLAFNIFPRAWKKNRTTLIPKKQDNLNDIGNWRPITIGSIVGRVFSGIIDFKLRKMVKFSRRQKGFVPENGCANNISILESGLRVARERLGCVAAILDTAKAFDTVPHNIIVKRLVEAGVPVYLAEYIRRSYDECITEIQSGDGTSVVISIKRGVKQGDPLSPFIFDCVLDPLLHKLEATDKGLPIEDEKVSVLALADDLVLLSDTVEGAQELSSRTNNYLKDMGMTLAPHKSHAFQIVKKGKTFSCVDPQLKVDDAVIPYLDPESSTKYLGVRVGAWRGIVKDSVGPELIESVKRLFSIPLKNGQMLFLLNRYIISHFIYRLISSGISATSLRTIDDEIRQLLKNMLHLHSSVTDCLFYARKRDGGLGILNLEMLVLHARLKHWASMSESNDTVLRAVAGQPRNLNRARLVADSIDVEWPPSVASVEKAKSKYRDNFSDKWSALTSQGHGSKEYFNNPLSNKWLSKYSLLKPSRFLTALQLRTNTFGTLCALARGRTNEDIRCRGCNNREETLGHILGQCTKTKERWVKRHNEVVSFLSERLSSDEKRVLIEPSVVVNNETFRPDIVIIDDKNMTISVCDVTVKYERENWIEVGEQQKLLRYRRVAEHLKTQYRMKKSEVVPLVMGARGIIPSNTRIALRKLGCRDRDIVTTSSYIFERLQQYSPSIGEC

SEQ ID NO: 22932 - protein, 1005 aa, Paelopatides confundens
MHPLIRNAKRVITRNADILRKRTERAAVKSRLPQSTSKFWNDEDTTLLKGLLIRFDGKNRINQLIQPYLPHKTAKQISDKRRTFGDITVPQTTIPMESNQIKEVHAEFAHDKFKIFIEEAESTSCDKSNQHTLDIIKLILKGENPEYEVVDQILKDIVIKVKLSEYTVGPKRKTTKPFPKKKGGGHASRSPAKLPSGGRVFVTEGRTTRGMRKAVRVASYRRIQELFRGRQRQLAQELLDGCVPTGCELPTVTVEETYKGRFETVNAGVDISGYPLPSSLVSNIDLLEPITSVEVCKAFQNTKPGTAPGPDGVTLASLLKLDKSGNQLASMFNIWLLTGRLPNEIKESRSILLPKGKTNLEEIGNWRPLTLSSIIMRLYSRILSARLTKTVNLCPRQKGFLPGSNIAENIELVKALCDRSKRKGVPLAVIFLDLAKAFDTVPHVLIQQSLRRHGVCENFLRIVMDMYEGSFTRFKVVAGTTGKIFIKSGVKQGDPMSPILFNLVLDPLLTKLEKDGKGVSIEGVGNLCSLAYADDSCLVSSSHVGMQRNLDIAVKYFECTGLRLNVKKSIGYMLSPWGKSFIVNDKPEWTVGECSIPLLEEGQTAKYLGARIGPWTNPWPSLGSISKQLQTWCQNISMAPLKPRQKVTILTRFALPRLLFDLTHGGYSRTLLKDIDCSVRFWIKRWLHLPINITNGFFYTSWVDGGLGIVNLTDYTTCARMSNIRHVLQSNDPIVRSFGSHLLGGKAEKMAASSGLPVPTTKRVHKVWRNNARKEWAGKVSQGKGVNLLRGCKLSNNWLGRSSFFSEREYITGILLRTNTYPTKETLCRGRKDKDILCRRCKRTTETIGHISGHCFSVIRQRIVRHNRICMTLTKCAEREGFRVVNEPVLVDSEGKRKKPDLIIYQGDQCFIIDPTVIWDDNKRNLDLAWKGKVDKYQLIIDVVKTKFSVPNVVVLPFVVGARGTWYPPNEIVVRTLRLSRGCIKGILNKVLCDTGKLVTVFMDL

SEQ ID NO: 22933 - protein, 1222 aa, Triatoma infestans
MEYNLRCLRKKPLPEDRQGSSGASAGRGSMRAASGVSLSRRAHTGQPEIITAETSPNRSIQTDVQDPTETNIQTDRHANNQPTPALDVLLPNRGATTKAGKPRQRMTWTAEMNEHVMRCYYTATQMETIKTGYRFTLHRLFMNKYPHLTDVTEQRLIDQKRMIVINNKIPNSRLQMIKEEVAAHTPNIQIPPTITIQDSDEPTTHNLQPTDTNVREITTTTASNLSNSDALDEETYINNELNKQYQHWRKTEANQRPRIPRPRMNKKFTRTLNIINNIIPTLIRDTHELEHIHTVIYSAAYTSMILNKQNPMRNNTVPKIPRWETGLTTKVTKTRKEIGRVTQYINGNKSEGLRNKIKRIIQDNTKTMTEKLDILKQKLAVYSHRLRRYKESNSRRQQNNMFRCNEKRFYNNISSKKQMKITPPTKETLTSFWKSIWSDTATHNATASWISNEEEKYRHITMTGDIEVSHAELTQTIRKTHNWKAPGIDGLHNYWYKQLTSTHAPIAQCITDIIKHPHKLPIFLTEGKTYIKPKNLNTENPANYRPITCLPTLYKIITSLISQKIEAHLTQHNILTEEQKGCRKGSQGCKEQLIIDSTILKQAEKNQRNLYTCYIDLRKAFDSIPHSWLLKVLQIYGISDTIIHFLSYAMNTWRTKIHLNTDTQQIETEEINIRRGIFQGDSLSALWFCICLNPLSGTLNETKQEYQLKHNKRTLHTINHLLYMDDIKLYGATQTQIQNLIKITDKISTDINMKFGIDKCKTLRMERGKWENNEDTLTIDNQLIQSLQQHETYKYLGFHQNTRLQHNDIKQHLTDNYKQRITCILNSKLNAKFIIKAINTYAIPLLTYSFGVIKWSKTETEELNRLNRTLLTKHRMLHPKSCIERTTLPRTQGGRGLIDISQLHENQIWNIRAYFYSKDSRLHKAIITADKQFTPLNLSEHIQDAVNTPRNEDTHITEKLASWSQKAIHGRHYDTVHQRHISKKHSYTWLTKGDLQPETEGFNIAIQDQVIATRNYIKHISNSTTLQNDQCRKCKQFPETIEHITSGCKLLAATDYTDRHNAAAKILHQELALKHNLITERTPYYKYHPQTVLENTNTKLYWDTTLRTDRTIDYNRPDITLVNKNENTTYMIDISIPNDKNIKTKEQEKIDKYTPLAIEIKQIWKQSKITILPIIISPTGVTPHSFIRNIETLELHPYIHQQIQKAVILKTCNTVRKFLNNT

SEQ ID NO: 22934 - protein, 944 aa, Anneissia japonica
MAKFEAGLSPNIKFVNKAINKRFPNRTIDQIKYQRRKPSYKEKIRELSAVNISIDVISTNNVDLITDFDDKYPLIRCLDNYLHDSQQDKNTKLQSDLSDLINCFKNNVPLDFGQLLSKITKKRSKLSSHKSINVPNLPPNASRREGKRLLYPVYQDLYKRNKRALARHLLDNAPITNITPNLETAFVHFNNIFNKQPEDDISITEEPLNRLDDISLQSLLQPITINEVSDALKTMKRDGAAGPDGVFYKDLKCIQPRDLATLFNLWMVTRKIPNSLKDSYTMLLPKGDPVKEDPSKWRPITIGSYLLRLYTKIINFRLKSVINLNRRQKAFIPADGCLENTTLLDGIMTECRNKLKSHYVMFLDISKAFDSVHHSTIDRALTRQNIPLSMRMIIQDLYKDIKTQIRLPNEISEPIPIRCGVKQGCPLSPLLFNLVLDELLDTLPTIIGVDAFGYKHNAFAFADDLILLAESKEGLNTLLDKCVNFFNDRHMAINPKKSMVTGSTLTHRIGNKHITKLIPVTTSYWKINGEYIPAISPDKTSKYLGQKFGFTGKATADITTPLKNWLSKVQNSFLKPYQKMDIIQSFILPRLYYQFSNNTLDAKTSNRISLAINKSVRRILHLPFTSSKCFLILPLVYGGLGLPDINLTANKLRHSAFMRLAKSNDVVIKALYASNFIQRQLTRVSGFLKLVNIEADTKTVKAHIEDILLAKQKLYSQSKQGQGCEAFDHNSSTEWIIAPNILTGNYYTRAIALRAKTLPCRNNLKFTGGDISCRHCKSHVETSSHILQRCPYVQKARMQRHNKVCQQLSRFLQRKYGSPNVHIESLINTPSGNYRPDLIAIDRKASHAYLIDVAIPYEYHKRTLDDSYLMKKTKYETAIICDTIKRLHNVSTISCEGCIIGARGAIDSSKLAYGGLKLTKNQLSTLSQIAIKGSIHCFNSFMAR

SEQ ID NO: 22935 - protein, 1200 aa, Trialeurodes vaporariorum
MDCSSIENSGREGEAPQDSSTRLERDRGPNRGQNQGEINQAPEHQESTQDTPLDRGKQKKRWSPDEYREIMWCHIYTQENGTNSLKATYALWRQRNPSTRLEIDANKLATQRRFIEKTKKVTQQQIETIRLQVRAEIEATDRNNEPDSGVDRLEVNSQNPSRRPAKNHENASDNTVENELPTQEGMELFSREDSVPLESHVSRIKEELIKELIETERLDFSERDAIPRLSNLAKAEREVILVNRAIAEMIKEKPGITFKDVNNLIYAGAKVGKRRIDGEVQKRRPRRRTGEPGWQRRLENKVKEMRSQVSTLDEAVKNRRESQKVRQIMEMYGENSANNKEALLEFLKQNLAATAQRLRRYQKRKQQFEQNKLFQDNPKKFYRQLRTKADAVEKAPARQDVEEFWRGMYEEEKKHNKEAEWLKGMRKKQEMEWMSITAEEVTRTINRSKNWTAPGPDKIQNYWLKKFKATHGKLTEAYNKMIGEGVTPGWLPKGLTHLISKGGDTEDPTKYRPITCLNTSYKVLTAILTDRIYAHAIKIKLLPPEQKGIMRGVRGCKDQVLISKCIVQDCKKNRKNLSNAWIDYKKAYDSVPHTWIIESMRLAGVADEIVRICETMMGQWGTEIRLTTKGDQIEIKDVSIKRGIFQGDSLSPMLFCLCLIPLTEILNRGKGYKYDANRRPLTHLLYMDDLKLFAKSDQELQKLLKEVKSFSEDICMEFGLDKCAKVTFKEGKYRTTENIKLGHDMEIKQLEQEEIYKYLGIEEQDNIEQKRMKEKLIKEYKDRVRKILRTELNAKNKMKAIGAFAAPVLQYSFGILNWTLADLKKADIGTRKLLTIHGLHHPKADVHRLYVSRKKGGRGLRQIEAAWKVEAVNLKRYMERRAKEDDHMEFVLAQDKKNRDVCNSISKLGRKIEEEINLDLEQAKDEEEKKRKSKNRIAEEIEKEWTQKIMHGQYPRSLKDELIDKESTHLWLNKGVLKGETESLIVAAQDQALKTKYVAAKIYKEQCDTKCRLCGEGQETIDHIVAACPVLARKEYIERHDNVAKLIHHGICREYGIKELQQKWYEHEPKRVQVSEDGKTTILWDAGVMTDRRIVENRPDIIVKTTEECFCVEISVPSDKNASAKTNEKMLKYQDLSIELQRMWNRKVTIIPVIVGATGTILKSLKKQVRKIPGQHSVMLIQKTALMGTARILRKVLMYE

SEQ ID NO: 22936 - protein, 934 aa, Tetramorium simillimum
MARKEAKLTLRNTPPRFMNQELLRCFPQRTLEAIKGRRKRDDYKTLVTSLQAQMQADTRDESDEDARSLGSNEEISLDSAILEFLESLPPLRGNNFEAIQLQSIVTNARTTEKDNTLQKLTLYLEEIFPRPPRRGNKVRRETPRGSIRKREARRQAYALTQKRWKKNRRSCITSILDDLGIMEQPPRDIMEPYWSTLVKTHSDSVPDVGNNSEIEDIWAPIRPDELRFGRVPLPSAAGPDGLSARLLRSVPPGILIRIYNLLMWCGRLPGNLLKSRTIFLPKVKGAKEPGDFRPITIPSVLVRGFHKILAKRLERTLDIDHRQRAFRDTDGCADNTFLLDTILRYHRSKYRSVYMASLDISKAFDSVSHPAITNTLRSMGLPMPMIDYLEDLYVKSKTRFEGSNWTSKYVHPNRGVRQGDPLSPIIFNAITHMMLRTLPGDVGVRMGGTPVNAAAFADDLLLFASTPMGLQRLIDKAEEYLSSCGMKINTAKSMTISIVANPRAKKTAVDTGTIFTCAGERLPALSRSSRWRYLGVYFTPEGRTQCRPTDLLRPMLDNLKRAPMKPQQRMFALRTIVLPRLYYQLALGAVTMGTLKKTDKLIRSAVRCWLALPHDVPNAYFHATIRDGGLGVPAVRWVAPLQRRSRIIAARRTYSQPEFCEYADKEIAVCEKRLTDHGIVYNTPDKVNDRWRKMLLEKIDTCGLKESRSTPHQHQWVADGTRFLSGKDYINCIKLRASALPTKSRSSRGRVADRRCRAGCPAQETLNHVLQQCHRTHAHRIKRHDAILRYMERKIRRGGYTIHKEPRLHTTSGLRKPDLVTVLGGTAVVVDAQVVGEQSNLDDAHNRKSAYYEQSAVAEVIKREYGVQTIITTSATLSWKGIWSSKSANHLRELGFVSTGDLKVLATRVLIGGIAEYHAFNASTSVARRRSGIG

SEQ ID NO: 22937 - protein, 1383 aa, Curetis bulis
MPITSRHSSQLTIPNLSYTSSLFLLNKNMDRQLKGYNLRPLPGGRRGASGADAGCFSMRSIGDEELNRRAPIEKMVTADIVSSPSSVQSLNLSPSSSTYIPESPKSPSSSSLSSLPVDVVQQTSVCNAAPTSGKIRTRKKWTYEMNRFIWRTYLILTNLEKNTQSYLQSLHDKFTSQFPQMKVSRQRIGDQRRAIVNSRLLSQNTLDEIRLEVSNILQNSQSGLQPNLITVTQNNTQSGRMKWSDEINEKIIQIYLEVTDLETNMTAYRPKLYSKFIDIYPHLSYLSEQRIADQRRVVMKNKKYTKLIHDIKTQIKSYNQHNSLDIDVQTLTEVEPIEPTNICESRATDSVSDDNEQYGGGNSLTLGQPNQFNINIENINSTFNEVLLQFQNTNPISRPYIPKQKLHKTFKSIVQHINNNILPKHVKHEQTFEELHTIIYVAAYTAALCNGSKIATVEARNYIKNKPVWQVRLEKKIQKLRVDIGRLTQYINGNRNPKVKTTVEKIQITHKVHAQYDNTNTELIHYLDTLKQKLSAASSRLRRYLTCTIRKTQNSQFRNNEKQFYRNLQTDNTNKYIMNQTPSLDSLRNFWADIWEKPITHSEVVNEMIPDADFSPPEMEFDHIPVETFIKVIRRTHNWKSPGSDNIHNYWYKHFTITYPYIHNHLNAFINTPQLIPQFVSHGMTYMVPKDNDTINPAKYRPITCLQTIYKILTACISDIIYEHLSEHNVITEEQKGCRKNSQGCKEQLTIDAIIMNHAFKKKSNIYTMFIDYRKAYDSVPHSWLIHVLHRYKIHPTIIYFLNSIMQTWQTVLKLKQGAKTLTTEPIKIMRGIFQGDALSPLWFCLALNPLSELLNKTNLGYCLKTDDTTYFLSHLMYMDDIKLFASDKNNLFQLADTTEQFSNYIHMELGVDKCKVLSINKGKIEPNHYLLNNGENIEPLNDNSAYKYLGFQQSRQIQHRFIKLELRNKFKHRLTLILKTHLDSLNTIKAINTFAIPILTYSFGIIKWSQTDLKNLQRLINTHLTKYRKHHPKACIQRLILPRQEGGRGIINIQNLHNKQITNLRNYFFDKSLSSLLHKTITSMDTRLTTLNLSTRETQPNEKLTAIDDTVMKWAEKSIHGRHHGDLIQSHIDRKKSNEWLVKGKLFPETEGFMIAIQDQVIPTRNYIKYIIKDATQVTDLCRHCNAASETIQHITGACKSLAQTDYKHRHDQVAAIIHQHLAHQHKFIDKKVPYYKYKPETVLENHNYKIYWDRTIITDKTIHFNRPDITFYNKINKIVFLIDIAVPNTHNIQSTVSDKLTKYQDLAIELKTQWGAETVHIVPIIISTTGVIPKNLLNSLQTLDIPPYILNTLQQAIILNTCRITRKFLSSSSVTNTFTIN

SEQ ID NO: 22938 - protein, 1326 aa, Curetis bulis
MRSIGDEELNRRAPIDKMTTADIVSSPSSIQSLQLSPSSSAYIPESPKSSSSSSFSSMPVDVVQQTNVCDAAPTSGKTRTRKKWTYEMNSFIWRTYLILTNLEKNTHSYLQALHDSFSSQFPQMEVTRQRVGDQRRAIVNNRLLSQSTLDEIRTEVSNILQNSQSGSLPNLTNNTQNNTQSGLRMKWSDEVNEKIIQIYFEVTDLETNMTAYRSKLYNKFIESYPHLSHLSEQRIADQRRIVMQNKKYAKIISDIRTQIKISNQHNSLETNLKTQTEEEPVEHINIYESEETESIFDNIEQYDGGSSTVMPQKQFNINFEHINTTFSEALLYFQNTDPTSRPYIPKQKLHKSFKLIVEHINNNILPIHIKHEQSFEELHTIIYVAAFTAATCNGSRIVPIKANSYIKNKPAWQKRLENKIQKLRADIGRLTQYINGNRNPRVKATIDKIQIVHKVHAQYENTNTEPTHFLDTLKQKLSAASSRLRRYLICTTRKTQNNQFRNNEKQFYRHLQNNNINQHNRNETPSIDTLRDFWAGIWENPITHNDDVNEMIPDSGFTQPEMEFDHIPVETFIKVIRRTHNWKSPGSDNIHNYWYKHFTITYPYIHHHLNTFIINPQQIPQFVSHGVTYMIPKDNDTINPAKYRPITCLQTIYKILTACMSDIIYEYLSEHNVITEEQKGCRKNSQGCKEQLTIDAIIMNQAFQKKSNIFTMFIDYRKAYDSVPHSWLIQVLYRYKIHPTIISFLKSIMEKWQTVLKIRQGTNNLTTEPIKIMRGIFQGDALSPLWFCLALNPLSELLNKSNLGYSMHANNNTYVLSHLMYMDDIKLFASSKNNLFQLADVTEKFSNKIQMKLGVDKCKVLSINKGIIEPNTYLLGNGEDIEPLNDNTTYKYLGFHQSRRIQHKVIKLELKNKFKHRLTLIFKTHLDSLNTVKAINTFAIPILTYSFGIIKWSQTDLKNLQRLINTHLTKFRKHHPKACIQRLTLPRQDGGRGIINIQNLHNQQISNLRKYFFDKSLSSLLHMTVTAADTKLTTLNLSNRDTQPNEKQTELVDIVRKWAEKSIHGRHHSDLTQAHIDIKKSNEWLVRGKLFPETEGFMVAIQDQVIPTRNYIKYIIKDTNQVTDLCRHCNAASETIQHITGACKSLAQTDYKHRHDQVTAIIHQYIAHKCRFIDKKVPYYKYKPDTVLENNNYKIYWDRTIITDKTIHFNRPDITFYNKINKVVFLIDIAVPNTHNIQSTVSDKLSKYQDLAIELKTQWGAETIHIVPIVISSTGVIPKSVLSSLQTLDIPPYILNTLQQATILNTCRITRKFLSSSSLTNTFIIT

SEQ ID NO: 22939 - protein, 1274 aa, Matsumurasca onukii
MKKILLFLKILIQFRICIAIFTCLVQIQTNKPLRDDLNLDLFYISSQAASTKFGSIQLKTFKNKQKLKGKIRKGYKNSNNALLILSLILLCGDIELNPGPLNANGNNKTCCTQLNLSTDDKLSLYAQSINIKSPPDNTDQPNNTSICIFCGKHYKRLSSHIKGSHKTSLGIEKSGSSRKVNNNYKGKPKVNQGQVISKNAISEGLSQVPGPSKINTFSITIPKNRDPRYIRPFPTVYSSDDSDDENCFHENNNTTNEVKILTPTRFEKTFEQTELLTEKYSESNQTSTNGETIDNQDNKVKCLLCDKLFSEKGLRIHASKAHPGQGRKEIVDKIVNKCKKSRLKSKETPLSKQNSPQSNTERTENNRSQTNLCKEIQSNIDGFGRTFNEILNSVNAPNIEYFNSIVVNFVSELSKASINLNGPKHPAQKFYEARKNKMAFSHNDKKYSDTTNPQRRSKRDRARRRERYNHQLIQYMYYNERKKCVRTILSDEHKSCNIPMNVLQESFRNRWSIENNGLMSNEYRKLNKTVQDALDTDFDYNLTCKEFSEALKGMRIDSSPGSDRILVRTLKMYNCIPAICYLTSIMLKFNLVPEILREAKTVLIYKGNDPSETSNWRPISVCSTIRRLMERVLERKTRNYIELNVNQRGFVSQPGVFINLALVNGCLQHAKSNKKDCLVAMLDISKAFDFVGHSHLEKCLEATEMPSLLRNLLSNLIKDNYTRIRIKNNKSEKIWFKRGVFQGSPLSPLLFNLAINDLLNNISEKEVSDYFGYNIKTNLENLSIAAFADDIVLFSGSERSMSELIQTTKEQLSHIGLDINVNKSKIINIKKGKLVEDNLNIGVQPNGITFNALKVGEKIKYLGVNFENEIVFDQCEVITNFQKDIERLVGTTVLRSDQKLNIINQYIWPRLTYVLQVTPTELISVNFLEEIDKMIRSSVKEILTLPSDTPNSFLYGPKRFKGLGIIRAKWESFIQHINMCFILKKVKNAHVEELINIPCQITRSLNKIGIKPDEVLSNNFEKKDKQRIGITLRSILRLREFDLWSNLPCKGKGVALFKEVPSSNQWIYSKNGLTTSEWINALKMVACVVPVRSLPGRSQDGTLCRHCREPETLSHVLGSCPHGALLRNTRHHAVRSAIAQELKKKGWQVVEEVHCIAKGGSNRRLDILAYNQKTKTGFIIDPTVRFETSLNQPEEVDLEKKKIYEPCEDYLKQIYQLNSIYVIGLLIGSRGTITKFFLNFLKRFGLPSKFKNEITLIALKGSHKIIQNHLYSKT

SEQ ID NO: 22940 - protein, 1150 aa, Papilio phestus
MYQMGKKEKHETENKKIQKTTTAVANGETDPQDKGEGQGTSGESGISDTLASLEAILREVQASQREWPQEALSAILSRWRQMPRGGWSKTTSFFCDKFQTKISETLFKKRAKEILKTEAGKSTGVRNFCQEDGRKRMKLLDEIFKINSLKDQALKGRVYDQFRSTLKELDKKQITEVEPTRKISSLKVDTKILNMLDEVVRDFVQTQPPKNMTDIAKILQSVQIAYQAITTKVKTKSEWLNNINEKICDLEKKKSLLMKYKEENTSLKGEELKEARRIMGSHRLVLAKPEDLKKMISYFDDRSKIYTDKIRKWEKRKIFRRENSKFELYRGRFYRDLNEMSTPNHNISTEELKDVWSNMWKADDLIEDTPFEEYLLEYSPGNLEEINFPTEEEFSDIIRKLPCWKAAGTDRIFNYFIKNITSLHQSLYKVIKETCLSCKTQEDWFYRGITYLIPKGTPKSGKDFRPITCMSNLYKLTTKCVTAVIQLSVEQRRLLSENQMGTVRKVLGAREQALTNIMLNNVHNYALKTAWIDVKKAFDSVSHPYLLECIERLGLPLWIAKFLKNIISKWNLEIRAGNEVVLDKKVERGILQGDSLSPLLFVLCMDPLSKKLNGTYPMIEVKLDELHYTCNHLLFIDDLKLFAASDEQLEIMVKETKSFFKTVGLEMNAEKSATNSTSCENYAKLLESHEGYKYLGITETKESRNTEDMFTKILKSIESRVEALCRSNLNAKNLIRAINEYAISQINYYVGIIEIEPDQFKEIDSAIRRILIKHHVHQQPSCKERLYLPRDELGRGLCNVEHKSERMLLQLIKTLDLNQDLILRRKAILKMENERNSHLSKIATFLKVKYNLQEEINNTILEEAQKSSLFSEINNKVNHAKLFRLRKDPLISMKESSIWLRNGNISPREEGSLTALQDRNIFLEKGIKCPHCNDKYKSVDHMATQCDRMLSHDYMRRHNEALRCIHLQLCLNYGIKKSKKIRNHSLQEYVSNDRAEIRVDTRIPTSIQVKHNKPDIFVLDKIKKEILIVEVGITSFDHLRAVEVEKKNKYDVLANHCGALHGFKTRIIPYVMTWDGLVTTYHRTYRKELDLDNRIEAYVQSRVLKMTLESLTLESRRETQPTEIHQEERCVRKGPTIRPESPAPAACESN

SEQ ID NO: 22941 - protein, 1149 aa, Mythimna impura
MGKKEKHETEKEKITQTNTAVSIGETNLQDKEDVSKATEGPTLTNAIASLEAVLSEVQASQQNWPQEALSAILSRWKQMPRGGWSRTTSFFCEMFRTKISETIFKKNAKSVLRTEAGTPTGVREYNRDEGRKRLKTLDDILKINSLKDTALKGRVAGQFLQTWKEIKKGNVTDVSPTKKISSLNVDNKILGMLDEAVGDFVKSHPIKDMTDIAKIYQSTQLSYQILTTKEKIKSKWLENIENKITELERKKSLLDKYKEDSNSLKGENLKEARRIMGNQRLILAKPEDLKKMISYLSERSAIYADKIRKYEKRKVFRRENTKFELFRGKFYRDLTEETKPEHSVPTEDIKDTWSKMWEKEESEVEQSCFEEYLLEYSPGDLEQVFFPTFEEFSDIIKWLPCWKAAGPDRIYNFFIKKISSLHGYLYNLNKEICLNGNTPDEWFFRGITYLIPKGNPQSGKDFRPITCMSNLYKLTTKCVTSVLQLIVEQRGLVSENQMGTVRKVQGAKEQALTNIMLNGAHFYELKTTWIDVKKAFDSVTHSYLLACIERLGVPKWISNFLKNIVSKWNLEIRSDNEVILNKKVRRGILQGDSLSPLLFVLCMDPLSKRLNGTYPQVEVKMEDVHYTCNHLLFIDDLKLFAMSEKVLKSMVDETKSFFKTVGPEMNVAKSATNSSTCESDAKLLETHEGYKYLGVTESRDGRNLPDTKDKIIESIETRVEALCKTNLNAKNLIKAINEFAISQINYYIGIVKFEPDKFKEIDGSIRRILTRHHVHQQPACMERLYLPRSELGRGLSSVEHKSERMLLQLVNTLESNKESVLRRKAILQTEKNINSHLSNIRAFLKSKYGLTDEVSITLLQEAQKSTLYSEIKKKFNHAKLYRLKEDPLTSLKESSIWLKSGNVSPREEGALCALQDRNIFLEKGIKCPHCGDKFKSVDHMATQCDRMLSHDYMRRHNEALRCIHLQLCLNYGLSKSKKIRNHSLQECLSNDRAEIRVDTRIQTNIKVKYNKPDIFILDKLKKEILIVEVGITSFDHLRTVEVEKKHKYDMLANHVGAIHGYKTKIIPYVMTWDGIVTKFHNIYKGELGLDNRVEAYIQTRVLKMTLESCSMEARRGENSTETPKEEIKLEIKAPQVQPDRLPPTPCKEK

SEQ ID NO: 22942 - protein, 1149 aa, Mythimna impura
MGKKEKHETEKEKITQTNTAVSIGETNLQDKEDVSKATEGPTLTNAIASLEAVLSEVQASQQNWPQEALSAILSRWKQMPRGGWSRTTSFFCEKFRTKISETIFKKNAKSVLRTEAGTPTGVREYNRDEGRKRLKTLDDILKINSLKDTALKGRVAGQFLQTWKEIKKGNVTDVSPTKKISSLNVDNKILGMLDEAVGDFVKSHPIKDMTDIAKIYQSTQLSYQILTTKEKIKSKWLENIENKITELERKKSLLDKYKEDSNSLKGENLKEARRIMGNQMLILAKPEDLKKMISYLSERSAIYADKIRKYEKRKVFRRENTKFELFRGKFYRDLTEETKPEHSVPTEDIKDTWSKMWEKEESEVEQSCFEEYLLEYSPGDLEQVFFPTFEEFSDIIKWLPCWKAAGPDRIYNFFIKKISSLHGYLYNLIKEICLNGNTPDEWFFRGITYLIPKGNPQSGKDFRPITCMSNLYKLTTKCVTSVLQLIVEQRGLVSENQMGTVRKVQGAKEQALTNIMLNGAHFYELKTTWIDVKKAFDSVTHSYLLACIERLGVPKWISNFLKNIVSKWNLEIRSDNEVILNKKVRRGILQGDSLSPLLFVLCMDPLSKRLNGTYPQVEVKMEDVHYTCNHLLFIDDLKLFAMSEKVLKSMVDETKSFFKTVGLEMNVAKSATNSSTCESDAKLLETHEGYKYLGVTESRDGRNLPDTKDKIIESIETRVEALCKTNLNAKNLIKAINEFAISQINYYIGIVKFEPDKFKEIDGSIRRILTRHHVHQQPACMERLYLPRSELGRGLSSVEHKSERMLLQLVNTLESNKESVLRRKAILQTEKNINSHLSNIRAFLKSKYGLIDEVSITLLQEAQKSTLYSEIKKKFNHAKLYRLKEDPLTSLKESSIWLKSGNVSPREEGALCALQDRNIFLEKGIKCPHCGDKFKSVDHMATQCDRMLSHDYMRRHNEALRCIHLQLCLNYGLSKSKKIRNHSLQECLSNDRAEIRVDTRIQTNIKVKYNKPDIFILDKLKKEILIVEVGITSFDHLRTVEVEKKHKYDMLANHVGAIHGYKTKIIPYVMTWDGIVTKFHNIYKGELGLDNRVEAYIQTRVLKMTLESCSMEARRGENSTETPKEEIKLEIKAPQAQTDRLSPTPCKEK

SEQ ID NO: 22943 - protein, 1144 aa, Chilo suppressalis
MGKKEKQETENKKIEKTTTAVPSGGTNPQDKEDRISNSGGTGASETLASLEAILREVQASQREWPQEALSAILSRWKQMPRGGWPKTISFFCDKFHTKISEIMFKKRAKEILKTEAGKSTGVRNFCQEDGRKRIKLLDEIFKTNSLKDKALKGRVLDQFKTTWRELNKKQITDVEPTRKISTLKVDTKIIQMLDEVVWDFVQTHPPKNMTAIAKILQSVQIAYQALTNKEKVKSEWLNNINEKINELENKKSLLLKYKEDNASLKGENLKEARRIMGSQRLILAKPEDLKKMISYCLDRSAIYIDKIRKWEKRKLYRRENTKFELFRGRFYRDLNDESTADHNISSEELKEVWSKMWTTDDSNPNSTPFGEYLLEYSPGNLEEVCFPTEEEFGDIIKKLPCWKAAGTDRIYNYFIKSITSIHKSLYNVIKETCLNSEIQEDWFYKGITYLIPKGTPKSGKDFRPITCMSNLYKLTTKCVTAVIQLTVEQRRLLSENQMGTVRKVLGAREQALTNIMLNKTHNYELKTAWIDVKKAFDSVSHAYLLECIERLGLPTWIAKFLRHIINKWNLEIRSGKEVILDKKVERGILQGDSLSPLLFVLCMDPLSKRLNGTYPMIEVKLDELHYTCNHLLFIDDLKLFATSEENLKTMVEETKSFFKTVGLEMNVEKSATNSPTCENYAKLLESHEGYKYLGITETNKSKNTDDMFNKILKSIESRVEALCKSNLNAKNLIRAINEYAISQINYYIGIIEIEPDQYKLIDSAIRRILIKHHVHQQPSCKERLYLPRDELGRGLCSVEHKSERMLLQLVKALESNQELILRRKAILKTEKDRNTHLSKISSFLKVKYNLQEELTNITLLEAQKVSLISEINKKINHAKLFRLRKDPLVSIKESSTWLKHGNITPREEGALTALQDRNIFLEKGVKCPHCNDKFKSVDHMATQCDRMLSHDYMRRHNEALKSIHLQLCLNYGITKSKKIRNHSLQECVSNSRVEIRVDTRIPTGIQVKYNKPDIFVLDKIKKEILIVEVGITSFDNLRAVEVEKKHKYDLLANHCGALHGFTTRIIPYVMTWDGLVTTYHQTYRKCLNLNNHVEAYIQSRVLRMTLESLTMDSRRGTASLESHQEAESGKKNPDLTPETVSKGL

SEQ ID NO: 22944 - protein, 938 aa, Papilio xuthus
MTDIAKILQSVQMSYHILTTKEHKKSEWLDNINGKINELDRKKSLLSKYKEESNSVKGDNLKEARRIMRTQNLILAKPDDLNKMISYLAERSAIYTDKIKKWENRKLFRRENTKFELYRGRFYRDLNEEKTPEHNVPTSEIKSTWEKMWEVNETDEDVKQFGEYLLDFKPGDLEPVCFPTEEEFSNIIKWLPCWKAAGPDRIFNFFINRISSLHGHLYNIIKRICLEGEVQENWFYKGITYLIPKGTPKSGKDFRPITCMSNLYKLTTKSVTAVIQLLVEQRKLVSENQMGTVRKVLGAKEQALTNIMLNKAHNYELKTAWIDVKKAFDSVTHAYLLECIDKLGMPHWISNFLKTIITKWNLEIRSGNEVILNKKVKRGILQGDSLSPLLFVLCMDPLSKRLNGIYPKIEVELEDIHYTCNHLLFIDDLKLFSKSEDTLKSMVEETKSFFRTVGLEMNIEKSATNSISCENDAKLLGSCESYKYLGITESREGRNVEEIFNTIVKSIESRVESLCKTNLNAKNLIRAVNEFAVSQINYYVGIVNMEPEQFKEIDSSIRRILIRHHVHHQPACKERLYLPRDELGRGLVSVEHRSERMLLQLIKTLESNQDCMLRRKAILKTENECNSHLSKISAFLKAKYILQVDPNLQTLEEAQKATLYSEIQNKVNHAKLYRLRKDPLISIKESSTWLKHGNISPREEGALCALQDRNIFLEKGIKCPHCNDKYKSVDHMATQCDRMLAHDYMRRHNEALRSIHLQLCLNYGLTKTKKIRNHSLQECISNDRAEIRVDTRIPTGIQVKYNKPDVFILDKINKEILIVEVGITSFGQLRTVEVEKKHKYDLLANHCGSIYKYKTRIIPYVMTWDGLVTTYHKNYRNEINIDRRTEAYIQAKVLKMTLGSLSMEARRGNTFKSELQEEESLSKGPSGQNLVNPLPTCE

SEQ ID NO: 22945 - protein, 929 aa, Chilo suppressalis
MTDIAKILQSVQISYHMLATKEHKKSEWLDNINGKINELDSKRSLLSRYKEDSNSVKGDNLKEARRIMRTQKLILAKPDDLNKMISHLVERSSIYADKIKKWENRKLFRKENTKFELYRGRFYRDLNEEKTPEQNVPTSEIKSTWEKMWEINETDEDVKQFGEYLLDFKSGDLEPVCFPTEEEFSNIIKWLPCWKAAGPDRIFNFFINRISSLHGHLYNIIKRICLDGEIQENWFYKGITYLIPKGTPKSGKDFRPITCMSNLYKLTTKSVTAVIQLLVEQRKLVSENQMGTVRKVLGAKEQALTNIMLNKTHNYELKTAWIDVKKAFDSVTHAYLLECIDKLGMPYWISNFLKTIITKWNLEIRSGNEVILNKNVKRGILQGDSLSPLLFVLCMDPLSKRLNGIYPKIEVKLEDIHYTCNHLLFIDDLKIFSKSEETLKSMVEETKSFFRTVGLEMNVEKSATNSTSCENDAKLLGSCESYKYLGITESREGRNVEEIFNTIVKSIESRVESLCKTNLNAKNLIRAVNEFAVSQINYYVGIVNMEPEQFKAIDSSIRRILIRHHVHHQPACKERLYLPRDELGRGLVSVEHRSERMLLQLFKTLESNQDCVLRRKAILKTENECNSHLSKISAFLKAKYILQVDPNLQTLEEAQKATLYSEIQNKVNHAKLYRLKKDPLVSIKESSTWLKHGNISPREEGALCALQDRNIFLEKGIKCPHCNDKYKSVDHMATQCDRMLSHDYMRRHNEALKSIHLQLCLNYGLAKTKKIRNHSLQECISNDRAEIRVDTRIPTGIQIKYNKPDVFILDKINKEILIVEVGITSFDQLRTVEVEKKHKYDLLANHCGALYKYKTRIIPYVMTWDGLVTTYHKNYRNEMNIDRRTEAYIQAKVLKMTLESLSMEARRGYTFTSELQEEESLSKGPNGQN

SEQ ID NO: 22946 - protein, 1142 aa, Mythimna impura
MGKKEKEEAEKKKIEKTTTAVSSGGTKPQGKEDGKRTDEGTKLSDASASLEAVLNEVQASQRDWPQAAFSAILSRWKQMPRGGWSKTTSYYCDKFQIKISETIFKKSAKTVLRTAAGNPTGVREFNREEGTKRLKIDDIFKTNSLKDTALRGKVADQFLQTWKEMIKKDVTDVSPSRKISSLKADTKIIGLLDEIVGDFIKTHPPKSMTDIAKILQSVQTSYHILTTKEHKKSEWLDNINGKINELDRKRFLLSKYKEDSNSVKGDNLKEARRIMGSQKLVLAKPDDLKKMISHLTERSTIYADKIKKWENGKIFRRENTKFELYRGRFYRDLNEEKTPEHNVPTSEIKSTWEKMWEIQETDENVKYFGEYLLDCKPGDLEPVCFPTEEEFSNIIKWLPCWKAAGPDRIFNFFINRISSLHGHLYSIIKGICLEGETQENWFYKGITYLIPKGTPKSGKDFRPITCMSNLYKLTTKCVTAVIQLLVEQRKLVSENQMGTVRRVLGAKEQALTNIMLNKAHNYKLKTAWIDVKKAFDSVTHAYLLECIDKLGMPHWISNFLKTIISRWNLEIRSGNEVILNKKVMRGILQDDSLSPLLFVLCMDPISKRLNGIYPKIEVKLEDIHYTCNHLLFIDDLKLFSKSEETLKSMVEETKSFFRTVGLEMNVEKSATNSSSCEKDAKLLGSCESYKYLGITESREGKNVEEIFNTIVRSIESRVESLCKTNLNAKNLIRAVNKFAISQINYYVGIVDMEPEQFKSIDSSIRRILIRHHVHHQPACKERLYLPRDELGRGLVNVEHRSERMLLQLVKTLESNQDCVLRRKAIIKTENERNSHLSRISAFLKAKYILQVDPNFQTLEEAQKSTLYSEIQNKINHAKLYRLKKDPLVSMKESSTWLKHGNISPREEGALCALQDRNIFLEKGLKCPHCNDKYKSVDHMATQCDRMLSHDYMRRHNEALRSIHLQLCLNYGLSKSKKIRNHSLQECMSNDRAEIRVDTRIPTGIQVKYNKPDVFILDKINKEILIIEVGITSFDQLRTVEVEKKHKYDLLANHCGALYKYKTRIIPYVMTWDGLVTTYHKQYRKEINIDRRTEAYIQAKVLKMTLESLSMEARRGCTFTSELNEEEAHQAKAPSDSLQPVLL

SEQ ID NO: 22947 - protein, 1149 aa, Mythimna impura
MGKKEKHETEKEKITQTNTAVSIGETNLQDKEDVSKATEGPTLTNAIASLEAVLSEVQASQQNWPQEALSAILSRWKQMPRGGWSRTTSFFCEKFRTKISETIFKKNAKSVLRTEAGTPTGVREYNRDEGRKRLKTLDDILKINSLKDTALKGRVAGQFLQTWKEIKKGNVTDVSPTKKISSLNVDNKILGMLDEAVGDFVKSHPIKDMTDIAKIYQSTQLSYQILTTKEKIKSKWLENIENKITELERKKSLLDKYKEDSNSLKGENLKEARRIMGNQMLILAKPEDLKKMISYLSERSAIYADKIRKYEKRKVFRRENTKFELFRGKFYRDLTEETKPEHSVPTEDIKDTWSKMWEKEESEVEQSCFEEYLLEYSPGDLEQVFFPTFEEFSDIIKWLPCWKAAGPDRIYNFFIKKISSLHGYLYNLIKEICLNGNTPDEWFFRGITYLIPKGNPQSGKDFRPITCMSNLYKLTTKCVTSVLQLIVEQRGLVSENQMGTVRKVQGAKEQALTNIMLNGAHFYELKTTWIDVKKAFDSVTHSYLLACIERLGVPKWISNFLKNIVSKWNLEIRSDNEVILNKKVRRGILQGDSLSPLLFVLCMDPLSKRLNGTYPQVEVKMEDVHYTCNHLLFIDDLKLFAMSEKVLKSMVDETKSFFKTVGLEMNVAKSATNSSTCESDAKLLETHEGYKYLGVTESRDGRNLPETKDKIIESIETRVEALCKTNLNAKNLIKAINEFAISQINYYIGIVKFEPDKFKEIDGSIRRILTRHHVHQQPACMERLYLPRSELGRGLSSVEHKSERMLLQLVNTLESNKESVLRRKAILQTEKNINSHLSNIRAFLKSKYGLIDEVSITLLQEAQKSTLYSEIKKKFNHAKLYRLKEDPLTSLKESSIWLKSGNVSPREEGALCALQDRNIFLEKGIKCPHCGDKFKSVDHMATQCDRMLSHDYMRRHNEALRCIHLQLCLNYGLSKSKKIRNHSLQECLSNDRAEIRVDTRIQTNIKVKYNKPDIFILDKLKKEILIVEVGITSFDHLRTVEVEKKHKYDMLANHVGAIHGYKTKIIPYVMTWDGIVTKFHNIYKGELGLDNRVEAYIQTRVLKMTLESCSMEARRGENSTETPKEEIKLEIKAPQAQTDRLSPTPCKEK

SEQ ID NO: 22948 - protein, 1144 aa, Papilio phestus
MGKKEKQETENKKIEKTTTAVPNGETNPQEEEDRISNSGGTGASETLASLEAILREVQASQREWPQEALSAILSRWKQMPRGGWPKTISFFCDKFHTKISEIMFKKRAKEILKTEAGKSTGVRNFCQEDGRKRIKLLDEIFKTNSLKDKALKGRVSDQFKTTWRELNKKQITDVEPTRKISTLKVDTKIIQMLDEVVWDFVQTHPPKNMTDIAKILQSVQTAYQVLTSKEKVKSEWFNNINEKIDEFERKKSLLLKYKEDNASLKGENLKEARRIMGSQRLVLAKPEDLKKMISYCTDRSAIYTDKIRKWEKRKLYRRENTKFELYRGRFYRDLNDESTANHNITSEELKEVWSEMWKADDSNPNNTPFGEYLLEYSPGSLEEICFPTEEEFGDIIKKLPCWKAAGTDRIFNYFIKSITSIHKSLYNVIKETCLNGEIQEDWFYKGITYLIPKGTPKSGKDFRPITCMSNLYKLTTKCVTAVIQLTVEQRRLLSENQMGTVRKVLGAREQALTNIMLNKTHNYELKTAWIDVKKAFDSVSHAYLLECIERLGLPTWIAKFLRLIINKWNLEIRSGNEVILDKKVERGILQGDSLSPLLFVLCMDPLSKRLNGTYPMIEVKLDELHYTCNHLLFIDDLKLFATSEENLKIMVEETKSFFKTVGLEMNVEKSATNSSTCENYAKLLESHEGYKYLGITETNKSKNTDDMFNKILKSIESRVESLCKSNLNAKNLIRAINEYAISQINYYIGIIEIEPDQYKLIDSAIRRILIKHHVHQQPSCKERLYLPRDELGRGLCSVEHKSERMLLQLIKALESNQELILRRKAILKTEKDRNTHLSKISSFLKVKYNVQEELTNFTLIEAQKTSLISEINKKINHAKLFRLRKDPLVSMKESSTWLKHGNISPREEGALTALQDRNIFLEKGVKCPHCNDKFKSVDHMATQCDRMLSHDYMRRHNEALKSIHLQLCLNYGISKSNKIRNHSLQECVSNNRAEIRVDTRIPTGIQVKYNKPDIFVLDKIKKEILIVEVGITSFDNLRTVEVEKKHKYDLLANHCGALHGFTTRIIPYVMTWDGLVTTYHQTYRKSLNLNNHVEAYIQSRVLRMTLESLTMDSRRGTASLESLQEAESGTKTPDPTPEIASKSL

SEQ ID NO: 22949 - protein, 938 aa, Papilio phestus
MTDIAKILQSVQISYHILTTKEHKKSEWLDNINGKINELDIKRSLLSRYKEDSNSVKGDNLKEARRIMRTQNLILAKPDDLNKMISYLAERSTIYKDKIKKWENRKLFRRENTKFELYRGRFYRDLNEEKTPEHNVPTSEIKSTWEKMWEVNETDEDVKQFGEYLLDFKPGDLEPVCFPTEEEFSNIIKWLPCWKAAGPDRIFNFFINRISSLHGHLYNIIKRICLEGEVQENWFYKGITYLIPKGTPKSGKDFRPITCMSNLYKLTTKSVTAVIQLLVEQRKLVSENQMGTVRKVLGAKEQALTNIMLNKAHNYELKTAWIDVKKAFDSVTHAYLLECIDKLGMPHWISNFLKTIITKWNLEIRSGNEVILNKKVKRGILQGDSLSPLLFVLCMDPLSKRLNGIYPKIEVELEDIHYTCNHLLFIDDLKLFSKSEDTLKSMVEETKSFFRTVGLEMNIEKSATNSISCENDAKLLGSCESYKYLGITESREGRNVEEIFNTIVKSIESRVESLCKTNLNAKNLIRAVNEFAVSQINYYVGIVNMEPEQFKAIDSSIRRILIRHHVHHQPACKERLYLPRDELGRSLVSVEHRSERMLLQLIKTLESNQDCVLRRKAILKTENECNSHLSKISAFLKAKYILQVDPNLQTLEEAQKATLYSEIQNKVNHAKLYRLRKDPLISIKESSTWLKHGNISPREEGALCALQDRNIFLEKGIKCPHCNDKYKSVDHMATQCDRMLAHDYMRRHNEALRSIHLQLCLNYGLTKTKKIRNHSLQECISNDRAEIRVDTRIPTGIQVKYNKPDVFILDKINKEILIVEVGITSFDQLRTVEVEKKHKYDLLANHCGSIYKYKTRIIPYVMTWDGLVTTYHKNYRNEINIDRRTEAYIQAKVLKMTLESLSMEARRGNTFKSELQEEESLSKGPSGQNLVNPLPTCE

SEQ ID NO: 22950 - protein, 1073 aa, Delias pasithoe
MGKKEKHETENKKIQKTTTAVANGETDPQDKGEGQGTSGESGISDTLASLEAILREVQASQREWPQEALSAILSRWRQMPRGGWSKTTSFFCDKFQTKISETLFKKRAKEILKTEAGKSTGVRNFCQEDGRKRMKLLDEIFKINSLKDQALKGRVYDQFRSTLKELDKKQITEVEPTRKISSLKVDTKILNMLDEVVRDFVQTQPPKNMTDIAKILQSVQIAYQAITTKVKTKSEWLNNINEKICELEKKKSLLMKYKEENTSLKGEELKEARRIMGSHRLVLAKPEDLKKMISYFDDRSKIYTDKIRKWEKRKIFRRENSKFELYRGRFYRDLNEMSTPNHNISTEELKDVWSNMWKADDLIEDTPFEEYLLEYSPGNLEEINFPTEEEFSDIIRKLPCWKAAGTDRIFNYFIKNITSLHQSLYKVIKETCLSCKTQEDWFYRGITYLIPKGTPKSGKDFRPITCMSNLYKLTTKCVTAVIQLSVEQRRLLSENQMGTVRKVLGAREQALTNIMLNNVHNYALKTAWIDVKKAFDSVSHPYLLECIERLGLPLWIAKFLKNIISKWNLEIRAGNEVVLDKKVERGILQGDSLSPLLFVLCMDPLSKKLNGTYPMIEVKLDELHYTCNHLLFIDDLKLFAASDEQLEIMVKETKSFFKTVGLEMNAGKSATNSTSCENYAKLLESHEGYKYLGITETKESRNTEDMFTKILKSIESRVEALCRSNLNAKNLIRAINEYAISQINYYVGIIEIEPDQFKEIDSAIRRILIKHHVHQQPSCKERLYLPRDELGRGLCNVEHKSERMLLQLIKTLDLNQDLILRRKAILKMENERNSHLSKIATFLKVKYNLQEEINNTILEEAQKSSLFSEINNKVNHAKLFRLRKDPLISMKESSIWLRNGNISPREEGSLTALQDRNIFLEKGIKCPHCNDKYKSVDHMATQCDRMLSHDYMRRHNEALRCIHLQLCLNYGIKKSKKIRNHSLQEYVSNDRAEIRVDTRIPTSIQVKHNKPDIFVLDKIKKEILIVEVGITSFDHLRAVEVEKKNKYDVLANHCGALHGYKTRIIPYVMTWDG

SEQ ID NO: 22951 - protein, 1147 aa, Papilio xuthus
MGKKEKHETENKKIQKTTTAVANGETDPQDKGEGQGTSGESGISDTLASLEAILREVQASQREWPQEALSAILSRWRQMPRGGWSKTTSFFCDKFQTKISETLFKKRAKEILKTEAGKSTGVRNFCQEDGRKRMKLLDEIFKINSLKDQALKGRVYDQFRSTLKELDKKQITEVEPTRKISSLKVDTKILNMLDEVVRDFVQTQPPKNMTDIAKILQSVQIAYQAITTKVKTKSEWLNNINEKICELEKKKSLLMKYKEENTSLKGEELKEARRIMGSHRLVLAKPEDLKKMISYFDDRSKIYTDKIRKWEKRKIFRRENSKFELYRGRFYRDLNEMSTPNHNISTEELKDVWSNMWKADDLIEDTPFEEYLLEYSPGNLEEINFPTEEEFSDIIRKLPCWKAAGTDRIFNYFIKNITSLHQSLYKVIKETCLSCKTQEDWFYRGITYLIPKGTPKSGKDFRPITCMSNLYKLTTKCVTAVIQLSVEQRRLLSENQMGTVRKVLGAREQALTNIMLNNVHNYALKTAWIDVKKAFDSVSHPYLLECIERLGLPLWIAKFLKNIISKWNLEIRAGNEVVLDKKVERGILQGDSLSPLLFVLCMDPLSKKLNGTYPMIEVKLDELHYTCNHLLFIDDLKLFAASDEQLEIMVKETKSFFKTVGLEMNAGKSATNSTSCENYAKLLESHEGYKYLGITETKESRNTEDMFTKILKSIESRVEALCRSNLNAKNLIRAINEYAISQINYYVGIIEIEPDQFKEIDSAIRRILIKHHVHQQPSCKERLYLPRDELGRGLCNVEHKSERMLLQLIKTLDLNQDLILRRKAILKMENERNSHLSKIATFLKVKYNLQEEINNTILEEAQKSSLFSEINNKVNHAKLFRLRKDPLISMKESSIWLRNGNISPREEGSLTALQDRNIFLEKGIKCPHCNDKYKSVDHMATQCDRMLSHDYMRRHNEALRCIHLQLCLNYGIKKSKKIRNHSLQEYVSNDRAEIRVDTRIPTSIQVKHNKPDIFVLDKIKKEILIVEVGITSFDHLRAVEVEKKNKYDVLANHCGALHGFKTRIIPYVMTWDGLVTTYHRTYRKELDPDNRIEAYVQSRVLKMTLESLTLDSRRETQPTEIHQEERCVRKDPTIRPESPAPTACESN

SEQ ID NO: 22952 - protein, 1122 aa, Papilio xuthus
MGKKEKEEAEKQKIEKTTTAASSGGTKPQGKEDGKISDGGTKLSDASASLEAVLNEVQASQRDWPQAAFSAILSRWRQMPRGGWSKTTSFYCDKFQIKISETIFKKSAKTVLKTAAGNPTGVREFNREDGTKRLKLDDIFKTNSLKDTALRGKVGDQFIQTWKEMIKKDVTDVPPSRKISSLKVDSKIVGLLDEIIGDFIKNHPPKNMTDIAKILQSVQISYHILTTKEHKKSEWLDNINGKINELDIKRSLLSRYKEDSNSVKGDNLKEARRIMRTQNLILAKPDDLNKMISYLAERSTIYTDKIKKWENRKLFRRENTKFELYRGRFYRDLNEEKTPEHNVPTSEIKSTWEKMWEVNETDEDVKQFGEYLLDFKPGDLEPVCFPTEEEFSNIIKWLPCWKAAGPDRIFNFFINRISSLHGHLYNIIKRICLEGEVQENWFYKGITYLIPKGTPKSGKDFRPITCMSNLYKLTTKSVTAVIQLLVEQRKLVSENQMGTVRKVLGAKEQALTNIMLNKDHNYELKTAWIDVKKAFDSVTHAYLLECIDKLGMPHWISNFLKTIITKWNLEIRSGNEVILNKKVKRGILQGDSLSPLLFVLCMDPLSKRLNGIYPKIEVELEDIHYTCNHLLFIDDLKLFSKSEDTLKSMVEETKSFFRTVGLEMNIEKSATNSISGENDAKLLGSCESYKYLGITESREGRNVEEIFNTIVKSIESRVESLCKTSLNAKNLIRAVNEFAVSQINYYVGIVNMEPEQFKEIDSSIRRILIRHHVHHQPACKERLYLPRDELGRGLVSVEHRSERMLLQLIKTLESNQDCVLRRKAILKTENECNSHLSKISAFLKAKYILQVDPNLQTLEEAQKATLYSEIQNKVNHAKLYRLRKDPLISIKESSTWLKHGNISPREEGALCALQDRNIFLEKGIKCPHCNDKYKSVDHMATQCDRMLAHDYMRRHNEALRSIHLQLCLNYGLTKTKKIRNHSLQECISNDRAEIRVDTRIPTGIQVKYNKPDVFILDKINKEILIVEVGITSFDQLRTVEVEKKHKYDLLANHCGSIYKYKTRIIPYVMTWDGLVTTYHKNYRNEINIDRRTEAYIQAKVLKMTLESLSMEARRGNTFKSEL

SEQ ID NO: 22953 - protein, 953 aa, Penaeus indicus
MTRPMELTEINQLTYATASVIAETVGERPRKQTQTRKQPVWKEKIEKEIKKLRGDLSLLSEIEKGSIVEERKRKHLERKLNIKIREDIPKAKETLKQKIQAKAQRLRRFRKRSNFFRQNKTFKEDAKKFYRELGKKKIDVDEPPTIEEIEFWSKIWENNKRHNEQATWIQQEQDLHKDLQNQDWSEINVAETTAAIKKSSNWKAPGIDKVANFWIKNLPSIHEDLARAFTNIIENPDECPKWLTQGTTYLLPKTEETNNPKNYRPITCLPTMYKILTSIITERTYTFLDENNLLPAEQKGCRKGSYGCKDQLLINKAILEEAKSKKKNLSTAWIDYKKAFDSVPHTWIEKSLEIYRVCPTTTRFIVRSMKNWKTTMNLHHAHGSLTSRPININSGIFQGDSLSPLLFCLALAPLSTLLNKNKYGYESQNGKVNHLFYMDDLKTFARDDNQQTGLLTTVKTFSDDIKMEFGLDKCAKATFKRGRLTKTTNIDLDTSTTIKEIDQEGTYKYLGVNEGDGIQHSAMKEKIRKEYLRRVRMVLKSELDAANRFEAINTLAIPVVTYSFNIINWKMSDIKKLDTKTRKILTMERMHHPKADVNRLYLPRAEGGRGLIQLELTFKTTTIGLDTYLRSTKDPLLQLVKHHEEGKKLYSIKKEASKFTQELNIPETPPMENETITKYARRVKQKAKHHGQLQMRKTWEEKPMHGKYPKRTKDADVDEVKTNKWLKSIGLKAETEGLIIASQDQSLATRSYHHRIMKDGTDPQCRICGKYEETIDHIISGCPELAKTEYIHRHDKAASYLHWEICKEYKIKTTEKWYEHQPKTITENDEVTILWDMPIQTDREIKANRPDIIIKHKTKKECILIDMAIPSEHNTSVKVTEKLSKYKDLEIETNRMWGTKTTTIPVVIGALGLVKKGLEKYTDKIPGNINIQEVQKIALLGTAHIIRRVLSIK

SEQ ID NO: 22954 - protein, 1009 aa, Penaeus indicus
MIIIIIIIIIIIIIIIIIIIIIIIIRPPIPKIKKNRHSQQIINCANEAIQQIKVDMTRPMELTEINQLTYATASVIAETVGERPRKQTQTRKQPVWKEKIEKEIKKLRGDLSLLSEIEKGSTVKERKRKHLERKLNIKVREGIPKAKETLKQNIQAKAQRLRRFTKRSNFFRQNKTFKEDAKKFYRELGKKKIDVDEPPTIEEIEEFWSKIWENNKRHNEQATWIQQEQDLHKDLQNQDWSEINVAETTAAIKKSSNWKAPGIDKVANFWIKHLPSIHEDLARAFTNIIENPDECPKWLTQGTTYLLPKTEETNNPKNYRPITCLPTMYKILTSIITERTYTFLDENNLLPAEQKGCRKGSYGCKDQLLINKAILEEAKSKKKNLSTAWIDYKKAFDSVPHTWIEKSLEIYRVCPTTTRFIVQSMKNWKTTMNLHHAHGSLTSRPININSGIFQGDSLSPLLFCLALAHLSTLLNKTKHGYESQNGKVNHLFYMDDLKTFARDDNQQTGLLTTVKTYSDDIKMEFGLDKCAKATFKRGRLTKTTNIDLDTSTTIKEIDQEGTYKYLGVNEGDGIQHSAMKEKIRKEYLRRGRMVMKSELNAANRFEAINTLAIPVVTYSFNIINWKMSDIKKLDTKTRKILTMERMHHPKADVNRLYLPRAEGGRGLIQLELTFKTTTIGLDTYLRSTKDPLLQLVKHHEEGKKLYSIKKEASKFTQELNIPETPPMENETITKYARRVKQKAKHHGQLQMRKTWEEKPMHGKYPKRTKDADVDEVKTNKWLKSIGLKAETEGLIIAAQDQSLATRSYHHRIMKDGTDPQCRICGKYEETIDHIISGCPVLAKTEYIHRHDKAASYLHWEICKEYKIKTTEKWYEHQPKTITENDEVTILWDMPIQTDREIKANRPDIIIKHKTKKECILIDMAIPSEHNTSVKVTEKLSKYKDLEIEINRMWGTKTTTIPVVIGALGLVKKGLEKYTDKIPGNINIQEVQKIPLLGTAHIIRRVLSIK

SEQ ID NO: 22955 - protein, 1202 aa, Penaeus indicus
MSTTNRKPYRIARRAGYQGARPPAGNQAGIEKSATGTNSPKQVVEDHHAEDTPQRGLLTTRPKNPPKTTRQKWTREEYKDVMEAFYTASLDPSISSTTKAAYAIWRSKHPTDRPNIDANKLANTKRDIIKQKRLTDLELETIREKAKPNNPTTNTEDVNEDRLHATAAADHEQAETSNTDHEDHQEEAHDEPDNERVLEMANNIKQKWETIKETPIGERPPIPKIKKNRHSQQIINCANEAIQQIKVDMTRPMELTEINQLTYATASVIAETVGERPRKQTQTRKQPVWKEKIEKEIKKLRGDLSLLSEIEKGSTVKERKRKHLERKLNIKVREDIPKAKETLKQNIQAKAQRLRRFTKRSNFFRQNKTFKEDAKKFYRELGKKKIDVDEPPTIEEIEEFWSKIWENNKRHNEQATWIQQEQDLHKDLQNQDWSEINVAETTAAIKKSSNWKAPGIDKVANFWIKNLPSIHEDLARAFTNIIENPDECPKWLTQGTTYLLPKTEETNNPKNYRPITCLPTMYKILTSIITERTYTFLDENNLLPAEQKGCRKGSYGCKDQLLINKAILEEAKSKKKNLSTAWIDYKKAFDSVPHTWIEKSLEIYRVCPTTTRFIVQSMKNWKTTMNLHHAHGSLTSRPININSGIFQGDSLSPLLFCLALAPLSTLLNKTKHGYESQNGKVNHLFYMDDLKTFARDDNQQTGLLTTVKTFSDDIKMEFGLDKCAKATFKRGRLTKTTNIDLDTSTTIKEIDQEGTYKYLGVNEGDGIQHSAMKEKIRKEYLRRVRMVLKSELNAANRFEAINTLAIPIVTYSFNIINWKMSDIKKLDTKTRKILTMERMHHPKADVNRLYLPRAEGGRGLIQLELTFKTTTIGLDTYLRSTKDPLLQLVKHHEEGKKLYSIKKEASKFTQELNIPETPPMENETITKYARRVKQKAKHHGQLQMRKTWEEKPMHGKYPKRTKDADVDEVKTNKWLKSIGLKAETEGLIIAAQDQSLATRSYHHRIMKDGTDPQCRICGKYEETIDHIISGCPELAKTEYIHRHNKAASYLHWEICKEYKIKTTEKWYEHQPKTITENDEVTILWDMPIQTDREIKANRPDIIIKHKTKKECILIDMAIPSEHNTSVKVTEKLSKYKDLEIEINRMWGTKTTTIPVVIGALGLVKKGLEKYTDKIPGNINIQEVQKIALLGTAHIIRRVLSVK

SEQ ID NO: 22956 - protein, 682 aa, Pachyseris speciosa
MFKILTSILAERTYTFLEHNHLLPDEQKGCRRGSYGCKDQLLINRMVLEDAKSKKKNLSTAWIDYKKAFDSVPHSWIVKTLEMYKVCPTTIWFISESMKTWKTTLHLNHSSGSMTSRPIQIKSGIFQGDSLSPLLFCIALTPLSTMLNESTYGYETLGNKVDHLFYMDDLKTFAKNDDQQTGLLTIVRTFSDDIGMEMGLEKCAKATFKRGRLENTRNLDLDISTTIKELDQEGTYKYLGVNEGDGIQHAAMKEKIRKEYYRRTRLVLKSELNASNRIEAINTLAVPVITYSFNVINWKLSEIKKLDTKTRKLLTTAKMHHPKADIDRLYLSRADAGRGLVQLELTYKTTTIGLDAYLTSSNDRLLHLVQQHEEKKKLYSITREAEKYKHELDLQETPRRDDETAILYAKKIKAKAKHQGQKQLQKRWEEKPMHGRYPSGIREADVDIKLTNQWLKSSGLKSETEGLIIAAQDQALLTRAYQHHIIKDGIDPHCRLCNKSQETVDHIISGCPELAETEYIHRHNKVATHLHWNICREYNVDTVDKWYEHEPKTVVERDNITILYDMPIHTDRAITANRPDIVIKNRQENKCTLIDVAIPSDKNTSIKVSEKLSKCKDLEIEIARMWQMRTVIIPVVVGALGVIRKGTEKQLREIPGNNNPHEIQKTALLGTAHILRKVLSIK

SEQ ID NO: 22957 - protein, 1239 aa, Acropora millepora
MALASPTQVSIRIILITTIIIIIIIIIIIIIIIITSHGQKFTYRIGRRAGKQGPRPSVGNQAEVEKSATGRDSPHHSSEDFHTESNPQSGPHETPSHNPCKASRQKWSRGEYKEVMEAFYAATLNPKTSITQGTYDIWRANNPTKRLNLNANKLANVRRDIVNRERLTKMELQAIQLNVKRRDENTRPCETDADITPEERHTNKNRENNKQTESHMQEQLNIDARDGTVNVMKASILQRYEIAMETPINQRPPIPKIKNAQSAKTAIETANKAIDQIKEESGKLSLTDVNHLMYATASAVTESLGLKTKEKKEAAKTPNQPKWKKKIEREICKIRGDISTLNEIKNEKSVKEKRKKALFSKHNIKQEKQIPTIIEKLVQQLQAKAQRIRRFERRRNFFHQNKLYRENAKKFYRELGKKSIEINEPPKIDEVESFWGNMWEKQKSYNKNATWLDQIETENIEVNYQVWTQITLEETKSAIKKASNWKCPGKDKIANFWIKNLPSLHQDLTNAYNDCICNPETCPDWLTIGITYLLPKTEDTKNPKNYRPITCLPTTYKILTSIITERVYNHLDENDLLPKEQKGCRRGSYGCKDQLLINKAIIEDAKKKKKNLSTAWIDYKKAFDSVPHDWILKCLEMYKLSPIIVQFLTSSMDQWKTTLILNHSEGTLYSRQISINSGIFQGDSLSPLLFCMALAPLSSLLNNTSYGYTTRTSTINHLFYMDDLKTFGKNDQEQTSLLTIVKGFSDDIQMEFGLEKCSKATFKKGKLTTTENIQIDLDTTIQQLGTYKYLGVNEGDGIQHAKMKEKIKKEYYRRIRMITKSELNAINRTEAINTLATAVVTYSFNIVDWKMEEIRKLDRKTRKLLTMERMHHPRADVDRMYLPRNKGGRGLIQLEIAYKTATIGLDAYLNATKNDPLLVIAKEHEKAKKKYSVASQATVFRRELNLPEVLEAENEAPTVYARNVKQKAKHQAQVQLKQKWEDKSMHGQYPKRVNEKDVDQQMTNQWLKSGGLKSETEGFIIAAQDQAIKTNYYRRNILNDGTDPMCRICGQYQETIDHIVAGCPELAKTEYLHRHDKAASYLHWNICKELNINVEEKWYEHEPQTVTERDNITILWDMPIQTDREIKANRPDIVIKDKQEKSCLLIDMSIPTEKNTSVKVTEKLSKYKDLEIEIERMWGMKATTIPVVIGALGLIKKGLEKYTKQIPGNIKISELQKIALLGTSRILQKTLSIKTSTSF

SEQ ID NO: 22958 - protein, 1208 aa, Acropora millepora
MASHGQKFTYRIGRRAGKQGPRPSVGNQAEVEKSATGTNSPHHSSEDFHTESNPQSGPHETPSHNPCKASRQKWSRGEYKEVMEAFYAATLNPKTSITQGTYDIWRANNPTKRLNLNANKLANVRRDIVNRERLTKMELQAIQLNVKRRDENTRPCETDADITPEERHTNKNRENNKQTESHMQEQLNIDARDGTVNVMKASILQRYEIAMETPINQRPPIPKIKNAQSAKTAIETANKAIDQIKEESGKLSLTDVNHLMYATASAVTESLGLKTKEKRRLRKPNQPKWKKKIEREICKIRGDISTLNEIKNEKSVKEKRKKALFSKHNIKQEKQIPTIIEKLVQQLQAKAQRIRRFERRRNFFHQNKLYRENAKKFYRELGKKSIEINEPPKIDEVESFWGNLWEKQKSYNKNATWLDQIETENIEVNYQVWPQITLEETKSAIKKASNWKCPGKDGIANFWIKNLPSLHQDLTNAYNDCICNPETCPDWLTIGITYLLPKTEDTKNPKNYRPITCLPTTYKILTSIITERVYNHLDENDLLPKEQKGCRRGSYGCKDQLLINKAIIEDAKKKKKNLSTAWIDYKKAFDSVPHDWILKCLEMYKLSPIIVQFLTSSMDQWKTTLVLNHSEGTLYSRQISINSGIFQGDSLSPLLFCMALAPLSSLLNNTSYGYTTRTSTINHLFYMDDLKTFGKNDQEQTSLLTIVKGFSDDIQMEFGLEKCSKATFKKGKLTTTENIQIDLDTTIQQLEQEGTYKYLGVNEGDGIQHAKMKEKIKKEYYRRIRMITKSELNAINRTEAINTLATAVVTYSFNIVDWKMEEIRKLDRKTRKLLTMERMHHPRADVDRMYLPRNKGGRGLIQLEIAYKTATIGLDAYLNATKNDPLLVIAKEHEKAKKKYSVASQATVFRRELNLPEVLEAENEAPTVYARNVKQKAKHQAQVQLKQKWEDKSMHGQYPKRVNEKDVDQQMTNQWLKSGGLKSETEGFIIAAQDQAIKTNYYRRNILNDGTDPMCRICGQYQETIDHIVAGCPELAKTEYLHRHDKAASYLHWNICKELNINVEEKWYEHEPQTVTERDNITILWDMPIQTDREIKANRPDIVIKDKQEKSCLLIDMSIPTEKNTSVKVTEKLSKYKDLEIEIERMWGMKATTIPVVIGALGLIKKGLEKYTKQIPGNIKISELQKIALLGTSRILRKTLSIKTSTSF

SEQ ID NO: 22959 - protein, 1208 aa, Acropora hyacinthus
MASHGQKFTYRIGRRAGKQGPRPSVGNQAEVEKSATGTNSPHHSSEDFHTESNPQSGPHETPSHNPCKASRQKWSRGEYKEVMEAFYAATLNPKTSITQGTYDIWRANNPTKRLNLNANKLANVRRDIVNRERLTKMELQAIQLNVKRRDENTRPCETDADITPEERHTNKNRENNKQTESHMQEQLNIDARDGTVNVMKASILQTYEIAMETPINQRPPIPKIKNAQSAKTAIETANKAIDQIKEESGKLSLTDVNHLMYATASAVTESLGLKTKEKRRLRKPNQPKWKKKIEREICKIRGDISTLNEIKNEKSVKEKRKKALFSKHNIKQEKQIPTIIEKLVQQLQAKAQRIRRFERRRNFFHQNRLYRENAKKFYRELGKKSIEINEPPKIDEVESFWGNLWEKQKSYNKNATWLDQIETENIEVNYQVWPQITLEETKSAIKKASNWKCPGKDGIANFWIKNLPSLHQDLTNAYNDCICNPETCPDWLTIGITYLLPKTEDTKNPKNYRPITCLPTTYKILTSIITERVYNHLDENDLLPKEQKGCRRGSYGCKDQLLINKAIIEDAKKKKKNLSTAWIDYKKAFDSVPHDWILKCLEMYKLSPIIVQFLTSSMDQWKTTLVLNHSEGTLYSRQISINSGIFQGDSLSPLLFCMALAPLSSLLNNTSYGYTTRTSTINHLFYMDDLKTFGKNDQEQTSLLTIVKGFSDDIQMEFGLEKCSKATFKKGKLTTTENIQIDLDTTIQQLEQEGTYKYLGVNEGDGIQHAKMKEKIKKEYYRRIRMITKSELNAINRTEAINTLATAVVTYSFNIVDWKMEEIRKLDRKTRKLLTMERMHHPRADVDRMYLPRNKGGRGLIQLEIAYKTATIGLDAYLNATKNDPLLVIAKEHEKAKKKYSVASQATVFRRELNLPEVLEAENEAPTVYARNVKQKAKHQAQVQLKQKWEDKSMHGQYPKRVNEKDVDQQMTNQWLKSGGLKSETEGFIIAAQDQAIKTNYYRRNILNDGTDPMCRICGQYQETIDHIVAGCPELAKTEYLHRHDKAASYLHWNICKELNINVEEKWYEHEPQTVTERDNITILWDMPIQTDREIKANRPDIVIKDKQEKSCLLIDMSIPTEKNTSVKVTEKLSKYKDLEIEIERMWGMKATTIPVVIGALGLIKKGLEKYTKQIPGNIKISELQKIALLGTSRILRKTLSIKTSTSF

SEQ ID NO: 22960 - protein, 991 aa, Acropora hyacinthus
MKASILQRYEIAMETPINQRPPIPKIKNAQSAKTAIETANKAIDQIKEESGKLSLTDVNHLMYATASAVTESLGLKTKEKRRLRKPNQPKWKKKIEREICKTRGDISTLNEIKNEKSVKEKRKKALFSKHNIKQEKQIPTIIEKLVQQLQAKAQRIRRFERRRNFFHQNKLFRENAKKFYRELGKKSIEINDPPKIDEVESFWGNIWEKQKSYNKNATWLDQIETENIEVNYQVWPQITLEETKSAIKKASNWKCPGKDGIANFWIKNLPSLHQDLTNAYNDCICNPETCPDWLTNGITYLLPKTEDTKNPKNYRPITCLPTTYKILTSIITERVYNHLDENDLLPKEQKGCRRGSYGCKDQLLINKVILEDAKKKKKNLSTAWIDYKKAFDSVPHDWILKCLEMYKLSPIIVQFLTSSMDQWKTTLILNHSEGTLYSRQISINSGIFQGDSLSPLLFCMALAPLSSLLNNTSYGYTTRTSTINHLFYMDDLKTFGKNDQEQTSLLTIVKGFSDDIQMEFGLEKCSKATFKKGKLTTTENIQIDLDTTIQQLEQEGTYKYLGVNEGDGIQHAKMKEKIKKEYYHRIRMITKSELNAINRTEAINTLATPVVTCSFNIVDWKMEEIRKLDRKTRKLLTMERMHHPRADVDRMYLPRNKGGRGLIQLEIAYKTATIGLDAYLNATKNDPLLVIAKEQEKAKEKYSVASQATVFRRELNLPEVLEAENEAPTVYARNVKQKAKHQAQVQLKQKWEDKSMHGQYPKRVNEKDVDQQMTNQWLKSGGLNSETEGFIIAAQDQAIKTNYYRRNILNDGTDPMCRICGQYQETIDHIVAGCPELAKTEYLHRHDKAASYLHWNICKELNINVEEKWYEHKPQTVTERDNITILWDMPIQTDREIKANRPDIVIKNKQEKSCLLIDMSIPTEKNTSVKVTEKLSKYKDLEIEIERIWGMTATTIPVVIGALGLIKKGLEKYTNKSRVTSKLVNYRRLHC

SEQ ID NO: 22961 - protein, 606 aa, Acropora acuminata
MYKLSPIIVQFLTSSMDQWKTTLILNHSEGTLYSRQISINNGIFQGDSLSPLLFCMALAPLSSLLNNTSYGYTTRTSTINHLFYMDDLKTFGKNDQEQTSLLTIVKGFSDDIQMEFGLEKCSKATFKKGKLTTTENIQIDLDTTIQQLEQEGTYKYLGVNEGDGIQHAKMKEKIKKEYYRRIRMITKSELNAINRTEAINTLATPVVTYSFNIVDWKMEEIRKLDRKTRKLLTMERMHHPRADVDRMYLPRNKGGRGLIQLEIAYKTATIGLDAYLNATKNDPLLVIAKEHEKAKKKYSVASQATVFRRELNLPEVLEAENEAPTVYARNVKQKAKHQAQVQLKQKWEDKSMHGQYPKRVNEKDVDQQMTNQWLKSGGLKSETEGFIIAAQDQAIKTNYYRRNILNDGTDPMCRICGQYQETIDHIVAGCPELAKTEYLHRHDKAASYLHWNICKELNINVEEKWYEHEPQTVTERDNITILWDMPIQTDREIKANRPDIVIKDKQEKSCLLIDMSIPTEKNTSVKVTEKLSKYKDLEIEIERMWGMKATTIPVVIGALGLIKKGLEKYTKQIPGNIKISELQKIALLGTSCILRKTLSIKTSTSF

SEQ ID NO: 22962 - protein, 955 aa, Homarus americanus
MQSQETNEGSQSNLSESLTPLSQSEATQTLNGEGNIQEQIGITPEPNEERDEAEETWILEPFLGTVYEIQRNLDCARFEEVLIEIEVAIQAANRINISQGQNTTRKITDVNDCKQIQRLYKYNRRRAIRLIADGNGARCEISKERIEEHFQHMMVEKDCDLNTVEHIPEPPDDRPEMEMQAFTEKEVFTKLAAAENSSPGEDRISYENWRKADPSCRVMAAIFNVCLRAKRIPDSWKRYKTIIVPKKGGNPEVVSNWRPITLSRTIYKVYTGCLTARLRRWLVDNEVLCAAQKGFMPSDGVIEHNYILQHHMDNARRNNGETCIAALDLTNAFGSVSLDLIKRALNRIGVGRDFETVAGDIISGKTTRILTKEGETEEIPVQCSVQQGCPISGLLFNIAVEPLLRKIAAEGMILNQQHKHPCLAYADDITIITKQQDNLQQLLYIATEQYSRMVLDLNPSKSSSLLLSGRRPRGMRQTQFYVGETPIQWKSDGEATLFLGRPVGFHLLPNIQTVEELMQLGTKILTSKLAPWQRIDAVKTFMFPAGVHAMRTWQLRKTDWAHLDNEMKTMLKHTLHLPARASNEYLYGSSKAGACGVPLAAEDSDIFLVDTAYKLLTSPDPDVREIAREECRRVATMTTRQEPSMTDACMYLTQGEMQTRGDHQTIWSRARCASGRMGVSWIAEGGDNIKIKCTDSIIEEKDRRKVAKTIRSQRLQMRDEVLQNKPDQGKVMKLVAQERASSAFVRNGAYTTFADWRFIHRARLNLLPVNGAKRGQNRDRRCRWCNREETLPHVVNHCMIHSRAMQKRHNALVDRVRKAAEGRHWKIMSANERVPGAADNGRPDLVIEKNREVILIDVTCPFENGQEAFKEARQRKEEKYAELAAEMRRQYQQVKVATFIVGPLGAYDPENEKLMKRLASKGYLRLFRKLCVSDAIRWSRMIYIEHTSGARQYVG

SEQ ID NO: 22963 - protein, 1251 aa, Homarus americanus
MDDEEPRGRNEGDRQPERRNRMLTIWFPAPPSFKCTERTQGCPWECASSGWSGCKQSLVRHLKEAHNKKINEYMNMCAGCYLVLTIRPSNHTCILNRQMREEQRVPHFRFQCDVQYCHYSAPTKRGLNNHKVATHVRQWRRRDNQRQAEQRQGNQQAEGNPASAQPSQEVGENRDNEQREQPQNYEQQQQRETQGQRERHRWTPPPRDGEVEGPETPRPVSGRSTPVSPLSPDDQETRLRSITPSQLLQNEPSPREESQHPGDLTPLLHMPRMPLSPLSPDEEHGGDSTQTGEQIMQSQETNEGSQSNLSESLTPLSQSEATQTLSGEGNIQEQIGITPEPNEERDEAEETWILEPFLGTVYEIQRNPDWARFEEVLIEIEVAIQAANRINISQGQNTTRKITDANDCKQIQRLYKYNRRRAIRLIAEGNGARCEISKERIEEHFQHMMVEKDCDLNTVEHIPEPPHDRPEMEMQPFTEKEVFTKLAAAENSSPGEDRISYENWRKADPSCRVMAAIFNVCLRAKRIPVSWKRYRTILVPKKGGNPEVVSNWRPITLSRTIYKVYTGCLTARLRRWLVDNEVLCAAQKGFMPSDGVIEHNYILQHHMDDARRNNGDTCIAALDLTNAFGSVSLDLIKRALNRIGVGRDFETVAGDIISGKTTRILTKEGETEEIPVQCGVQQGCPISGLLFNIAVEPLLRKIAAEGMILDQQHKHPCLAYADDITIITKQQDNLQQLLYIATEQCSMMGLDLNPSKSSSLHLSGRRPRGMRQTQFYVGETPIQWKSDGEATLFLGRPVGFHLLPNIQTVEELMQLGTKILTSKLAPWQRIDAVKTFMFPAGVHAMRTWQLRKTDWAHLDNEMKTMLKHTLHLPSRASNEYLYGSSKAGACGVPLAAEDSDIFLVDTAYKLLTSPDPDVREIAREECRRVATMTTRQEPSMTDACMYLTQGEMQTRGGDHQTIWSRARCASGRMGVSWIAEGGDNIKIKCTDSIIEEKDRRKVAKTIRSQRRQMRDEVLQNKPDQGKVMKLVAQERASSAFVRNGAYTTFADWRFIHRARLNLLPVNGAKRGQNRDRRCRRCNREETLPHVVNHCMIHSRAMQKRHNALVDRVRKAAEGRHWKVMSANERVPGAADNGRPDLVIEKNREVILIDVTCPFENGQEAFKEARLRKEEKYAELAAEMRRQYQQVKVAAFIVGPLGAYDPENEKLMKRLASKGYLRLFRKLCVSDAIRWSRMIYIEHTSGARQYVG

SEQ ID NO: 22964 - protein, 1251 aa, Homarus americanus
MDDEEPRGRNEGDRQPERRNRMLTIWFPAPPSFKCTERTQGCPWECASSGWSGCKQSLVRHLKEAHNKKINEYMNMCAGCYLVLTIRPSNHTCILNRQMREEQRVPHFRFQCDVQYCHYSAPTKRGLNNHKVATHVRQWRRRDNQRQAEQRQGNQQAEGNPASAQPSQEVGENRDNEQREQPQNYEQQQQRETQGQRERHRGTPPPRDGEVEGPETPRPVSGRSTPVSPLSPDDQETRLRSITPSQLLQNEPSPREESQHPGDLTPLLHMPRMPLSPLSPDEEHGGDSTRTGEQIMQSQETNEGRQSNLSESPTPLSQSEATQTLSGEGNIQEQIGITPEPNEERDEAEETWILEPFLGTVYEIQRNPDWARFEEVLIEIEVAIQAANRINISQGQNTTRKITDANDCKQIQRLYKYNRRRAIRLIAEGNGARCEISKERIEEHFQHMMVEKDCDLNTVEHIPEPPHDRPEMEMQPFTEKEVFTKLAAAENSSPGEDRISYENWRKADPSCRVMAAIFNVCLRAKRIPVSWKRYRTILVPKKGGNPEVVSNWRPITLSRTIYKVYTGCLTARLRRWLVDNEVLCAAQKGFMPSDGVIEHNYILQHHMDDARRNNGDTCIAALDLTNAFGSVSLDLIKRALNRIGVGRDFETVAGDIISGKTTRILTKEGETEEIPVQCGVQQGCPISGLLFNIAVEPLLRKIAAEGMILDQQHKHPCLAYADDITIITKQQDNLQQLLYIATEQCSMMGLDLNPSKSSSLHLSGRRPRGMRQTQFYVGETPIQWKSDGEATLFLGRPVGFHLLPNIQTVEELMQLGTKILTSKLAPWQRIDAVKTFMFPAGVHAMRTWQLRKTDWAHLDNEMKAMLKHTLHLPSRASNEYLYGSSKAGACGVPIAAEDSDIFLVDTAYKLLTSPDPDVREIAREECRRVATMTTRQEPSMTDACMYLTQGEMQTRGGDHQTIWSRARCASGRMGVSWIAEGGDNIKIKCTDSIIEEKDRRKVAKTIRSQRRQMRDEVLQNKPDQGKVIKLVAQERASSAFVRNGAYTTFADWRFIHRARLNLLPVNGAKRGQNRDRRCRRCNREETLPHVVNHCMIHSRAMQKRHNALVDRVQKAAEGRHWKVMSANERVPGAADNGRPDLVIEKNREVILIDVTCPFENGQEAFKEARLRKDEKYAELAAEMRRQYQQVKVAAFIVGPLGAYDPENEKLMKRLASKGYLRLFRKLCVSDAIRWSRMIYIEHTSGARQYVG

SEQ ID NO: 22965 - protein, 1292 aa, Homarus americanus
MDDEGPRGRNEGEDVGGRAGTPATGEPVQIGGSGGDSDSTDGGGMDALPRPSGDRQPERRNRMLTIWFPAPPSFKCTERTQGCPWECASSGWSGCKQSLVRHLKEAHNKKINEYMNMCAGCYLVLTIRPSNHTCILNRQMREEQRDPHFRFQCDVQYCHYSAPTKRGVNNHKAATHVRQRRRRDNQRQAEQRQGNQQPEGNPASAQPTQEVGENRDNEQREQPQNDEQQQQSETQGQRERHRWTPPPRDGEVEGPETPRPVSGRSTPVSPLSPDDQETRLRSITPSQLLQNEPSPGEESQHAGDLTPLLHIPRMPLSPLSPDEQHGGDSTQTGEQIMQSQETNEGSQSNLSESLTPLSQSEATQTLSGEGNIQEHIGITPEPNEERDEAEGTWILDPFLGTLYEIQRNPDWARFEEVLIELEVAIQAANRINISQGQNTTRKITDVNDCKQIQRLYKYNRRRAIRLIVEGNGARCEISKERIEEHFQHMMVEKDCDLNTVEHIPEPPHDRPEMEMQPFTEKEVFTKLAAAENSSPGEDRISYENWRKADPSCRVMAAIFNVCLRAKRIPVSWKRYRTILVPKKGGNPEVVSNWRPITLSRTIYKVYTGCLTARLRRWLVDNEVLCAAQKGFMPSDGVIEHNYILQHHMDDARRNNGDTCIAALDLTNAFGSVSLDLIKRALNRIGVGRDFETVAGDIISGKTTRILTKEGETEEIPVQCGVQQGCPISGLLFNIAVEPLLRKIAAEGMILDQQHKHPCLAYADDITIITKQQDNLQQLLYIATEQCSMMGLDLNPSKSSSLHLSGRRPRGMRQTQFYVGETPIQWKSDGEATLFLGRPVGFHLLPNIQTVEELMQLGTKILTSKLAPWQRIDAVKTFMFPAGVHAMRTWQLRKTDWARLDNEMKTMLKHTLHLPSRASNEYLYGSSKAGACGVPLAAEDSDIFLVDTAYKLLTSPDPDVREIAREECRRVATMRARQEPSMTDACMYLTQGEMQTRGGDHQTIWSRARCASGRMGVSWIAEGGDNIKIKCTDSIIEEKDRRKVAKTIRSQRRQMRDEVLQNKPDQGKVMKLVAQERASSAFVRNGAYTTFADWRFIHRARLNLLPVNGAKRGQNRDRRCRRCNREETLPHVVNHCMIHSRAMQKRHNALVDRVRKAAEGRHWKVMSANERVPGAADNGRPDLVIEKNREVILIDVTCPFENGQEAFKEARLRKEEKYAELAAEMRRQYQQVKVAAFIVGPLGAYDPENEKLMKRLASKGYLRLFRKLCVSDAIRWSRMIYIEHTSGARQYVG

SEQ ID NO: 22966 - protein, 1005 aa, Homarus americanus
MDPPPPRDGEVEGPETPRPVSGRSTPVSPLSPDDQETRLRSITPSQLLQNEPSPREESQHPGDLTPLLHMPRMPLSPLSPDEQHGGDSTQTGEQIMQSQETNEGSQSNLSESLTPLSQSEATQTLSGEGNIQEQIGITPEPNEERDEAEETWILEPFLGTVYEIQRNPDWARFEEVLIEIEVAIQAANRINISQGQNTTRKITDVNDCKQIQRLYKYNRRRAIRLIADGNGARCEISKERIEEHFQHMMVEKDCDLNTVEHIPEPPDDRPEMEMQPFTEKEVFTKLAAAENSSPGEDRISYENWRKADPSCRVMAAIFNVCLRAKRIPDSWKRYRTILVPKKGGNPEVVSNWRPITLSRTIYKVYTGCLTARLRRWLVDNEVLCAAQKGFMPSDGVIEHNYILQHHMDNARRNNGDTCIAAFDLTNAFGSVSLDLIKRALNCIGVGRDFETVAGDIISGKTTRILTKEGETEEIPVQCGVQQGCPISGLLFNIAVEPLLRKIAAEGMILNQQHKHPCLAYADDITIITKQQDNLQQLLYIATEQCSRMGLDLNPSKSSSLHLSGQRPRGMRQTQFYVGETPIQWKSDGEATLFLGRPVGFHLLPNIQTVEELMQLGTKILTSKLAPWQRIDAVKTFMFPAGVHAMRTWQLRKTDWAHLDNEMKTMLKHTLHLPSRASSEYLYGSSKAGACGVPLAAEDSDIFLVDTAYKLLTSPDPDVREIAREECRRVATMRTRQEPSMTDACMYLTQGEMQTRGGDHQTIWSRARCASGRMGVSWIAEGGDNIKIKCTDSIIEEKDRRKVAKTIRSQRRQMRDEVLQNKPDQGKVMKLVAQERASSAFVRNGAYTTFADWRFIHRAILNLLPVNGAKRGQNRDRRCRRCNREETLPHVVNHCMIHSRAMQKRHNALVDRVRKAAEGQHWKIMSANERVPGAADNGRPDLVIEKNREVILIDVTCPFENGQEAFKEARLRKEEKYAELAAEMRRQYQQVKVAAFIVGPLGAYDP

SEQ ID NO: 22967 - protein, 982 aa, Homarus americanus
MPRMPLSPLSPEEQHGGDSTQTGEQIMQSQETNEGSQSNLSESLTPLSQSEATQTLNGEGNIQEQIGITPEPNEERDEAEETWILEPFLGTVYEIQRNPDWAKFEEVLIEIEVAIQAANRINISQGQNTTRKITDVNDCKQIQRLYKYNRRRAIRLIADGNGARCEISKERIEEHFQHMMVEKDCDLNTVEHIPEPPDDRPEMEMQPFTEKEVFTKLAAAENSSPGEDRISYENWRKADPSCRVMAAIFNVCLRAKRIPDSWKRYRTILVPKKGGNPEVVSNWRPITLSRTIYKVYTGCLTARLRRWLVDNEVLCAAQKGFMPSDGVIEHNYILQHHMDDARRNNGDTCIAALDLTNAFGSVSLDLIKRALNRIGVGRDFETVAGDIISGKTTRILTKEGETEEIPVQCGVQQGCPISGLLFNIAVEPLLRKIAAEGMILNQQHKHPCLAYADDITIITKQQDNLQQLLYIATEQCRRMGLDLNPSKSSSLHLSGRRPRGVHQTQFYVGETPIQWKSDGEATLFLGRPVGFHLLPNIQTVEELMQLGTKILTSKLAPWQRIDAVKTFMFPAGVHAMRTWQLRKTDWAHLDNEMKTMLKHTLHLPSRASNEYLYGSSKAGACGVPLAAEDSDIFLVDTAYKLLTSPDPDVREKAREECRRVATMRTRQEPSMTDACMYLTQGEMQTRGGDHQTIWSRARCASGRMGVSWIAEGGDNIKIKCTDSIIEEKDRRKVAKTIRSQRRQMRDEVLQNKPDQGKVMKLVAQERASSAFVRNGAYTTFADWRFIHRARLNLLPVNGAKRGQNRDRRCRRCNREETLTHVVNHCMIHSRAMQKRHNAVVDRVRKVAEGRHWKIMSANERVPGAADNERPDLVIEKNREVILIDVTCPFENGQEAFKEARLRKEEKYAELAAEMRKQNQQVKVAAFIVGPLGAYDPENEKLMKRLASKGYLRLFRKLCVSDAIRWSRMIYIEHTSGARQYVG

SEQ ID NO: 22968 - protein, 1251 aa, Homarus americanus
MDDEGPRGRNEGDRQPERRNRMLTIWFPAPPSFKCTERTQGCPWECASSGWSGCKQSLVRHLKEAHNKKINEYMNMCAGCYLVLTIRPSNHTCILNRQMREEQRVPHFRFQCDVQYCPYSAPTKRGLNNHKVATHVRQWRRRDNQRQAEQRQGNQQAEGNPASAQPSQEVGDNRDNEQREQPQNDEQQQQRETQGQRERHRWTPPPRDGEVEGPETPRPVSGRSTPVSPLSPDDQETRLRSITPSQLLQNEPSPREESQHPGDLTPLLHMPRMPLSPLSPDEQHGGDSTQTGEQIMQSQETNEGSQSNLSESLTPLSQSEATQTLSGEGNIQEQIGITPEPNVERDEAEETWILEPFLGTVYEIQRNPDWARFEEVLIEIEVAIQAANRINISQGQNTTRKITDANDCKQIQRLYKYNRRRAIRLIAEGNGARCEISKERIEEHFQHMMVEKDCDLNTVEHIPEPPHDRPEMEMQPFTEKEVFTKLAAAENSSPGEDRISYENWRKADPSCRVMAAIFNVCLRAKRIPVSWKRYRTILVPKKGGNPEVVSNWRPITLSRTIYKVYTGCLTARLRRWLVDNEVLCAAQKGFMPSDGVIEHNYILQHHMDDARRNNGDTCIAALDLTNAFGSVSLDLIKRALNRIGVGRDFETVAGDIISGKTTRILTKEGETEEIPVQCGVQQGCPISGLLFNIAVEPLLRKIAAEGMILDQQHKHPCLAYADDITIITKQQDNLQQLLYIATEQCSMMGLDLNPSKSSSLHLSGRRPRGMRQTQFYVGETPIQWKSDGEATLFLGRPVGFHLLPNIQTVEELMQLGTKILTSKLAPWQRIDAVKTFMFPAGVHAMRTWQLRKTDWAHLDNEMKTMLKHTLHLPSRASNEYLYGSSKAGACGVPLAAEDSDIFLVDTAYKLLTSPDPDVREIAREECRRVATMTTRQEPSMTDACMYLTQGEMQTRGGDHQTIWSRARCASGRMGVSWIAEGGDNIKIKCTDSIIEEKDRRKVAKTIRSQRRQMRDEVLQNKPDQGKVMKLVAQERASSAFVRNGAYTTFADWRFIHRARLNLLPVNGAKRGQNRDRRCRRCNREETLPHVVNHCMIHSRAMQKRHNALVDRVRKAAEGRHWKVMSANERVPGAADNGRPDLVIEKNREVILIDVTCPFENGQEAFKEARLRKEEKYAELAAEMRRQYQQVKVAAFIVGPLGAYDPENEKLMKRLASKGYLRLFRKLCVSDAIRWSRMIYIEHTSGARQYVG

SEQ ID NO: 22969 - protein, 1285 aa, Homarus americanus
MDDEEPRGRNEGDRQPERRNRMLTIWFPAPPSFKCTERTQGCPWECASSGWSGCKQSLVRHLKEAHNKKINEYMNMCAGCYLVLTIRPSNHTCILNRQMREEQRVPHFRFQCDVQYCHYSAPTKRGLNNHKVATHVRQWRRRDNQRQAEQRQGNQQAEGNPASAQPSQEVGENRDNEQREQPQNYEQQQQRETQGQRERHRGTPPPRDGEVEGPETPRPVSGRSTPVSPLSPDDQETRLRLITPSQLLQNEPSPREESQHPGDLTPLLHMPRMPLSPLSPDEEHGGDSTRTGEQIMQSQETNEGRQSNLSESPTPLSQSEATQTLSGEGNIQEQIGITPEPNEERDEAEETWILEPFLGTVYEIQRNPDWARFEEVLIEIEVAIQAANRINISQGQNTTRKITDANDCKQIQRLYKYNRRRAIRLIAEGNGARCEISKERIEEHFQHMMVEKDCDLNTVEHIPEPPHDRPEMEMQPFTEKEVFTKLAAAENSSPGEDRISYDNWRKADPRCRVMAAIFNVCLRAKRIPVSWKRYRTILVPKKGGNPEVVSNWRPITLSRTIYKVYTGCLTARLRRWLVDNEVLCAAQKGFMPSDGVIEHNYILQHHMDDARRNNGDTCIAALDLTNAFGSVSLDLIKRALNRIGVGRDFETVAGDIISGKTTRILTKEGETEEIPVQCGVQQGCPISGLLFNIAVEPLLRKIAAEGMILDQQHKHPCLAYADDITIITKQQDNLQQLLYIATEQCSMMGLDLNPSKSSSLHLSGRRPRGMRQTQFYVGETPIQWKSDGEATLFLGRPVGFHLLPNIQTVEELMQLGTKILTSKLAPWQRIDAVKTFMFPAGVHAMRTWQLRKTDWARLDNEMKTMLKHTLHLPSRASNEYLYGSSKAGACGVPLAAEDSDIFLVDTAYKLLTSPDPNVREIAREECRRVATMTTRQEPSMTDACMYLTQGEMQTRGGDHQTIWSRARCASGRMGVSWIAEGGDNIKIKCTDSIIEEKDRRKVAKTIRSQRRQMRDEVLQNKPDQGKVMKLVAQERASSAFVRNGAYTTFADWRFIHRARLNLLPVNGAKRGQNRDRRCRRCNREETLPHVVNHCMIHSRAMQKRHNALVDRVRKAAEGRHWKVMSANERVPGAADNGRPDLVIEKNREVILIDVTCPFENGQEAFKEARLRKEEKYAELAAEMRRQYQQVKVAAFIVGPLGAYDPENEKLIHLRHSGTPQTLPGTPLTLPGTTLSLPGTSLTLPGAPPTLPGTPLTLPGIPLTLPGTPLTLPGTHLPGTPPPRYL

SEQ ID NO: 22970 - protein, 907 aa, Homarus americanus
MKSEMKLRRHGYWSRFWAQCMRSSGTRTGQEVLIEIEVAIQAANRINISQGQNTTRKITDANDCKQIQRLYKYNRRRAIRLIAEGNGARCEISKERIEEHFQQMMVEKDCDLNTVEHIPEPPHDRPEMEMQPFTEKEVFTKLAAAENSSPGEDRISYENWRKADPSCRVMAAIFNVCLRAKRIPVSWKRYRTILVPKKGGNPEVVSNWRPITLSRTIYKVYTGCLTARLRRWLVDNEALCAAQKGFMPSDGVIEHNYILQHHMDDARRNNGDTCIAALDLTNAFGSVSLDLIKRALNRIGVGRDFETVAGDIISGKTTRILTKEGETEEIPVQCGVQQGCPISGLLFNIAVEPLLRKIAAEGMILDQQHKHPCLSYADDITIITKQQDNIQQLLYIATEQCSMMGLDLNPSKSSSLHLSGRRPRGMRQTQFYVGETPIQWKSDGEATLFLGRPVGFHLLPNIQTVEELMQRGTKILTSKLAPWQRIDAVKTFMFPAGVHAMRTWQLRKTDWARLDNEMKTMLKHTLHLPSRASNEYLYGSSKAGACGVPLAAEDSDIFLVDTAYKLLTSPDPDVKEIAREECRRVATMTTRQEPSMTDACMYLTQGEMQTRGGDHQTIWSRARCASGRMGVSWIAEGGDNIKIKCTDSIIEEKDRRKVAKTIRSQRRQMRDEVLQNKPDQGKVMKLVAQERASSAFVRNGAYTTFADWRFIHRARLNLLPVNGAKRGQNRDRRCRRCNREETLPHVVNHCMIHSRAMQKRHNALVDRVRKAAEGRHWKVMSANERVPGAADNGRPDLVIEKNREVILIDVTCPFENGQEAFKEARLRKEEKYAELAAEMRRQYQQVKVAAFIVGPLGAYDPENEKLMKRLASKGYLRLFRKLCVSDAIRWSRMIYIEHTSGARQYVG

SEQ ID NO: 22971 - protein, 1251 aa, Homarus americanus
MDDEGPRGRNEGDRQPERRNRMLTIWFPAPPSFKCTERTQGCPWECASSGWSGCKQSLVRHLKEAHNKKINEYMNMCAGCYLVLTIRPSNHTCILNRQMREEQRVPHFRFQCDVQYCPYSAPTKRGLNNHKVATHVRQWRRRDNQRQAEQRQGNQQAEGNPASAQPSQEVGENRDNEQREQPQNDEQQQQRETQGQRERHRWTPPPRDGEVEGPETPRPVSGRSTPVSPLSPDDQETRLRSITPSQLLQNEPSPREESQHPGDLTPLLHMPRMPLSPLSPDEQHGGDSTQTGDQIMQSQETNEGSQSNLSESLTPLSQSEATQTLSGEGNIQEQIGITPEPNEERDEAEETWILEPFLGTVYEIQRNPDWARFEEVPIEIEVAIQAANRINISQGQNTTRKITDVNDCKQIQRLYKYNRRRAIRLIAEGNGARCEISKERIEEHFQHMMVEKDCDLNTVEHIPEPPDDRPEMEMQPFTEKEVFTKLAAAENSSPGEDRISYDNWRKADPSCRVMAGIFNVCLRAKRIPDSWKRYRTILVPKKGGNPEVVSKWRPITLSRTIYKVYTGCLTARLRSWLVDNEVLCAAQKGFMPSDGVIEHNYILQHHMDDARRNNGDTCIAALDLTNAFGSVSLDLIKRALNRIGVGRDFETVAGDIISGKTTRILTKEGETEEIPVQCGVQQGCPISGLLFNIAVEPLLRKIAAEGMILNQQYKHPCLAYADYITIITKQQDNLQQILYIATEQCSRMGLDLNPSKSSSLHLSGRRPRGMRQTQFYVGETPIQWKSDGEATLFLGRPVGFHLLPNIQTVEELMQLGTKILTSKLAPWQRIDAVKTFMFPAGVHAMRTWQLRKTDWAHLDNEMKTMLKHTLHLPSRASNEYMYGSSKAGACGVPLAAEDSDIFLVDTAYKLLTSPDPDVRQIAREECRRVATMRTRQEPSMTDACMYLTQGEMQTRGGDHQTIWSRARCASGRMGVSWIAEGGDNIKIKCTDSIIEEKDRRKVAKTIRSQRRQMRDEVLQNKPDQGKVMKLVAQERASSAFVRNGAYTTFADWRFIHRARLNLLPVNGAKRGQNRDRRCRRCNREETLPHVVNHCMIHSRAMQKRHNALVDRVRKAAEGRHWKIMSANERVPGAADNGRPDLVIEKNREVILIDVTCPFENGQEAFKEARLRKEEKYAELAAEMRRQYQQVKVAAFIVGPLGAYDPENEKLMKRLASKGYLRLFRKLCVSDAIRWSRMIYIEHTSGARQYVG

SEQ ID NO: 22972 - protein, 1229 aa, Homarus americanus
MSYNRCIYVTVRHRCDFFLGCKKAGCNCPFIRSLVGYNMRSYTCMSKINEYMNMCAGCYLVLTIRPSNHTCILNRQMREEQRVPHFRFQCDVQYCHYSAPTKRGLNNHKVATHVRQWRRRDNQRQAEQRQGNQQAEGNPASAQPSQEVGENRDNEQREQPQNYEQQQQRETQGQRERHRGTPPPRDGEVEGPETPRPVSGRSTPVSPLSPDDQETRLRSITPSQLLQNEPSPREESQHPGDLTPLLHMPRMPLSPLSPDEEHGGDSTRTGEQIMQSQETNEGRQSNLSESPTPLSQSEATQTLSGEGNIQEQIGITPEPNEERDEAEETWILEPFLGTVYEIQRNPDWARFEEVLIEIEVAIQAANRINISQGQNTTRKITDVNDCKQIQRLYKYNRRRAIRLIAEGNGARCEISKERIEEHFQHMMVEKDCDLNTVEHIPEPPHDRPEMEMQPFTEKEVFTKLAAAENSSPGEDRISYENWRKADPSCRVMAAIFNVCLRAKRIPVSWKRYRTILVPKKGGNPEVVSNWRPITLSRTIYKVYTGCLTARLRRWLVDNEVLCAAQKGFMPSDGVIEHNYILQHHMDDARRNNGDTCIAALDLTNAFGSVSLDLIKRALNRIGVGRDFETVAGDIISGKTTRILTKEGETEEIPVQCGVQQGCPISGLLFNIAVEPLLRKIAAEGMILDQQHKHPCLAYADDITIITKQQDNLQQLLYIATEQCSMMGLDLNPSKSSSLHLSGRRPRGMRQTQFYVGETPIQWKSDGEATLFLGRPVGFHLLPNIQTVEELMQLGTKILTSKLAPWQRIDAVKTFMFPAGVHAMRTWQLRKTDWAHLDNEMKTMLKHTLHLPSRASNEYLYGSSKAGACGVPLAAEDSDIFLVDTAYKLLTSPDPDVKEIAREECRRVATMTTRQEPSMTDACMYLTQGEMQTRGGDHQTIWSRARCASGRMGVSWIAEGGDNIKIKCTDSIIEEKDRRKVAKTIRSQRRQMRDEVLQNKPDQGKVMKLVAQERASSAFVRNGAYTTFADWRFIHRARLNLLPVNGAKRGQNRDRRCRRCNREETLPHVVNHCMIHSRAMQKRHNALVDRVRKAAEGRHWKVMSANERVPGAADNGRPDLVIEKNREVILIDVTCPFENGQEAFKEARLRKEEKYAELAAEMRRQYQQVKVAAFIVGPLGAYDPENEKLMKRLASKGYLRLFRKLCVSDAIRWSRMIYIEHTSGARQYVG

SEQ ID NO: 22973 - protein, 1292 aa, Homarus americanus
MDDEGPRGRNEGEDVGWRAGTPATGEPVQIGGSGGDSDSTDGGGMDALPRPSGDRQPERRNRMLTIWFPAPPSFKCTERTQGCPWECASSGWSGCKQSLVRHLKEAHNKKINEYMNMCAGCYLVLTIRPSNHTCILNRQMREEQRVPHFRFQCDVQYCHYSAPTKRGLNNHKAATHVRQWRRRDNQRQAEQRQGNQQPEGNPASAQPTQEVGENRDNEQREQPQNDEQQQQRETQGQRERHRWTPPPRDGEVEGPETPRPVSGRSTPVSPLSPDDQETRLRYITPSQLLQNEPSPGEESQHAVDLTPLLHIPRMPLSPLSPDEQHGGDSTQTGEQIMQSQETNEGSQSNRSESPTPLSQSEATQTLSGEGNIQEQIGITPEPNEERDEAEETWILEPFLGTLYEIQRNPDWARFEEVLIEIEVAIQAANRINISQGQNTTRKITDVNDCKQIQRLYKYNRRRAIRLIVEGNGARCEISKERIEEHFQHMMVEKECDLNTVEHIPEPPDDRTEMEMQPFTEKEVFTKLAAAENSSPGEDRISYDNWRKADPRCRVMAAIFNVCLRAKRIPDSWKRYRTILVPKKGGNPEVVANWRPITLSRTIYKVYTGCLTARLRRWLVDNEVLCAAQKGFMPSDGVIEHNYILQHHMDDARRNNGDTCIAALDLTNAFGSVSLDLIKRALNRIGVGRDFETVAGDIISGKTTRILTKEGETEEIPVQCGVQQGCPISGLLFNIAVEPLLRKIAAEGMILNQQHKHPCLAYADDITIITKQQDNLQQLLCIATEQCSRMGLDLNPSKSSSLHLSGRRPRGMRQTQFYVGETPIKWKSDGEATLFLGRPVGFHLLPNIQTVEELMQLGTKILTSKLAPWQRIDAVKTFMFPAGGHAMRTWQLRKTDWAHLDNEMKTMLKHTLHLPSRASNEYLYGSSKAGACGVPLAAEDSDIFLVDTAYKLLTSPDPDVREIAREECRRVATMRTRQEPSMTDACMYLTQGEMQTRGGDHQTIWSRARCASGRMGVSWIAEGGDNIKIKCTDSIIEEKDRRKVAKTIRSRRRQMRDEVLQNKPDQGKVMKLVAQERASSAFVRNGAYTTFADWRFIHRARLNLLPVNGAKRGQNRDRRCRRCNREETLPHVVNHCMIHSRAMQKRHNALVDRVRKAAEGRHWKIMSANERVPGAPDNGRPDLVIEKNREVILIDVTCPFENGQEAFKEARLRKEEKYAELATEMRRQYQQVKVAAFIVGPLGAYDPENEKLMKRLASKGYLRLFRKLCVSDAIRWSRMIYIEHTSGARQYVG

SEQ ID NO: 22974 - protein, 1050 aa, Homarus americanus
MDTSTQGWRSGRTRDTTPRLWEKYTSVTTEPRRSKTRLRSITPSQLLQNEPSPREESQHPGDLTPLLHMPRMPLSPLSPDEEHGGDSTRTGEQIMQSQETNEGSQSNLSESPTPLSQSEATQTLSGEGNIQEQIGVTPEPNEERDEAEETWILEPFLGTVYEIQRNPDWARFEEVLIEIEVAIQAANRINISQGQNTTRKITDANDCKQIQRLYKYNRRRAIRLIAEGNGARCEISKERIEEHFQHMMVEKDCDLNTVEHIPEPPHDRPEMEMQPFTEKEVFTKLAAAENSSPGEDRISYENWRKADPSCRVMAGIFNVCLRAKRIPVSWKRYRTILVPKKGGNPEVVSNWRPITLSRTIYKVYTGCLTARLRRWLVDNEVLCAAQKGFMPSDGVIEHNYILQHHMDDARRNNGDTCIAALDLTNAFGSVSLDLIKRALNRIGVGRDFETVAGDIISGKTTRILTKEGETEEIPVQCGVQQGCPISGLLFNIAVEPLLRKIAAEGMILDQQHKHPCLAYADDITIITKQQDNLQQLLYIATEQCSRMGLDLNPSKSSSLHLSGRRPRGMRQTQFYVGETPIQWKSDGEATLFLGRPVGFHLLPNIQTVEELMQLGTKILTSKLAPWQRIDAVKTFMFPAGVHAMRTWQLSKTDWARLDNEMKTMLKHTLHLPSRASNEYLYGSSKAGACGVPLAAEDSDIFLVDTAYKLLTSPDPDVREIAREECRRVATMTTRQEPSMTDACRYLTQGEMQTRGGDHQTIWSRARCASGRMGVSWIAEGRDNIKIKCTDSIIEEKDRRKVAKTIRSQRRQMRDEVLQNKPDQGKVMKLVAQERASSAFVRNGAYTTFADWRFIHRARLNLLPVNGAKRGQNRDRRCRRCNREETLPHVVNHCMIHSRAMQKRHNALVDRVRKAAEGRHWKVMSANERVPGAADNGRPDLVIEKNREVILIDVTCPFENGQEAFKEARLRKEEKYAELAAEMRRQYQQVKVAAFIVGPLGAYDPENEKLMKRLASKGYLRLFRKLCVSDAIRWSRMIYIEHTSGARQYVG

SEQ ID NO: 22975 - protein, 1251 aa, Homarus americanus
MDDEGPRGRNEGDRQPERRNRMLTIWFPAPPSFKCTERTQGCPWECASSGWSGCKQSLVRHLKEAHNKKINEYMNMCAGCYLVLTIRPSNHTCILNRQMREEQRVPQFRFQCDVQYCPYSAPTKRGLNNHTVATHVRQWGRRDNQRQAEQRQGNQQAEGNPASAQPSQEVGENRDNEQREQPQNYEQQQQRETQGQRERHRWTPPPRDGEVEGPETPRPVSGRSTPVSPLSPDDQETRLRSITPSQLLQNEPSPREESQHPGDLTPLLHMPRMPLSPLSPDEQHGGDSTQTWEQIMQSQETNEGSQSNLSESLTPLSQREATQTLSGEGNIQEQIGITTEPNEERDEAEETWILEPFLGTVYEIQRNPDWARFEEVLIEIEVAIQAANRINISQGQNTTRKITDVNDCKQIQRLYKYNRRRAIRLIAEGNGARCEISKERIEEHFQHMMVEKDCDLNTVEHIPEPPDDRKEMEMQPFTEKEVFTKLAAAENSSPGEDRISYENWRKADPSCRVMAAIFNVCLRAKRIPDSWKRYRTILVPKKGGNPEVVSNWRPITLSRTIYKVYTGCLTARLRRWLVDNEVLCAAQKGFMPSDGVIEHNYILQHHMDDARRNNGDTCIAALDLTNAFGSVSLDLIKRALNRIGVGRDFETVAGDIISGKTTRILTKEGETEEIPVQCGVQQGCPISGLLFNIAVEPLLRKIAAEGMILNQQHKHPCLAYADDITIITKQQDNLQQLLYIATEQCSRMGLDLNPSKSSSLHLSGRRPRGMRQTQFYVGETPIQWKSDGEATLFLGRPVGFHLLPNIQTVEELMQLGTKILTSKLAPWQRIDAVKTFMFPAGVHAMRTWQLRKTDWAHLDNEMKTMLKHTLHLPSRASNEYLYGSSKAGACGVPLAAEDSDIFLVDTAYKLLTSPDPDVREIAREECRRVATMRTRQEPSMTDACMYLTQGEMQTRGGDHQTIWSRARCASGRMGVSWIAEGGDNIKIKCTDSIIEEKDRRKVAKTIRSQRRQMRDEVLQNKPDQGKVMKLVAQERASSAFVRNGAYTTFADWRFIHRARLNLLPVNGAKRGQNRDRRCRRCNREETLPHVVNHCMIHARAMQKRHNALVDRVRKAAEGRHWKIMSANERVPGAPDNGRPDLVIEKNREVILIDVTCPFENGQEAFKEARLRKEEKYAELAAEMRRQYQQVKVAAFIVGPLGAYDPENEKLMRRLASKGYLRLFRKLCVSDAIRWSRMIYIEHTSGARQYVG

SEQ ID NO: 22976 - protein, 1251 aa, Homarus americanus
MDDEGPRGRNEGDRQPERRNRMLTIWFPAPPSFKCTERTQGCPWECASSGWSGCKQSLVRHLKEAHNKKINEYMNMCAGCYLVLTIRPSNHTCILNRQMREEQRVPHFRFQCDVQYCPYSAPTKRGLNNHKVATYVRQWRRRDNQRQAEQRQGNQQAEGNPASAQPSQEVGDNRVNERREQPQNDEQQQQRETQGQRERHRWTPPPRDGEVEGPETPRPVSGRSTPVSPLSPDDQETRLRSITPSQLLQNEPSPREESQHPGDLTPLLHMPRMPLSPLSPDEQHGGDSTQTGEQIMQSQETNEGSQSNLSESLTPLSQSEATQTLSGEGNIQEQIGITPEPNEERDEAEETWILEPFLGTVYEIQRNPDWARFEEVPIEIEVAIQAANRINISQGQNTTRKITDVNDCKQIQRLYKYNRRRAIRLIAEGNGARCEISKERIEEHFQHMMVEKDCDLNTVEHIPEPPDDRPEMEMQPFTEKEVFTKLAAAENSSPGEDRISYDNWRKADPSCRVMAAIYNVCLRAKRIPDSWKRYRTILVPKKGGNPEVVANWRPITLSRTIYKVYTGCLTARLRRWLVDNEVLCAAQKGFMPSDGVIEHNYILQHHMDDARRNNGDTCIAALDLTNAFGSVSLDLIKRALNRIGVGRDFETVAGDIISGKTTRILTKEGETDEIPVQCGVQQGCPISGLLFNIAVEPLLRKIAAEGMILNQQHKHPCLAYADDITIITKQQDNLQQLLYIATEQCSRMGQDLNPSKSSSLHLSERRPRGMRQTQFYFGETPIKWKSDGEATLFLGRPVGFHLLPNIQTVEELMQLGTKMLTSKLAPWQRIDAVKTFMFPAGVHAMRTWQLRKTDWAHLDNEMKTMLKHTLHLPSRASNEYLYGSSKAGACGVPLAAEDSDIFLVDTAYKLLTSPDPDVREIAREECRRVATMRTRQEPSMTDACMYLTQGEMQTRAGDHQTIWSRARCASGRMGVSWIAEGGDNIKIKCTDSIIEEKDRRKVAKTIRSQRRQMRDEVLQNKPDQGKVMKLIAQERASSAFVRNGAYTTFADWRFIHRARLNLLPVNGAKRGQNRDRRCRRCNREETLPHVVNHCMIHSRAMQKRHNALVDRVRKAAEGRHWKIMSANERVPGAADNGRPDLVIEKNREVILIDVTCPFENGQEAFKEARLRKEEKYAELAAEMRRQYQQVKVAAFIVGPLGAYDPENEKLMKRLASKGYLRLFRKLCVSDAIRWSRMIYIEHTSGARQYVG

SEQ ID NO: 22977 - protein, 1251 aa, Homarus americanus
MDDEEPRGRNEGDRQPERRNRMLTIWFPAPPSFKCTERTQGCPWECASSGWSGCKQSLVRHLKEAHNKKINEYMNMCAGCYLVLTIRPSNHTCILNRQMREEQRVPHFRFQCDVQYCHYSAPTKRGLNNHKVATHVRQWRRRDNQRQAEQRQGNQQAEGNPASAQPSQEVGENRDNEQREQPQNYEQQQQRETQGQRERHRWTPPPRDGEVEGPETPRPVSGRSTPVSPLSPDDQETRLRSITPSQLLQNEPSPREESQHPGDLTPLLHMPRMPLSPLSPDEEHGGDSTRTGEQIMQSQETNEGRQSNLSESPTPLSQSEATQTLSGEGNIQEQIGITPEPNEERDEAEETWILEPFLGTVYEIQRNPDWARFEEVLIEIEVAIQAANRINISQGQNTTRKITDANDCKQIQRLYKYNRRRAIRLIAEGNGARCEISKERIEEHFQHMMVEKDCDLNTVEHIPEPPHDRPEMEMQPFTEKEVFTKLAAAENSSPGEDRISYENWRKADPSCRVMAAIFNVCLRAKRIPVSWKRYRTILVPKKGGNPEVVSNWRPITLSRTIYKVYTGCLTARLRRWLVDNEVLCAAQKGFMPSDGVIEHNYILQHHMDDARRNNGDTCIAALDLTNAFGSVSLDLIKRALNRIGVGRDFETVAGDIISGKTTRILTKEGETEEIPVQCGVQQGCPISGLLFNIAVEPLLRKIAAEGMILDQQHKHPCLAYADDITIITKQQDNLQQLLYIATEQCSMMGLDLNPSKSSSLHLSGRRPRGMRQTQFYVGETPIQWKSDGEATLFLGRPVGFHLLPNIQTVEELMQLGTKILTSKLAPWQRIDAVKTFMFPAGVHAMRTWQLRKTDWAHLDNEMKAMLKHTLHLPSRASNEYLYGSSKAGACGVPIAAEDSDIFLVDTAYKLLTSPDPDVREIAREECRRVATMTTRQEPSMTDACMYLTQGEMQTRGGDHQTIWSRARCASGRMGVSWIAEGGDNIKIKCTDSIIEEKDRRKVAKTIRSQRRQMRDEVLQNKPDQGKVMKLVAQERASSAFVRNGAYTTFADWRFIHRARLNLLPVNGAKRGQNRDRRCRRCNREETLPHVVNHCMIHSRAMQKRHNALVDRVRKAAEGRHWKVMSANERVPGAADNGRPDLVIEKNREVILIDVTCPFENGQEAFKEARLRKEEKYAELAAEMRRQYQQVKVAAFIVGPLGAYDPENEKLMKRLASKGYLRLFRKLCVSDAIRWSRMIYIEHTSGARQYVG

SEQ ID NO: 22978 - protein, 1262 aa, Homarus americanus
MCVWVFVWVKQDGRRRAKGKKRRRSPAGKKKPNADHMVPCTTILQMHREDAGMPMGMCVIGVVWLQAITSPTSKGSPQQENQRIYEHVCRVLSGTDYPAKQSHVHPQQADEGGAKGSPFSFQCDVQYCHYSAPTKRGLNNHKVATHVRQWRRRDNQRQAEQRQGNQQAEGNPASAQPSQEVGENRDNEQREQPQNYEQQQQRETQGQRERHRWTPPPRDGEVEGPETPRPVSGRSTPVSPLSPDDQETRLRSITPSQLLQNEPSPREESQHPGDLTPLLHMPRMPLSPLSPDEEHGGDSTQTGEQIMQSQETNEGSQSNLSESPTPLSQSEATQTLSGEGNIQEQIGITPEPNEERDEAEETWTLEPFLGTVYEIQRNPDWARFEEVLIEIEVAIQAANRINISQGQNTTRKITDANDCKQIQRLYKYNRRRAIRLIADGNGARCEISKERIEEHFQQMMVEKDCDLNTVEHIPEPPDDRPEMEMQPFTEKEVFTKLAAAENSSPGEDRISYENWRKADPSCRVMAAIFNVCLRAKRIPVSWKRYRTILVPKKGGNPEVVSNWRPITLSRTIYKVYTGCLTARLRRWLVDNEVLCAAQKGFMPSDGVIEHNYILQHHMDDARRNNGDTCIAALDLTNAFGSVSLDLIKRALNRIGVGRDFETVAGDIISGKTTRILTKEGETEEIPVQCGVQQGCPISGLLFNIAVEPLLRKIAAEGMILDQQHKHPCLAYADDITIITKQQDNLQQLLYIATEQCNMMGLDLNSSKSSSLHLSGRRPRGMRQTQFYVGETPIQWKSDGEATLFLGRPVGFHLLPNIQTVEELMQLGTKILTSKLAPWQRIDAVKTFMFPAGVHAMRTWQLRKTDWAHLDTEMKTMLKHTLHLPSRASNEYLYGSSKAGACGVPLAAEDSDIFLVDTAYKLLTSPDPDVREIAREECRRVATMTTRQEPSMTDACRYLTQGEMQTRGGDHQTIWSRARCASGRMGVSWIAEGRDNIKIKCTDSIIEEKDRRKVAKTIRSQRRQMRDEVLQNKPDQGKVMKLVAQERASSAFVRNGAYTTFADWRFIHRARLNLLPVNGAKRGQNRDRRCRRCNREETLPHVVNHCMIHSRAMQKRHNALVDRVRKAAEGRHWKVMSANERVPGAADNGRPDLVIEKNREVILIDVTCPFENGQEAFKEARLRKEEKYAELAAEMRRQYQQVKVAAFIVGPLGAYDPENEKLMKRLASKGYLRLFRKLCVSDAIRWSRMIYIEHTSGARQYVG

SEQ ID NO: 22979 - protein, 1208 aa, Homarus americanus
MDDEGPRGRNEGEDVGWRAGTPATGEPVQIGGSGGDSDSTDGGGMDALSRPSGDRQPERRNRMLTIWFPAPPSFKCTERTQGCPWECVSSGWSGCKQSLVRHLKEAHNKKINEYMNMCAGCYLVLTIRPSNHTCILNRQMREEQRDPHFRFQCDVQYCHYSAPTKRGVNNHKAATHVRQRRRRDTQRQAEQRQGNQQPEGNPASAQPTQEVGENRDNEQREQPQNDEQQQQRETQGQRERHRWTPPPRDGEVEGPDTPCPVSGRSTPVSPLSPDDQETRLRSITPSQLLQNEPSPGEESQHAGDLTPLLHIPRMPLSPLSPDEQHGGDSTQTGEQIMQSQETNEGSQSNLSESLTPLSQSEATQTLSGEGNIQEHIGITPEPNEERDEAEETWILDPFLGTLYEIQRNPDWARFEEVLIEIEVTIQAANRINISQGQNTTRKITDVNDCKQIQRLYKYNRRRAIRLIVEGNGARCEISKERIEEHFQHMMVEKECDLNTVEHNPEPPDDRPEMEMQPFTEKEVFTKLAAAENSSPGEDRISYDNWRKADPSCRVMAAIFNVCLRAKRIPDSWKRYRTILVPKKGGNPEVVSNWRPITLSRTIYKVYTGCLTARLRRWLVDNEVLCAAQKGFMPSDGVIEHNYILQHHMDDARRNNGNTCIAALDLTNAFGSVSLDLIKRALNRIGVGRDFEAVAGDIISGKTTRILTKEGETEEIPVQCGVQQGCPISGLLFNIAVEPLLRKIAAEGMILNQQHKHPCLAYADDITIITKQQDNLQQLLYKATEQCSRMGLDINPSKCSSLHQSGRRPRGMRQTQFYVGETPIQWKSDGEATLFLGRPVGFHLLPNIQTVEELMHLGTKILTSKLAPWQRIDALKTFMYPAGVHAMRTWQLRKTDWAHLDNEMKTMLKHTLHLPSRASNEYLYGSSKAGACGVPLAAEDSDIFLVDTAFKLLTSPDPDVREIAREECRRVATMRTRQEPSMTDACIYLTQGEMQTRGGDHQTIWSRARCASGRMGVSWIAEGRDNIKIKCTDSIIEEKDRRKVAKTIRSRRRQMRDEVLQNKPDQGKVMKLVAQERASSAFVRNGAYTTFADWRFIHRARLNLLPVNGAKRGQNRDRICRRCNREETLLHVVNHCMIHARAMQKRHNALVDRVRKAAEGRHWKIMSANERVPGAPDNGRPDLVIEKNREVILIDVTCPFENGQEAFKE

SEQ ID NO: 22980 - protein, 1251 aa, Homarus americanus
MDDEEPRGRNEGDRQPERRNRMLTIWFPAPPSFKCTERTQGCPWECASSGWSGCKQSLVRHLKEAHNKKINEYMNMCAGCYLVLTIRPSNHTCILNRQMREEQRVPHFRFQCDVQYCHYSAPTKRGLNNHKVATHVRQWRRRDNQRQAEQRQGNQQAEGNPASAQPSQEVGENRDNEQREQPQNYEQQQQRETQGQRERHRGTPPPRDGEVEGPETPRPVSGRSTPVSPLSPDDQETRLRSITPSQLLQNEPSPREESQHPGDLTPLLHMPRMPLSPLSPDEEHGGDSTRTGEQIMQSQETNEGRQSNLSESPTPLSQSEATQTLSGEGNIQEQIGITPEPNEERDEAEETWILEPFLGTVYEIQRNPDWARFEEVLIEIEVAIQAANRINISQGQNTTRKITDANDCKQIQRLYKYNRRRAIRLIAEGNGARCEISKERIEEHFQHMMVEKDCDLNTVEHIPEPPHDRPEMEMQPFTEKEVFTKLAAAENSSPGEDRISYENWRKADPSCRVMAAIFNVCLRAKRIPVSWKRYRTILVPKKGGNPEVVSNWRPITLSRTIYKVYTGCLTARLRRWLVDNEVLCAAQKGFMPSDGVIEHNYILQHHMDDARRNNGDTCIAALDLTNAFGSVSLDLIKRALNRIGVGRDFETVAGDIISGKTTRILTKEGETEEIPVQCGVQQGCPISGLLFNIAVEPLLRKIAAEGMILDQQHKHPCLAYADDITIITKQQDNLQQLLYIATEQCSMMGLDLNPSKSSSLHLSGRRPRGMRQTQFYVGETPIQWKSDGEATLFLGRPVGFHLLPNIQTVEELMQLGTKILTSKLAPWQRIDAVKTFMFPAGVHAMRTWQLRKTDWAHLDNEMKAMLKHTLHLPSRASNEYLYGSSKAGACGVPIAAEDSDIFLVDTAYKLLTSPDPDVREIAREECRRVATMTTRQEPSMTDACMYLTQGEMQTRGGDHQTIWSRARCASGRMGVSWIAEGGDNIKIKCTDSIIEEKDRRKVAKTIRSQRRQMRDEVLQNKPDQGKVIKLVAQERASSAFVRNGAYTTFADWRFIHRARLNLLPVNGAKRGQNRDRRCRRCNREETLPHVVNHCMIHSRAMQKRHNALVDRVRKAAEGRHWKVMSANERVPGASDNGRPDLVIEKNREVILIDVTCPFENGQEAFKEARLRKEEKYAELAAEMRRQYQQVKVAAFIVGPLGAYDPENEKLMKRLASKGYLRLFRKLCVSDAIRWSRMIYIEHTSGARQYVG

SEQ ID NO: 22981 - protein, 907 aa, Homarus americanus
MKSEMKLRRHGYWSRFWAQCMRSSGTRTGQEVLIEIEVAIQAANRINISQGQNTTRKITDANDCKQIQRLYKYNRRRAIRLIAEGNGARCEISKARIEEHFQQMMVEKDCDLNTVEHIPEPSHDRPEMEMQPFTEKEVFTKLAAAENSSPGEDRISYENWRKADPSCRVMAAIFNVCLRAKRIPVSWKRYRTILVPKKGGNPEVVSNWRPITLSRTIYKVYTGCLTARLRRWLVDNEALCAAQKGFMPSDGVIEHNYILQHHMDDARRNNGDTCIAALDLTNAFGSVSLDLIKRALNRIGVGRDFETVAGDIISGKTTRILTKEGETEEIPVQCGVQQGCPISGLLFNIAVEPLLRKIAAEGMILDQQHKHPCLAYADDITIITKQQDNLQQLLYIATEQCSMMGLDLNPSKSSSLHLSGRRPRGMRQTQFYVGETPIQWKSDGEATLFLGRPVGFHLLPNIQTVEELMQLGTKILTSKLAPWQRIDAVKTFMFPAGVHAMRTWQLRKTDWAHLDNEMKTMLKHTLHLPSRASNEYLYGSSKAGACGVPLAAEDSDIFLVDTAYKLLTSPDPDVREIAREECRRVATMTTRQEPSMTDACRYLTQGEMQTRGGDHQTIWSRARCASGRMGGSWIAEGRDNIKIKCTDAIIEEKDRRKVAKTIRSRRRQMRDEVLQNKPDQGKVMKLVAQERASSAFVRNGAYTTFADWRFIHRARLNLLPVNGAKRGQNRDRRCRWCNREETLPHVVNHCMIHSRAMQKRHNALVDRVRKAAEGRHWKVMSANERVPGAADNGRPDLVIEKNREVILIDVTCPFENGQEAFKEARLRKEEMYAELAAEMRRQYQQVKVAAFIVGPLGAYDPENEKLMKRLASKGYLRLFKKLCVSDAIRWSRMIYIEHTSGARQYVG

SEQ ID NO: 22982 - protein, 1229 aa, Homarus americanus
MSYNRCIYVTVRHRCDFFLGCKKAGCNCPFIRSLVGYNMRSYTCMSKINEYMNMCAGCYLVLTIRPSNHTCILNRQMREEQRVPHFRFQCDVQYCHYSAPTKRGLNNHKVATHVRQWRRRDNQRQAEQRQGNQQAEGNPASAQPSQEVGENRDNEQREQPQNYEQQQQRETQGQRERHRGTPPPRDGEVEGPETPRPVSGRSTPVSPLSPDDQETRLRSITPSQLLQNEPSPREESQHPGDLTPLLHMPRMPLSPLSPDEEHGGDSTRTGEQIMQSQETNEGSQSNLSESPTPLSQSEATQTLSGEGNIQEQIGITPEPNEERDEAEETWILEPFLGTVYEIQRNPDWARFEEVLIEIEVAIQAANRINISQGQNTTRKITDANDCKQIQRLYKYNRRRAIRLIAEGNGARCEISKERIEEHFQHMMVEKDCDLNTVEHIPEPPHDRPEMEMQPFTEKEVFTKLAAAENSSPGEDRISYENWRKADPSCRVMAAIFNVCLRAKRIPVSWKRYRTILVPKKGGNPEVVSNWRPITLSRTIYKVYTGCLTARLRRWLVDNEVLCAAQKGFMPSDGVIEHNYILQHHMDDARRNNGDTCIAALDLTNAFGSVSLDLIKRALNRIGVGRDFETVAGDIISGKTTRILTKEGETEEIPVQCGVQQGCPISGLLFNIAVEPLLRKIAAEGMILDQQHKHPCLAYADDITIITKQQDNLQQLLYIATEQCSMMGLDLNPSKSSSLHLSGRRPRGMRQTQFYVGETPIQWKSDGEATLFLGRPVGFHLLPNIQTVEELMQLGTKILTSKLAPWQRIDAVKTFMFPAGVHAMRTWQLRKTDWAHLDNEMKTMLKHTLHLPSRASNEYLYGSSKAGACGVPLAAEDSDIFLVDTAYKLLTSPDPDVREIAREECRRVATMTTRQEPSMTDACMYLTQGEMQTRGGDHQTIWSRARCASGRMGVSWIAEGGDNIKIKCTDSIIEEKDRRKVAKTIRSQRRQMRDEVLQNKPDQGKVMKLVAQERASSAFVRNGAYTTFADWRFIHRARLNLLPVNGAKRGQNRDRRCRRCNREETLPHVVNHCMIHSRAMQKRHNALVDRVRKAAEGRHWKVMSANERVPGAADNGRPDLVIEKNREVILIDVTCPFENGQEAFKEARLRKEEKYAELAAEMRRQYQQVKVAAFIVGPLGAYDPENEKLMKRLASKGYLRLFRKLCVSDAIRWSRMIYIEHTSGARQYVG

SEQ ID NO: 22983 - protein, 1251 aa, Homarus americanus
MDDEGPRGRNEGDRQPERRNRMLTIWFPAPPSFKCTERTQGCPWECASSGWSGCKQSLVRHLKEAHNKKINEYMNMCAGCYLVLTIRPSNHTCILNRQMREEQRVPHFRFQCDVQYCPYSAPTKRGLNNHKVATYVRQWRRRDNQRQAEQRQGNQQAEGNPASAQPSQEVGDNRVNEQREQPQNDEQQQQRETQGQRERHRWTPPPRDGEVEGPETPRPVSGRSTPVSPLSQDDQETRLRSITPSQLLQNEPSPREESQHPGDLTPLLHMPRMPLSPLSPDEQHGGDSTQTGEQIMQSQETNEGSQSNLSESLTPLSQSEATQTLSGEGNIQEQIGITPEPNEERDEAEETWILEPFLGTVYEIQRNPDWARFEEVPIEIEVAIQAANRINISQGQNTTRKITDVNDCKQIQRLYKYNRRRAIRLIAEGNGARCEISKERIEEHFQHMMVEKDCDLNTVEHIPEPPDDRPEMEMQPFTEKEVFTKLAAAENSSPGEDRISYDNWRKADPSCRVMAAIYNVCLRAKRIPDSWKRYRTILVPKKGGNPEVVANWRPITLSRTIYKVYTGCLTARLRRWLVDNEVLCAAQKGFMPSDGVIEHNYILQHHMDDARRNNGDTCIAALDLTNAFGSVSLDLIKRALNRIGVGRDFETVAGDIISGKTTRILTKEGETDEIPVQCGVQQGCPISGLLFNIAVEPLLRKIAAEGMILNQQHKHPCLAYADDITIITKQQDNLQQLLYIATEQCSRMGQDLNPSKSSSLHLSERRPRGMRQTQFYFGETPIKWKSDGEATLFLGRPVGFHLLPNIQTVEELMQLGTKMLTSKLAPWQRIDAVKTFMFPAGVHAMRTWQLRKTDWAHLDNEMKTMLKHTLHLPSRASNEYLYGSSKAGACGVPLAAEDSDIFLVDTAYKLLTSPDPDVREIAREECRRVATMRTRQEPSMTDACMYLTQGEMQTRAGDHQTIWSRARCASGRMGVSWIAEGGDNIKIKCTDSIIEEKDRRKVAKTIRSQRRQMRDEVLQNKPDQGKVMKLIAQERASSAFVRNGAYTTFADWRFIHRARLNLLPVNGAKRGQNRDRRCRRCNREETLPHVVNHCMIHSRAMQKRHNALVDRVRKAAEGRHWKIMSANERVPGAADNGRPDLVIEKNREVILIDVTCPFENGQEAFKEARLRKEEKYAELAAEMRRQYQQVKVAAFIVGPLGAYDPENEKLMKRLASKGYLRLFRKLCVSDAIRWSRMIYIEHTSGARQYVG

SEQ ID NO: 22984 - protein, 910 aa, Homarus americanus
MKSEMKLRGHGYWTRFWAHCMRSSGTRTGQDFEEVLIEIEVAIQAANRINISQGQNTTRKITDVNDCKQIQRLYKYNRRRAIRLIVEGNGARCEISKERIEEHFQHMMVEKECDLNTVEHIPEPPDDRPEMEMQPFTEKEVFTKLAAAENSSPGEDRISYDNWRKADPSCRVMAAIFNVCLRAKRIPDSWKRYRTILVPKKGGNPEVVSNWRPITLSRTIYKVYTGCLTARLRRWLVDNEVLCAAQKGFMPSDGVIEHNYILQHHMDDARRNNGDTCIAALDLTNAFGSVSLDLIKRALNRIGVGRDFETVAGDIISGKTTRILTKEGETEEIPVQCGVQQGCPISGLLFNIAVEPLLRKIAAEGMILNQQHKHPCLAYADDITIITKQQDNLQQLLYIATEQCSMMGLDLNPSKSSSLHLSGRRPRGMRQTQFYVGETPIQWKSDGEATPFLGRPVGFHLLPNIQTVEELMQLGTKILTSKLAPWQRIDAVKTFMFPAGVHAMRTWQLRKTDWARLDNEMKTMLKHTLHLPSRASNEYLYGSSKAGACGVPLAAEDSDIFLVDTAYKLLTSPDPDVREIAREECRRVATMTTRQEPSMTDACMYLTQGEMQTRGGDHQTIWSRARCASGRMGVSWIAEGGDNIKIKCTDSIIEEKDRRKVAKTIRSQRRQMRDEVLQNKPDQGKVMKLVAQERASSAFVRNGAYTTFADWRFIHRARLNLLPVNGAKRGQNRDRRCRRCNREETLPHVVNHCMIHSRAMQKRHNALVDRVRKAAEGRHWKVMSANERVPGAADNGRPDLVIEKNREVILIDVTCPFENGQEAFKEARLRKEEKYAELAAEMRRQYQQVKVAAFIVGPLGAYDPENEKLMKRLASKGYLRLFRKLCVSDAIRWSRMIYIEHTSGARQYVG

SEQ ID NO: 22985 - protein, 1251 aa, Homarus americanus
MDDEGPRGRNEGDRQPERRNRMLTIWFPAPPSFKCTERTQGCPWECASSGWSGCKQSLVRHLKEAHNKKINEYMNMCAGCYLVLTIRPSNHTCILNRQMREEQRDPHFRFQCDVQYCPYSAPTKRGLNNHKVATHVRQWRRRDNQRQAEQRQGNQQAEGNPASAQPSQEAGENRDNEQREQPQNYEQQQQRETQGQRERHRWTPPPRDGEVEGPETPRPVSGRSTPVSPLSPDDQETRLRSITPSQLLQNEPSPREESQHPGDLTPLLHMPRMPLSPLSPDEQHGGDSTRTGEQIMQSQETNEGSQSNLSESLTPLSQSEATQTLSGEGNIQEQIGITPEPNEERDEAEETWILEPFLGTVYEIQRNPDWARFEEVLIEIEVAIQAANRINISQGQNATRKITDVNDCKQIQRLYKYNRRRAIPLIADGNGARCEISKERIEEHFQHMMVEKECDLNTVEHIPEPPDDRPEMEMQPFTEKEVFIKLAAAENSSPGEDRISYENWRKADPSCRVMAAIFNVCLRAKRIPDSWKRYRTILVPKKGGNPEAVSKWRPITLSRTIYKVYTGCLTARLRRWLVDNEVLCAAQKGFMPSDGVIEHNYILQHHMDDARRNNGDTCIAALDLTNEFGSVSLDLIKRALNRIGVGRDFETVPGDIISGKTTRILTKEGETEEIPVQCGVQQGCPISGLLFNIAVEPLLRKIATEGIILNQQHKHPCLAYADDITIITKQQDNLQQLLYIATEQCSRMGLDLNPSKSSSLHLSGRRPRGMRQTQFYVGETPIQWKSDGEATLFLGRPVGFHLLPNIQTVEELMQLGTKMLTSKLAPWQRIDAVKTFMFPAGVHAMRTWQLRKTDWAHLDNEMKTMLKHTLHLPSRASNEYLYGSSKAGACGVPLAAEDSDIFLVDTAYKLLTSPDPDVREIAREECRRVATMRTRQEPSMTDACMYLTQGEMQTRGGDHQTIWSRARCASGRMGVSWIAEGGDNIKIKCTDSIIEEKDRRKVAKTIRSRRRQMRDEVLQNKPDQGKVMKLVAQERASSAFVRNGAYTTFADWRFIHRARLNLLSVNGAKRGQNRDRRCRRCNREETLPHVVNHCMIHSRAMQKRHNALVDRVRKAAEGRHWKIMSANERVPGAADNGRPDLVIEKNREVILIDVTCQFENGQEAFKEARLRKEEKYAELAAEMRRQYQQVKVAAFIVGPLGAYDPENEKLMKRLASEGYLRLFRKLCVSDAIRWSRMIYIEHTSGARQYVG

SEQ ID NO: 22986 - protein, 1251 aa, Homarus americanus
MDDEEPRGRNEGDRQPERRNRMLTIWFPAPPSFKCTERTQGCPWECASSGWSGCKQSLVRHLKEAHNKKINEYMNMCAGCYLVLTIRPSNHTCILNRQMREEQRVPHFRFQCDVQYCHYSAPTKRGLNNHKVATHVRQWRRRDNQRQAEQRQGNQQAEGNPASAQPSQEVGENRDNEQREQPQNYEQQQQRETQGQRERHRGTPPPRDGEVEGPETPRPVSGRSTPVSPLSPDDQETRLRSITPSQLLQNEPSPREESQHPGDLTPLLHMPRMPLSPLSPDEEHGGDSTRTGEQIMQSQETNEGSQSNLSESPTPLSQSEATQTLSGEGNIQEQIGITPEPNEERDEAEETWILEPFLGTVYEIQRNPDWARFEEVLIEIEVAIQAANRINISQGQNTTRKITDPNDCKQIQRLYKYNRRRAIRLIAEGNGARCEISKERIEEHFQHMMVEKDCDLNTVEHIPEPPHDRPEMEMQPFTEKEVFTKLAAAENSSPGEDRISYENWRKADPSCRVMAAIFNVCLRAKRIPVSWKRYRTILVPKKGGNPEVVSNWRPITLSRTIYKVYTGCLTARLRRWLVDNEVRCAAQKGFMPSDGVIEHNYILQHHMDDARRNNGDTCIAALDLTNAFGSVSLDLIKRALNRIGVGRDFETVAGDIISGKTTRILTKEGETEEIPVQCGVQQGCPISGLLFNIAVEPLLRKIAAEGMILDQQHKHPCLAYADDITIITKQQDNLQQLLYIATEQCSMMGLDLNPSKGSSLHLSGRRPRGMRQTQFYVGETPIQWKSDGEATLFLGRPVGFHLLPNIQTVEELMQLGTKILTSKLAPWQRIDAVKTFMFPAGVHAMRTWQLRKTDWAHLDNEMKTMLKHTLHLPSRASNEYLYGSSKAGACGVPLAAEDSDIFLVDTAYKLLTSPDPDVREIAREECRRVATMTTRQEPSMTDACMYLTQGEMQTRGGDHQTIWSRARCASGRMGVSWIAEGGDNIKIKCTDSIIEEKDRRKVAKTIRSQRRQMRDEVLQNKPDQGKVMKLVAQERASSAFVRNGAYTTFADWRFIHRARLNLLPVNGAKRGQNRDRRCRRCNREETLPHVVNHCMIHSRAMQKRHNALVDRVRKAAEGRHWKVMSANERVPGAADNGRPDLVIEKNREVILIDVTCPFENGQEAFKEARLRKEEKYAELAAEMRRQYQQVKVAAFIVGPLGAYDPENEKLMKRLASKGYLRLFRKLCVSDAIRWSRMIYIEHTSGARQYVG

SEQ ID NO: 22987 - protein, 1251 aa, Homarus americanus
MDDEEPRGRNEGDRQPERRNRMLTIWFPAPPSFKCTERTQGCPWECASSGWSGCKQSLVRHLKEAHNKKINEYMNMCAGCYLVLTIRPSNHTCILNRQMREEQRVPHFRFQCDVQYCHYSAPTKRGLNNHKVATHVRQWRRRDNQRQAEQRQGNQQAEGNPASAHPSQEVGENRDNEQREQPQNYEQQQQRETQGQRERHRWTPPPRDGEVEGPETPRPVSGRRTPVSPRSPDDQETRLRSITPSQLLQNEPSPREESQHPGDLTPLLHMPRMPLSPLSPDEEHGGDSTRTGEQIMQSQETNEGRQSNLSESPTPLSQSEATQTLSGEGNIQEQIGITPEPNEERDEAEETWILEPFLGTVYEIQRNPDWARFEEVLIEIEVAIQAANRINISQGQNTTRKITDANDCKQIQRLYKYNRRRAIRLIAEGNGARCEISKERIEEHFQHMMVEKDCDLNTVEHIPEPPHDRPEMEMQPFTEKEVFTKLAAAENSSPGEDRISYENWRKADPSCRVMAAIFNVCLRAKRIPVSWKRYRTILVPKKGGNPEVVSNWRPITLSRTIYKVHTGCITARLRRLLVDNEVLCAAQKGFMPSDGVIEHNYILQHHMDDARRNNGDTCIAALDLTNAFGSVSLDLIKRALNRIGVGRDFETVAGDIISGKTTRILTKEGETEEIPVQCGVQQGCPISGLLFNIAVEPLLRKIAAEGMILDQQHKHPCLAYADDITIITKQQDNLQQLLYIATEQCSMMGLDLNPSKSSSLHLSGRRPRGMRQTQFYVGETPIQWKSDGEATLFLGRPVGFHLLPNIQTVEELMQLGTKILTSKLAPWQRIDAVKTFMFPAGVHAMRTWQLRKTDWARLDNEMKTMLKHTLHLPSRASNEYLYGSSKAGACGVPLAAEDSDIFLVDTAYKLLTSPDPDVREIAREECRRVATMTTRQEPSMTDACMYLTQGEMQTRGGDHQTIWSRARCASGRMGVSWIAEGGDNIKIKCTDSIIEEKDRRKVAKTIRSQRRQMRDEVLQNKPDQGKVMKLVAQERASSAFVRNGAYTTFADWRFIHRARLNLLPVNGAKRGQNRDRRCRRCNREETLPHVVNHCMIHSRAMQKRHNALVDRVRKAAEGRHWKVMSANERVPGAPDNGRPDLVIEKNREVILIDVTCPFENGQEAFKEARLRKEEKYAELAAEMRRQYQQVKVAAFIVGPLGAYDPENEKLMRRLASKGYLRLFRKLCVSDAIRWSRMIYIEHTSGARQYVG

SEQ ID NO: 22988 - protein, 1251 aa, Homarus americanus
MDDEEPRGRNEGDRQPERRNRMLTIWFPAPPSFKCTERTQGCPWECASSGWSGCKQSLVRHLKEAHNKKINEYMNMCAGCYLVLTIRPSNHTCILNRQMREEQRVPHFRFQGDVQYCHYSAPTKRGLNNHKVATHVRQWRRRDNQRQAEQRQGNQQAEGNPASAQPSQEVGENRDNEQREQPQNYEQQQQRETQGQRERHRWTPPPRDGEVEGPETPRPVSGRSTPVSPLSPDDQETRLRSITPSQLLQNEPSPREESQHPGDLTPLLPMPRMPLSPLSPDEEHGGDSTRTGEQIMQSQETNEGSQSNLSESPTPLSQSEATQTLSGEGNIQEQIGITPEPNEERDEAEETWILEPFLGTVYEIQRNPDWARFEEVLIEIEVAIQAANRINISQGQNTTRKITDANDCKQIQRLYKYNRRRAIRLIAEGNGARCEISKERIEEHFQHMMVEKDCDLNTVEHIPEPPHDRPEMEMQPFTEKEVFTKLAATENSSPGEDRISYENWRKADPSCRVMAAIFNVCLRAKRIPVSWKRYRTILVPKKGGNPEVVSNWRPITLSRTIYKVYTGCLTARLRRWLVDNEVLCAAQKGFMPSDGVIEHNYILQHHMDDARRNNGDTCIAALDLTNAFGSVSLDLIKRALNRIGVGRDFETVAGDIISGKTTRILTKEGETEEIPVQCGVQQGCPISGLLFNIAVEPLLRKIAAEGMILDQQHKHPCLAYADDITIITKQQDNLQQLLYIATEQCSMMGLDLNPSKSSSLHLSGRRPRGMRQTQFYVGETPIQWKSDGEATLFLGRPVGFHLLPNIQTVEELIQLGTKILTSKLAPWQRIDAVKTFMFPAGVHAMRTWQLRKTDWAHLDNEMKTMLKHTLHLPSRASNEYLYGSSKAGACGVPLAAEDSDIFLVDTAYKLLTSPDPDVREIAREECRRVATMTTRQEPSMTDACMYLTQGEMQTRGGDHQTIWSRARCASGRMGVSWIAEGGDNIKIKCTDSIIEEKDRRKVAKTIRSQRRQMRDEVLQNKPDQGKVMKLVAQERASSAFVRNGAYTTFADWRFIHRARLNLLPVNGAKRGQNRDRRCRRCNREETLPHVVNHCMIHSRAMQKRHNALVDRVRKAAEGRHWKIMSANERVPGAADNGRPDLVIEKNREVILIDVTCPFENGQEAFKEARLRKEEKYAELAAEMRRQYQQVKVAAFMVGPLGAYDPENEKLTKRLASKGYLRLFRKLCVSDAIRWSRMIYIEHTSGARQYAG

SEQ ID NO: 22989 - protein, 1227 aa, Homarus americanus
MDDEEPRGRNEGDRQPERRNRMLTIWFPAPPSFKCTERTQGCPWECASSGWSGCKQSLVRHLKEAHNKKINEYMNMCAGCYLVLTIRPSNHTCILNRQMREEQRVPHFRFQCDVQYCHYSAPTKRGLNNHKVATHVRQWRRRDNQRQAEQRQGNQQAEGNPASAQPSQEVGENRDNEQREQPQNYEQQQQRETQGQRERHRGTPPPRDGEVEGPETPRPVSGRSTPVSPLSPDDQETRLRLITPSQLLQNEPSPREESQHPGDLTPLLHMPRMPLSPLSPDEEHGGDSTRTGEQIMQSQETNEGRQSNLSESPTPLSQSEATQTLSGEGNIQEQIGITPEPNEERDEAEETWILEPFLGTVYEIQRNPDWARFEEVLIEIEVAIQAANRINISQGQNTTRKITDANDCKQIQRLYKYNRRRAIRLIAEGNGARCEISKERIEEHFQHMMVEKDCDLNTVEHIPEPPHDRPEMEMQPFTEKEVFTKLAAAENSSPGEDRISYDNWRKADPRCRVMAAIFNVCLRAKRIPVSWKRYRTILVPKKGGNPEVVSNWRPITLSRTLYKVYTGCLTARLRRWLVDNEVLCAAQKGFMPSDGVIEHNYILQHHMDDARRNNGDTCIAALDLTNAFGSVSLDLIKRALNRIGVGRDFETVAGDIISGKTTRILTKEGETEEIPVQCGVQQGCPISGLLFNIAVEPLLRKIAAEGMILDQQHKHPCLAYADDITIITKQQDNLQQLLYIATEQCSMMGLDLNPSKSSSLHLSGRRPRGMRQTQFYVGETPIQWKSDGEATLFLGRPVGFHLLPNIQTVEELMQLGTKILTSKLAPWQRIDAVKTFMFPAGVHAMRTWQLRKTDWAHLDNEMKTMLKHTLHLPSRASNEYLYGSSKAGACGVPLAAEDSDIFLVDTAYKLLTSPDPNVREIAREECRRVATMTTRQEPSMTDACMYLTQGEMQTRGGDHQTIWSRARCASGRMGVSWIAEGGDNIKIKCTDSIIEEKDRRKVAKTIRSQRRQMRDEVLQNKPDQGKVMKLVAQERASSAFVRNGAYTTFADWRFIHRARLNLLPVNGAKRGQNRDRRCRRCNREETLPHVVNHCMIHSRAMQKRHNALVDRVRKAAEGRHWKVMSANERVPGAADNGRPDLVIEKNREVILIDVTCPFENGQEAFKEARLRKEEKYAELAAEMRRQYQQVKVAAFIVGPLGAYDPENEKLMKRLASRDTCASSGNCV

SEQ ID NO: 22990 - protein, 926 aa, Homarus americanus
MPRMPLSPLSPDEQHGGDSTQTGEQIMQSQETNEGSQSNLSESPTPLSQSEATQTLSGEGNIQEQTGITPEPNEERDEAEETWILEPFLGTVYEIQRNPDWERFEEVLIEIEVAIQAANRINISQGQNTTRKITDANDCKQIQRLYKYNRRRAIRLIADGNGARCEISKERIEEHFQHMMVEKDCDLNTVEHIPEPPDDRPEMEMQPFTEKEVFTKLAAAENSSPGEDRISYENWRKADPSCRVMAAIFNVCLRAKRIPVSWKRYRTILVPKKGGNPEVVSNWRPITLSRTLYKVYTGCLTARLRRWLVDNEVLCAAQKGFMPSDGVIEHNYILQHHMDDARRNNGDTCIAALDLTNAFGSVSLDLIKRALNRIGVGRDFETVAGDIISGKTTRILTKEGETEEIPVQCGVQQGCPISGLLFNIAVEPLLRKIAAEGMILNQQHKHPCLAYADDITIITKQQDNLQQLLYIATEQCSRMGLDLNPSKSSSLHLSGRRPRGMRQTQFYVGETPIQWKSDGEATLFLGRPVGFHLLPNIQTVEELMQLGTKILTSKLAPWQRIDAVKTFMFPAGVHAMRTWQLRKTDWAHLDNEMKTMLKHTLHLPSRASNEYLYGSSKAGACGVPLAAEDSDIFLVDTAYKLLTSPDPDVREIAREECRRVATMRTRQEPSMTDACMYLTQGEMQTRGGDHQAICSRARCASGRMGVSWIAEGGDNIKIKCTDSIIEEKDRRKVAKTIRSQRRQMRDEVLQNKPDQGKVMKLVAQERASSAFVRNGAYTTFANWRFIHRARLNLLPVNGAKRGQNRDRRCRRCNREETLPHVVNQCMIHSRAMQKRHNALVDRVRKAAEGRHWKIMSANERVPGAADNGRPDLVIEKNREVILIDVTCPFENGQEAFKEARLRKEEKYAELAAEMRRQYQQVKVAAS

SEQ ID NO: 22991 - protein, 1119 aa, Clytia hemisphaerica
MKRMKNTWDLLHPELSHFNEKYLRQQALYITQRGYIRETQTVANNNGNIANEINNEEIIAENDFNVDPHLAVNDVPQEVDDQINNSIHQADEQHVININNNEVYQKLRESFTANYQLFNSIENERIIPTFIRRKPAKERINIVNDIANEFLTNIKENRGATFEDINCLIYTSAITLKGDTNNQTKAHTEPKWLTSLQNKIDSIRRNIAHIELILKCKETNTFTKKQQKISNRLRKKYGNIKKGNLVYRQKSLKNELKAISTKLKYQRKVSERKRINKLFSHNPKSVYRSFKESASDVKDPPTKTEIENFWKGIWETEGNFNSDAEWLHTLENEYCTDIQNNTNCDITRETMRKSISKLQDSKSPGNDLIIGYWYKHLTFFDNELSQLFNNALNGNIQVPDWMTKAKTTLLSKNKETKQPKNYRPIALQNIMLKLYTSCINQFVQHHCESNNIVTTEQAGGKKDVWGCLEQLLINKTVMNETKHYRRSLVTMWLDYQKAFDSVPHQWLIKALQLAKVPPVIISALEHLITKWSTNVHLRTTETTIVSDEIKYNRGIFQGDSLSVILFILCLNPLSFLLNKLVGYKMGPNGNRTQNITNLFFVDDLKLFATNLTQMKTLLDIVTEFSNDIDMKFGLTKCAYLRIDKGKIATSKEPIVMNNVSIDPVKEGDSYKYLGQDENLGYVGPINKERVVKEYLKRVRKVWESELSGYHKHIAHNAYAVPVIVPTFGLLDWTKAEIEQIDIKTRKTLCMIGSFHRNSDVDRLYVQRKKGGRGLKSIQIAYETKIISIRQHITQNVKQNKYIECARAHEEDKIVRVARELLQQAGIDDDENVSPRTISQRYLQKVLKTKFEKFESKILHGYVQRKVSADQNVDHSASKEWLTNKYTSSHFEAYACAIQEGEIGTKDLIYRRDRKNNVPVKHDNKCRLCKSQVEDITHVISSCPKMSSRYYLPMRHDIVAKFVYEKIRHEHDKEYNVRYDADEFITTGGDREYWWNVSVKTPANVRHNKPDLIMWNKATKSCHIIEFSCPNDMNVSKKVKEKEDHYGPLIRAMNIMYPDYKFVFVPIIVGALGTVPKELLMNIKLLGFSENESKQMIRFMQQKSIIGTVKITKTFLNFKI

SEQ ID NO: 22992 - protein, 1082 aa, Phalangium opilio
MSNFLYPLEGFATCPRCPKNFVAHTAWKNHLESHGVLPSDISYICRKCSKSFASIFGVSSHATTCNTIPLPSTSIAENPSRPSYACDWCNFTCDTLRGLGVHKHSRHPVEYAAFNQRSGQYRYWHADETRHLAQLEAALPANTTNINTRLAELFQERPATAIKAKRRDRAYKDLVSSLRTSSFTDDTAPVSLTSDYATSTPGTIRACPLSGSIVPTAENEEHAPVPGQNILPDMEFEFREYFQVYMDTGTNPADLRALADQILIHNSDVLLDFGQLLADRFPKPNKHQRPRQPTVNRRTAKRRQYAQHQTLYKYNRRKLSKLILDPYATEDAVPTPDDITSTFGSLFSSISPPDDKPYRVKPKNMPTYFPVSVMEVTHALERQGSTSAGPDYLTLKDLRSFRVEDLTFIFNAFLYIKDLPLTLKTCRTVLIPKDGDLRNATNWRPITILSILIRVFHGILASRLNSALRLNSAQQAFVAADGTMANTLLLDFAINEAKKRRRPLSLVSVDLAKAFDTIGHHSLHRALSRLSVEPEMIKYILNTYQYATTSISCGPSQCGPFSLTRGVKQGDPLSPILFNAVMDELLDSLPPEVGVKVNDVRVNVLAFADDIYFLAESEYGMRLLLASASGFFDSRNLKINVSKCHSLVFRKRGKTSQLTVPVEPVFQLCDENVRSITAGECFKYLGVYFSQNGKIPPVVEKMNIYLERLRTSCLKPNQKLVMLKLFVLSRFTHLLTLSTLSKRLLTKLDTVVRAFCRKLLRLPHYTPVGFFYTSNKDGGLGLVNFSQSMPLNFLNRIAALADNRSPCIRTLVNTPYCDRLVKTCKSLLGPDIVSKSDLKNSFLKSFSESVYGIGLNQGNCSISNHWLSNRAVAPDPRLYIKKFKLRLNLLSCKGMPSNRGDRMCRAGCNRVESLSHISQQCTLVSDKRIDRHNKVLSFLERSISLPEYIKLREPVFSTNAMDGTQAIFKPDLVLISDTLIVVVDVGICWETPRSIELAYELKARTYDTPAFRNHLSRLYPNRIFEFHALMISGRGIFATGNSCFCELMGLGKGFQIKVVDIVMEKSIYLYQEFMKRAFTRNV

SEQ ID NO: 22993 - protein, 1067 aa, Ampulex compressa
MNLRNIRSRDHDRREPRTAGPTTSPSQHAEARVDAHSAHDVSSDTPVPSFECPNCQRTFTTKIGLGVHRRHAHPEEVNREVIVDRVKRHWSDEELRLMAREEASAVKLNIRFINQHLVGIVPGRTLEAIKGARKGLRYRELVLDFLRQDEDSSSSSSESFTSATSDTNHLLDINTPLSYQPRRSPSDGHSAGQNNQDYLSECRAVIEDLIPSVSSIRGWNSAGLIQIAYKLQNGDDVFEAVDEWITGVFPTPQPTQRRHPQIRFVNPSRKLKRRLEYSQTQFLFRRNMSRAARCILDGETNNVASPDAESMARHWGPFVSQASSPVPLVAPAETRQDLAILWSSISCNEIRSCSLPISSAPGVDGITPRLWRAVPCKIKALLFNIILVAGGFPGSMLASRTVFIPKKGDCRAPENYRPISIMSVVVRHLHKILAHRLRSAGITDLRQRCFDDGCSDNVAVLATTIMEARTKFKELHVASLDVAKAYDSVSHGAIQAALCRAGVPEGFRSYIDRLYKNSCTTFEVRGERSTFYRLGRGVRQGDPLSSILFSLVIDAVINVVPAAVGFPIGNEHVNTLAYADDILLFAATEWGMQTSLGLVEKKAREQGLLLHPDKCSVLSIVPAGKHKKVKIIDTPTFTMEDGTFLPQLKTTAEWRYLGVDFQASGLKKTKKDLGNLLENVTRAPLKPQQRLKILRSFLLPRIYHGLILGRTTLRILRTLDIQVRAAVRKWLRLPGDVAVGFFHASIRDGGLGIPPLITSIPGLMYQRLQRLETSTSPAVRAAYAHAWTIRRLRWAERVLSPNGVPLASAYLRRKWWAERLHRSVDGKELEECKSARESSWWVDGGSLGIPGRDYVQYVHVRINCLPTLVRTTRGVRRTTHPTLCRAGCSVMETAAHIIQQCHRTHGGRVRRHNAVCRTLAGGLRTSGWSIEEEPVFLTRCGKRKPDLVCSRGGEVCVVDAQVVSGATSLEAAHMRKRDYYATNPDITATLMARPGTTSVRYTTCTLSWRGIWASKSVSELLRMGLSSGLLKGITTRTLQGSHTNWSRWNKTTTIIDMGPSSVRQGVG

SEQ ID NO: 22994 - protein, 823 aa, Listronotus oregonensis
MDEVLDLVWKPRTERRVRQPAEGAPPQANMNTRAQRSYKYKRYQELFTKDKASLANLITKGLEPGTVGTHPDEATIRAHYEEIFSAASLPDDHAITDEKPATAGLYAPFSMEAIRKAICDPRASNAAGPDGMTTSDLKQLPTRSVAILFNAMLLTGITPQRLKSCRTTLIPKGGEDPALVTSLRPITVANIMVRTLHRLLSGRLSALPLNTAQRGFINLDGTLANTMILQTAVKSCRDSSRPYSIASLDLKKAFDTVPHTSIKRALERFSLDKRLVKFIMNGLTGCQTTISAGSSQVPGIAINRGVKQGDPLSPLLFNLVLDELLCRLELLPTGLEVNGATINSLAYADDLLLLAPSSRDLQILVRHTSKFFEARHMELNPRKCSCLIIKLLPKQKKLYLSLNARVFIGATALPPVDADSSFKYLGHKYGFMGTDLPSTEALQSALNNLLRAPLKPHQKLVLLKDYILPKFLYAYQNPRVTAKLLETADKAIRRSIKTFLHLPIQTPNSLLYAQLKSGGLGIFCFRARIPDIILGRLDRLRRTADEKLAAYLNSEYVLQLQTRLAGLTRPFGRGNAQASFWRLKINSSVSGAGLADHSGHAGTHQWIRDPPPSWNGKDYVQAMQLRTNTLPTIGGLHNVRLPQEARSCRAGCERVETLSHILQRCPVTHFERIRRHDHAVNVFAKSCRNKGLDVQVEPSVRDTNGRLHKPDLIIRGNGHTNIVDLCVCWETPRPLQDHADNKVATYSSPEFLSTIRTLYPDEPIHVSGLAIGARGTWCPSNDQLLARLDLPRGLVSCLVTGVLRGGSSIHRSFSINVWDRRNH

SEQ ID NO: 22995 - protein, 954 aa, Paramacrobiotus metropolitanus
MARDQPCPHCKKCFTQGAGLAAHTKACSRKLATGSSSTQPPLTPPGGTQKHPLHSFLEGERYHIPKRVPKAVRHQCAQVLTDLIRNCVRKNSSATWTALRLFAPTALSLPPTKTLRRESLTSVIRKNLADLSLANRHSLPRREQARNNISAQDNLRASVNSMFQDANIKGAIRILLEDDKLAEINAETAQVLRDKHPPAPDDCQFPPTPDDSFLPPPVSPAEVMNAVFSFPTGSAAGIFGLRPQHLKDLLNRKDDQQSDLCLALTDLTNMILSTDIPNDIRPYFFGANLIPLGKKDGGVRPIAVGDTLRRLTSKIVSSRCAEEAAAMFSPVQLDVGVRGGAEAAAHAVRSYVETTHADARVIVKLDFRNAFNTLRRDVLLTAVREKFPAYFRYFWQSYRHASHLSCGKFLLSSETGVQQGDPAGPFGYGLATLPLFEGLQCDIAVGYLDDVTLAGFVEKVIAAIRLIIARGLRMGLELNLSKCEVFSVGQFTADRLNAVQMVLTAFPEMAVSKEEESTLLGAPLTTAACETFLRSKSVQLQYFISRLKLIPAHYSLYLLRNCLLIPKLLYGFRTSRCYEHVALIASLDDIVRAGLQSILNVRLNDAQWTQMSFPIRDGGMGLRSTTSVVFPAFLASAYSVTSLVSMIYRPATETLLDPIVLRWSEETNCEPPAMDQRKFQSAWDRPLIDQAVLLMKQTTTDEANRAVLLAALHRDSGAWLNALPAPNLRTFLRDEEVRIGIALRFGLPVVEEHDCVNCGSHVETNGHHGLSCSSSRGRWSRHVELNDVTKRALEHAGYPCQSEPLGLSGINNTRPDGMTLVPVRDGKALVWDATCWDTVALSHVRASASASGSVALLAEDRKRRKYAFVEEMGYLLYPLAVETFGTFGPAFAELIRFVGRKIRDVTGEPRSTAFLKQRFSLAVVKGNAAAVLGTLSMRSKMTDSANDFGCFFNV

SEQ ID NO: 22996 - protein, 954 aa, Paramacrobiotus metropolitanus
MVRDQPCPHCRVCFTQGAGLAAHTRACSRKHTSGSSFAQLPPPPPGQPLKHPLQSFVEGDRFHIPKRVPKAVRRQCARVLTELIRKCIRTNSSESWIDLLLFAPTALSLPPTKSLRRESLAAHIRKNLADLTIAKRHAVPRRDQPKHDELPPDRLRAQVTSMLQDGNVKGAIRILLGDDKLAEINPRTIESLRDKHPPAPDDCQFPADPDDSITPPAVTPAELMAAVFSFPSGSAGGVFGLRPQHLKDLLIRKDDTQSELCLALTDLATMVFRKNLPEDVRPYFFGANLIPLLKKDGGIRPIAVGETLRRLFSKIISRRCSDEAAAMFSPVQLGFGIRGGAEAAVHAVRSYIETTHTEARVVVKLDFRNAFNTLRRDTLLTAVHANFPACYRYIWQSYRYPSYLSCGPSQLSSETGVQQGDPYGPLGYGLGTLPLFENLDCDIAVGFLDDVTLAGQADKVIAAIRAIIARGFKLGLELNLGKCEIYSIGSFTADRLHAIQKVLDVFPGMVVAKEEDLVLLGAPLTSAACEVFLSNKTEQLDHFLRRLKNVPAHFGLYLLKNCLFIPKLLYGLRTARCYEHMPLMEAMDDTIRTGLSSLLNVRVSDMQWSQMTLPVRDGGLGIRTTKSLVFPAFLASAYSVVGLVSSVYPSTNEAHLAPVVQQWTMLTRSEPPTDGARKFQAAWDRPAIDHVVSTLRLAATNETAKAVLLAALNRDSGAWLNALPAPSLHTFLRDDEVRIGVALRFGLPVVEEHMCVNCASHVEANGHHGLSCGSSKGRWSRHLELNNETKRSWETAGFPCQMEPSGLSDKTNQRPDGMTLIPVRDGKAVVWDATCWDTVAMSHVKASSKKSGSVAQLAEDFKRRKYGFVEDMGYMFYPLAIETFGTFGPAFAEMIRFVGRKIRDLTGESRSTAFLRQRFSLAVIRGNAAAVLGTLNGRPKAGSDSNDFGCFFNV

SEQ ID NO: 22997 - protein, 954 aa, Paramacrobiotus metropolitanus
MVRDQPCPHCRVCFTQGAGFAAHTKACSRKHAAGSSSALLPPPPPGQPRKHPLQSFVEGDRYHIPKRVPKAVRRQCARVLTELIRKCTRDNSSESWIDLLLFAPTALSLPPTKSLRRESLAAHIRKNLADLSLAKRQPVPRRDLPKHDELPPDRLRAQVTSMLQDGNIKGAIRVVLGDDKLAEINTRTIELLRDKHPPSPDDCQFPADPDDSITPPAVTPVAMMAAVFSFPSGSAGGVFGLRPQHLKDLLVRKDDTQSELCLALTDLATMVLRKNIPEDVRPYFFGANLIPLLKKDGGIRPIAVGETLRRLISKIVSSRCADEAAAMFNPVQLGFGIRGGAEAAVHAVRTYVETTHTEARVVVKLDFCNAFNTLRRDVLLTTALARFPAYYRYIWQSYRYPSHLSCGSSQLSSETGVQQGDPYGPLGYGLGSLPLFENLDCDIAVGFLDDVTLAGQADKVIAAIRTIIARGFKMGLELNLGKCEIYGVGSFTADRLHAIRKVLDTFPGMVVAKEEDLVLLGAPLTSAACEIFLQSKTVQLDHFMRRLKHIPAHFSLYLLKNCLFIPKLLYGFRTARCYEQVPLMETMDKCIRAGLSSILNIRVNDMQWSQMTLPVRDGGLGLRATKSLVLPAFLASAYSVVSLVSSIYPSTNEAHLAPVVQQWATQTRSELPTDNARKFQTAWDRPAIDHVVSTLRLAATTEADKAVLLAALNRDSGAWLNALPAPSLHTFLRDDEVRIGVALRFGLHVVEEHNCVNCASHVETNGHHGLSCSSSKGRWSRHLELNNETKRVWETAGFPCQMEPSGLSDKTNQRPDGMTLIPVRDGKAVVWDATCWDTVAMSHVKASSKKSGSVAQLAEDFKRRKYGFVEDMGYMFYPLTIETFGTFGPAFAEMIRFVGRKIRDLTGESRSTAFLRQRFSLAVVRGNAAAVLGTLNARSKVGNDSNDFGCFFNV

SEQ ID NO: 22998 - protein, 975 aa, Euthynnus affinis
MSPTMPPKSRRQKEIECLVKERRELRKQWKRALPEERAGIDLLQTDLKRRLGRLRRAENLRIRRKRKERARTSFYKDPFRFVKGLFTKEKSGSLKVPKRELEDHLKTTHTDSQRFEQREIPSDMPPIPLPEHQLDDSPPRWSEVEEVVRKARAASAPGPNGVPYRLYKNSPNILRFLWRQMKVMWTKQTIPKAWRRAGGVVIPKEKDASNIDQFRQINLLNVEGKVFFSIVAKRMTKYLKQNNLIDTSVQKAGIPGFSGCLEHTSMIWHQIQSAKREGRDLHVLFLDLANAFGSIPHSLIWTAFNFFHIPNTITNLVKNYFQDLQFCVKTTDYTTSWQSLEVGIMAGCTISPLAFTMAMEVIIRASKWVVGGERLKCGQRLPPICAYMDDMTTLTSTVACTKHLLGKLHANITWARMKFKPSKSRSISIVKGKLTDQRFHINNAPIPLVSELPVKSLGRLYNARLKDSDQSDQLREETIKGLVSIDKTLLPGKLKLWCLQFGLLPRLMWPLTVYEIPMTKVEKLERTVSSYIKKWLGLPRCLSNIGLYGHGALELPISSLTEEFKCTKVRLNMTLTESQDELIQAAAPRLATGRKWILSEAIQQAKSALRHGDIVGQVQHGRGGFGPGTSRPTWHKATPTQRRKLVVALIRQQEEADRCATAVAQSKQGQWTTWENLEHRKLTWKDLWEMEGNQISFIIRATYDVLPTPKNLNQWFGEDPSCALCQTPATLSHILTGCKTSLSQGRYTWRHNQVLRQLAITLEERRTTNNALPPLMPGHPNTTVFIRAGQLPAKPSARMEASLLNSARDWRMQVDLDQKLRFPPEILTTSLRPDLVMWSSSQKIVLIVELTVPWEAAVGEAYERKHLKYADIAAEAEKRRWRARVLPVEVGCRGFVAMSTTRLLKGMGIRGQAFRRAVKSLSEAAERSSRWLWVKRKDPNWAAHLGVKAEGGTPGTPGVAVEPSGGVVGLSTKHQ

SEQ ID NO: 22999 - protein, 1111 aa, Hirundichthys speculiger
MNTTMNQIIGATQVSSAEGQEWQICSCGWSKVTSIRGLRIHQGRMKCLKTVRPGPRIDRYLLREGSSQASEAQRQDLTHSPLSISTPVSETNLSTTLKNLEPSHLQPALEKNIQGHRAHVKWPKSSSKKEWATIDADLIKILDGMKGTVEKKLEKMGDLIYSYGVERFGIKDTGRKKMTPITPPMSRRQKEIHRLVKERRVLRKQWKRASLEEKVGIDLLQTDLKGRLGSLRRAENLRIQRKRKERARTSFYKDPFRFMKGLFTKEKSGSLKVPKREFEEHLKATHTDSQRLEQREIPPDMPPLPRPKHQLDDSPPRWREVEEVVRKARAASAPGPNGILYRLYKNSPNVLRFLWRQMKVTWTKQNIPKAWRRAGGVVIPKEKEASNIDQFWQINLLNVEGKVFFSIVAKRMITYLKQNNLIDTSVQKAGIPGFSGCLEHTSMIWHQIQSAKREGRDLHVLFLDLANAFGSVPHSLIWTAFSFFHIPNTITNLVRNYFRDLQFCIKTTEYTTSWQPLEVGIMAGCTISPLAFTMAMEVIIRASKWVVGGERLDCGQRLPPIRAYMDYMTTLTSTIACTKNLLGKLHANISWARMKFKPSKSRSLSIIKGKLVGQRFHIEDTPIPLVSELPVKSLGRWYNASLKDSDQSDQLREEAIKGLVNIDKTLLPGKLKLWCLQFGLLPRLMWPLTVYEIPMTKVEKLERTVSSYIKKWLGLPHCLSNIGLYGHGALELPVSSLTEEFKCTKVRLNMTLTESQDDAIRAAAPRLMAGRKWIPSEAVQQAKSALRHEDIVGQVQHGRGGLGLVTSRPRWHKATSTQRRKLVTAQVRQQEEADRCATAVSQSKQGQWTNWENVEHRKLTWKDLWEMEGSQISFIIRATYDVLPTPMNLNQWLGEDPSCALCQTPATLRHILTGCKTSLSQGRYTWRHNQVLRQLAITLEVRRTTTNALPPPMPRHSNTTQFIRAGQLPAKESARPETTILDAARDWRMLVDLDKKLVFPPEIMTTNLRPDLVLWSTSQKSVLIVELTVPWEAAVGEAFERKQLKYADIAANAEKRGWRAQVLPVEGWVVEDLLLRPQPNSSKGWEFEDRRSAKPSSRCRRLQSEAAAGFG

SEQ ID NO: 23000 - protein, 1120 aa, Astyanax mexicanus
MNKTTNQKISSQVPSAEGLNLQVCSCGWSKVTSIRGLRIHQGRMKCLENVRPGPRIDQYLLRDRSSQASEAQRQDSTHSPMSINIPVAEYAASTTSKNFEPSHVQPALEKNIQGHRPQVKWPKSNSKKEWETIDADLIKILEGTSGIVEKQLEKMGDLIYCYGAERYGTKETGKKDRRSITPPMSRRQKEIQLLVRERRELRKRWKKESPEERVGIDFLQADLKERLGKLRRAENLRTRRRRKEKARTAFYSDPFRFVKGLFTKEKSGSLMVHKQELEDHLKTAYTDNQRLEQREIPSDMPPMPQPRYQLDDSPPRWGEVVEAVKKARAASAPGPNGVPYRLYKNSPNVLRLLWKQMKVMWTKQTIPKAWRRAGGVLIPKEKDASNIGQFRQINLLNVEGKVFFSIVAKRLTKYLKENNMIDTSVQKAGIPGFSGCLEHISMIWHQIQSARKEGRDLHVLFLDLANAFGSIPHSLIWAAFDFFHIPNTITNMVRNYFQDLQFCIQTTEYTTSWQSLEVGIMAGCTISPLAFTMAMEVIIRASKWVVGGERLQSGHRLPPIRAYMDDLTTLTSTVACTKQLLGKLQDNIDWARMRFKPSKSRSLSISKGKLVDQRFHIKETPIPLVSELPVKSLGRWYNASLKDSDQADQLRKETIKGLASIDKTLLPGRLKLWCLQFGLLPRLMWPLTVYEVPMTKVEKLERTVSSYIKKWLGLPRCLSNINLFGHGALDLPISSLTEEFKCTKVRLNMTLTDSQDERIQLAAPRLATGKKWTPSEAIEQAKSALRHGDIVGQVQHGRGGIGLGTSRPTWHKATPTEKRKLVVAEVRHQEEANRRTKAVSQAKQGQWTSWEGLGQRKISWRDLWEMEGSQISFIVRATYDVLPTPTNLRQWFGEDPSCVLCQTPATLKHILTGCKTSLAQGRYTWRHNQVLRQLAIFLEGRRTSTNALPPSVPGRISSTPFVKAGQLPVKPAAKMEPTLLDSARDWRMQVDLDQRLVFPPEIVTTSLRPDLVLWSTAQKSVFIVELTVPWEGAVGEAYERKRLKYSDLKADAEQRGWRAQVLPIEVGCRGFVATSTTKLLKVMGVRGQAFQQAAKAISGAAERSSNWIWMKRKDCNWAAR

SEQ ID NO: 23001 - protein, 826 aa, Gobiocypris rarus
MPPIPQPDHQFDDSPPKWTEINNIARKARAASAPGPNGVPYRLYKNTPGVLRFLWRLMKVTWKKQNIPKAWRRAGGVVIPKEKDATNIDQFRQINLLNVKGKIFFSIVAQRMNTYFKQNNLIDTSIQKAGVPGFSGCLEHTSMIWQQIQSAKREGRDLHVLFLDLANAFGSVPHSVIWAAFNFFHVPETITNLVRNYFKDLQFCITTAEYTTSWQSLEVGIMAGCTISPLAFTMAMEVIIRASRWVVGGERQQDGQRLPPIRAYMDDMTTLTSTITCTKRLLAKLHSNITWARMKLKPSKSRSISIIKGKLTDQRFNINETPIPLVSEQPVKSLGRWYNASLKDAEQCDQLREETIKGLVSIDKTSLPGKLKLWCLQFGLLPRLMWPLTVYEVPISKVDKLERTVSAYIKKWLGLPRCLSNIGLYGNGALELPTSSLTEEYKCTKVRLSMTLAESQDAVIRTAPPRLATGRKWTPAEAVEQAQFTLKHGDIVGQVQQGRGGLGLGTSRPTWHKATSAERRKLVVAEVRHQQEAERCAKAVAQAKQGQWTTWENLEHRKLTWRDMWEMEGSQISFLIRATYDVLPTPKNLNQWFGDDPACPLCQTPATLRHILTGCKTSLSQGRYTWRHNQVLRQLAVILEGRRSLINALPLTTSGHSSTISFVRAGQCPAKPTARLDSTLLDAARDWKMQVDLDQQLKFPPEILNTNLRPDLVLWSSSQKSLFIVELTVPWEAAVGEAYERKKLKYTDIALEAKQLGWHTQVLPVEVGCRGFVATSIARLLKGVGVRGQAFRKAIKSMSEAAERSSRWIWIKRKDPNWAAKNNKEG

SEQ ID NO: 23002 - protein, 1108 aa, Euthynnus affinis
MKCLKKMRPGPRIDHYLLRERSSKASEARWQELTHSPPNISTPEAESNSSAASENLEPSHLQPALEKNMQGHRPHVKWPKSSSKKEWATIEADLVKILDGLKGTAEKKLEKMGDLIYAYGAEGFGTKETGKKAMSPTMPPKSRRQKEIECLVKERRELRKQWKRALPEERAGIDLLQTDLKRRLGRLRRAENLRIRRKRKERARTSFYKDPFRFVKGLFTKEKSGSLKVPKRELEDHLKTTHTDSQRFEQREIPSDMPPIPLPEHQLDDSPPRWSEVEEVVRKARAASAPGPNGVPYRLYKNSPNILRFLWRQMKVMWTKQTIPKAWRRAGGVVIPKEKDASNIDQFRQINLLNVEGKVFFSIVAKRMTKYLKQNNLIDTSVQKAGIPGFSGCLEHTSMIWHQIQSAKREGRDLHVLFLDLANAFGSIPHSLIWTAFNFFHIPNTITNLVKNYFQDLQFCVKTTDYTTSWQSLEVGIMAGCTISPLAFTMAMEVIIRASKWVVGGERLKCGQRLPPIRAYMDDMTTLTSTVACTKHLLGKLHANITWARMKFKPSKSRSISIVKGKLTDQRFHINNAPIPLVSELPVKSLGRLYNARLKDSDQSDQLREETIKGLVSIDKTLLPGKLKLWCLQFGLLPRLMWPLTVYEIPMTKVEKLERTVSSYIKKWLGLPRCLSNIGLYGHGALELPISSLTEEFKCTKVRLNMTLTESQDELIQAAAPRLATGRKWILSEAIQQAKSALRHGDIVGQVQHGRGGFGLGTSRPTWHKATPTQRRKLVVAQIRQQEEADRCATAVAQSKQGQWTTWENLEHRKLTWKDLWEMEGSQISFIIRATYDVLPTPKNLNQWFGEDPSCALCQTPATLSHILTGCKTSLSQGRYTWRHNQVLRQLAITLEERRTTNNALPPLMPGHPNTTVFIRAGQLPAKPSAKVEASLLDSARDWRMQVDLVQKLRFPPEILTTSLRPDLVMWSSSQKIVLIVELTVPWEAAVGEAYERKHLKYADIAAEAEQRRWRARVLPVEVGCRGFVATSTTRLLKGMGIRGQAFRRAVKSLSEAAERSSRWLWVKRKDPNWAAHLGVKAEGGTPGTPGVAVEPSGGVVGLSTKHQ

SEQ ID NO: 23003 - protein, 1214 aa, Leucinodes orbonalis
MKLIRNYYRITRLGRDETAYRELLHKAVIDVHPELANVTIQRIADQRRIIVNNKRLSEEKLQQVRNEVEIELNMQTRTQTTDHIDIHSGFQFDNDFESTRQQSHITTDSLDLQFQVQSNNLPQILQSTEANQIFSATPDSTPPNNISHKTDIEQLFAEAYHFYLNTNPTQRQVIPKQRLTTKLAVTVQYIDKKILPNYLNESTDFNTLQTLIYCAAWTAAKKNGTKLEFQPIAISKCKNQKPKPKWQSRLESKVEDLRVKIGRLTTYINGNRSAKLVKHVLNIIKNYKIHTTHEAPNTALTEFLDTLKQKLNVVKSRLQRYVKCTNRKNQNSQFKFNQKQFYRALTDFSTNHTTPRTLSTDMPQKEELKDYWSAIWGYPVEHNYDADWIQIEQNSHKDIVTMKFETIPLEIFHNVIRKLHNWKAPGTDYLHNYWYKKFTYIHPFLYKHINLFIKKPESLPHYVTEGITYMLPKDINNRKDPSKYRPITCLQTLYKIITACVTETIYDHIDLNNILTEQQKGCRKFSQGCKEQLTIDSIILQQVQRKKKNLFTMYIDYKKAFDSVPHSWLLKVLEIYKIHPQIISFLEIAMQNWTTKLKLITANQSVQTDNIKIQRGIFQGDSLSPLWFCLALNPLSHRLNDNKNGYLLKYKENESNSISELRLNHLFYMDDIKLYTSNKNSLDQLVSITEQFTADICMEFGIDKCKINSVRAGKIHKHSYQLVTGEHIVSLEENETYKYLGYNQSKQIQNKDTKQALIQKFKHRLNNILKSHLYAKNLIQAINTYAVPVLTYSFGIIKWTKTDLKNIQRTISVMLTKYRKHHPRACIQRITLPRTEGGRGLADIINLHSKQITNLRNYFHTKSETSTLHKAITMNDQQLTPLNLYDKAVQGNQTQVTQESKMNQWSQKSLHGRHLQDLCLANVDKSASNEWLKRGELFPETEGFMLAIQDQVIETRNYQKYIMKIKNQRTDQCRKCSSASETIQHITGACKSIAQTHYKHRHDQVANIIHQELVSMYNIKTQPSVPYYKYTPHTVLENATHKLYFDRAILTDKTVHFNRPDIVLIDKNKSTVHIIDIAIPNTHNLQSTITEKITKYIDLKHEIKRMWQMQNVTITPIVLSTTGVIPQQLHQSIQSLNLSRNIYTLLQKAVILNTCRIVRNFLQINDDNMSNTCPISATHIRPCPAPHPTLTIVAIPSQSNNILLNQDENRTFSI

SEQ ID NO: 23004 - protein, 1116 aa, Pogonognathellus flavescens
MSVLPNSTPNNTISLPDLSQNVRILRSTRRTNDAGDEENNIEELDDEENKSQSKNEIDPNLCYICMKSFDLDKNCKYIQCDSCDGWYHQYCTDVAGLSISKVKKLKWNCQFCINPIQTIEDKINNIRRNETEVHKEISSETEVRKESSNVTDTNNENPEDIHGTGECSNMANKEKCPECGKFYVRLNGHISKAHPSFYSNSIISKYENKQSNDKTHEKSILSDTSCTNDEFSDKKKHNKEIEAINDKIEILNEKLLNMDNEFDPKCFNQIINQLISILKEANNKIPGPMHPARKYYMLRKNKHLFMNNKSQFKKSSNPERNEKRKRQHHRDKYNYELTQHEYYFRRKRCVNKIFNSEENIKCPIEMEELQSKFSERWSTANNLTRENYNFVNPVDQADIDSKYDLTISQKEVEAAINNIKCDSACGPDGILPRTIKSINCAKIIATISNIMLVHNILPKDLSEAKTVLIFKKKGNIKDVNMWRPISISSVVRRVIEKILVKKLNYFISFNSSQKGFTNVPGCQMNTTILNGCLKTAKKEKKDLVAIILDGHQAYDSTGHIHLEMCLKEFPIPSDLRNLTTTLQINNSTRIYTHKGISEPILLKRGIFQGSSLSPIVFNASIDYVFNEVNNPSISSELGYELDKSLPKLSILGFVDDLVPLSNSRESGVKLLELTENLLQETGYKINKHKSKAIILEAGKLSEKDLILNNGETISALSKNEKVKYLGVTYDDEIVLDKISILKKLKDKLSILSATPMLHPDQKLNILNIYIWPIFIYSLQTSPIEKIGKLFLKDLDKIIRSFTKEILSIPHDTTNHMLYSPKNYKGLGLICAEWEAYLQIYNISNKLQSIDDAYVNISKDLKKEQDNVLSRLEISNEDLTFLKHKVEKVNKNIQTKSYYTKITEMMRKFLREREFEKWSKLPNKGKGVILFKECTKANNWIYKKGELSYSNWNSAIKMIANVAANKSNMGRSQNDNHCRVKSCNEIETLGHILGYCTQGYLLRIARHNNIRTLIANEFRNKGYSVWEEVECLSESGSTRRIDIIAIQGNNGFVIDPTIQIECDENQPQTTDINKKKIYEECIPYLSQKYNITNIEVIGLMIGARGTISKFFEEFRKR

SEQ ID NO: 23005 - protein, 1294 aa, Amphibalanus amphitrite
MYQYLKERFGTITPSQPRTRSTVKDRNMEHLRRRKNALKKRLKKALRNDTKEEDIFQIRKEFAYVMRLHNKIRKLLEKKTKRRNKEKASNSFRKDPYGYSKRLLEPTKKQEIQFSKNDAETYYNTIYKDAERDRTFEATESMDRPRQPTFPISTAPPKWHEMQSIIRKTRNKSAPGPNGIPYIVYKKCPRIMGHVFKLFVRIWKSGKIPHQWRTGRVTLIPKSDNPSSPGECRPIVLSNASGKLFFQVIARRLLKFLVTNDYLQTSVQKGFLPGISGCVEHTQALMEALQDAKRRKKEITVCWLDLANAYGSVSHNLIQFAAEWYHVPDILRKIIHSYYDDLAVKISTHEWTTDKISYEQGLFQGCPLSVVLFLMVFQICLDQLSKHSNRGYNVGTGSPHNQRAYADDLTLIAKNKTSAEMMLATVEHFLRWSATMRAKPAKCRSLSFVKIPGTSTMAPTDPELFIHGEAIPFIHQEPMKFLGQLIFKDLSDTSVRNATTDKLLLMLKTVDADPVPNTGKLWIYEHMIVSKLSWEFTIYCFPITFAKKLESLATPYLKKWAGLARSTTTSVLYRSHGSGGLHLTPLTSRLKCLQLVKFHQLKYAVDNSTQFIYGHIANRLRSKKHWNGVRELEERERHLALNELCRGNFGRAGLGLIPLPRASKMTPKQHRQELSRLVKQSEEENALVYVYNMAKQGRPLAWEAVMFLDVRWRKLIYGFSDKLLSFYLNSMSDTLPSPANLLLWKKSTLGSCSLCGYHHCTLFHIVSNCRYSLMTGRYNWRHDMVLRRLIEIIRPVLEKTDAPKKGTHFKSSSGTEYYVPPLQRNTERGKPAADDWQLIWDEEHDPYVFPPQIASTNARPDIVIWSTATKTCIVAELTVCWEENFYQAHERKQGKKDYIDLINTGRKNGWHMHYFAVEVGARGVTSDSLFSFFRYMGLSRRKSLKEADTVGRTSLHASYTLWLSRNQQKFSRWTLVEKPLFTMRPEIPPQKDAEPENRSPEPPAPSANRTHARPTIFNYTRARKTQPEPQSGARTPCGLNNLGNTCFINSIAQCLMVTDSLIPFASTEIRNALSSLRATTKMVTRPTELVKAIAQLNPSLTTGQQQDVAETLETMLSCQADSANVGIGEITDTIKCTACGSTLETPRPLIPPILRVPISAPSLQECISNSLAPQPLGGRICSQCHAHSSEISTQILVAPDAVCIQLLRFDHGTNTSKNTSNVSLAPTVQLNGVTWYITGIINHVGTLHQGHYTSLVKSTHRWYRCNDSKVSEASEGTALSSSTKSAYLVFLSKS

SEQ ID NO: 23006 - protein, 1294 aa, Amphibalanus amphitrite
MYQYLKERFGTITPSQPRTRSTVKDRNMEHLRRRKNALKKRLKKALRNDTKEEDIFQIRKEFAYVMRLHNKIRKLLEKKTKRRNKEKASNSFRKDPYGYSKRLLEPTKKQEIQFSKNDAETYYNTIYKDAERDRTFEATESMDRPRQPTFPISTAPPKWHEMQSIIRKTRNKSAPGPNGIPYIVYKKCPRIMGHVFKLFVRIWKSGKIPHQWRTGRVTLIPKSDNPSSPGECRPIVLSNASGKLFFQVIARRLLKFLVTNDYLQTSVQKGFLPGISGCVEHTQALMEALQDAKRRKKEITVCWLDLANAYGSVSHNLIQFAAEWYHVPDILRKIIHSYYDDLAVKISTHEWTTDKISYEQGLFQGCPLSVVLFLMVFQICLDQLSKHSNRGYNVGTGSPHNQRAYADDLTLIAKNKTSAEMMLATVEHFLRWSATMRAKPAKCRSLSFVKIPGTSTMAPTDPELFIHGEAIPFIHQEPMKFLGQLIFKDLSDTSVRNATTDKLLLMLKTVDADPVPNTGKLWIYEHMIVSKLSWEFTIYCFPITFAKKLESLATPYLKKWAGLARSTTTSVLYRSHGSGGLHLTPLTSRLKCLQLVKFHQLKYAVDNSTQFIYGHIANRLRSKKHWNGVRELEERERHLALNELCRGNFGRAGLGLIPLPRASKMTPKQHRQELSRLVKQSEEENALVYVYNMAKQGRPLAWEAVMFLDVRWRKLIYGFSDKLLSFYLNSMSDTLPFPANLLLWKKSTLGSCSLCGYHHCTLFHIVSNCRYSLMTGRYNWRHDMVLRRLIEIIRPVLEKTDAPKKGTHFKSSSGTEYYVPPLQRNTERGKPAADDWQLIWDEEHDPYVFPPQIASTNARPDIVIWSTATKTCIVAELTVCWEENFYQAHERKQGKKDYIDLINTGRKNGWHMHYFAVEVGARGVTSDSLFSFFRYMGLSRRKSLKEADTVGRTSLHASYTLWLSRNQQKFSRWTLVEKPLFTMRPEIPPQKDAEPENRSPEPPAPSANRTHARPTIFNYTRARKTQPEPQSGARTPCGLNNLGNTCFINSIAQCLMVTDSLIPFASTEIRNALSSLRATTKMVTRPTELVKAIAQLNPSLTTGQQQDVAETLETMLSCQADSANVGIGEITDTIKCTACGSTLETPRPLIPPILRVPISAPSLQECISNSLAPQPLGGRICSQCHAHSSEISTQILVAPDAVCIQLLRFDHGTNTSKNTSNVSLAPTVQLNGVTWYITGIINHVGTLHQGHYTSLVKSTHRWYRCNDSKVSEASEGTALSSSTKSAYLVFLSKS

SEQ ID NO: 23007 - protein, 1402 aa, Marasmia exigua
MHPNTHTHTHTHTHTHTHTHTHTHTHTHTRTHTHTHTHTSRLYNSIYKIIIINLRPLPGGYRRGTPGAGAGCSSMQAVGGEELSRRAFAGLDPEFMTAENSSDPPSPISSTHSLFQSPNSSLKSYENVIVSRSSTVSPMSVHVVQEATASQFAPSTGQKRARKRWNDEMNMFIWRKYLILTHLEQQNKRGHLGPLHQQFSEAFPAMEASRQRIGDQRRAIVNNKLLPQQILDEIRTEVAIELQQSRQRTEFTRNTTLNQGYERMRWSEEINEMIIRSYFEVTELETDMTIYRKKLYDKFKEHYPHLSHVSEQRVSDQRRVILRNRLISEERIEQIKREVGAILQQTNQVTTKNGINHKDAISITEIDNHIDLQLNQTNNKVHLDTQTKSRKHYRHKSYIETDTIEKQFNISLDKFISTDPISRPYIPKQKSSRKFAFIVEHINKEILPKHIATDQDFSTLQTIIYSAAFTSAICNGAKIHENSCDSTNKSNRDNKPKWQKRLEKKIRALRLYIAHLTEFIRGNSNHSIVKTVQRMRCCENYFLDTLKQKLNTTSSRLKRYLTCTNRKTQNVNFNTNEKVFYRNLTSNNTNISTNNETPTSESLHEFWANIWQNPVEHNSNADWLQEDNTESDTQEMEFDMITAETFIEIIRRTHNWKAPGTDNIHNFWYKKFTCTHPYIHQHLNNFIQMPETMPNYITQGVTYMLPKDQDTKNPAKYRPITCLQTIYKILTACISETIYTHLDRNNLLAEEQKGCRKFSQGCKEQLTLDAIAIKEALKKRKNIHTMFVDYRKAFDSVPHSWLIQVLCINKIHPTIVSFLKTTMQNWQTVLKLKQNKDISLTTEPIQIKRGIFQGDALSPLWFCLALNPLSQLLNKSQAGYRINQINSSNSQTLSHLMYMDDIKLYAPDIDRLYKLADITQKFSQDIRMKFGVEKCKINSIEKGKLQDKSYALETGEIITPMDDYSTYKYLGFQQCKHINQKQTKAELISKFKHRLNQILRSHLNSKNIVKAINSYAIPILTYSFGIIRWSQTELTTLQRTINTHMTKHRKHHPKSCTQRLTLPRREGGRGLIDVTNLHNKQITTLRKYFYRKAETSSLHKFSIEADNKLTPLNLHDSHVQKNEIITDNQTKIAEWAQKSLHGRHKADLSQNHVDFEASNEWLTRGELFPETEAFMMAIQDQVIATRNYRKHVTKEIQTDQCRHCNSAPETIQHITGACKTLVQSDYKHRHDQIASIIHQYLAHAFKFIREKVPYYKYSPTTVFENQQTKLYWDRTIITDKTVHFNRPDITLHDKDNKTIYLIDIAVPNTHNLQATISEKITKYHDLAIELKQQWHAETVHIIPIVISSTGVIPNSIKKSLELLNIPTKITYLLQKASILNTCRIARKFLSSGSTTLNPMTLD

SEQ ID NO: 23008 - protein, 1372 aa, Marasmia exigua
MMETQKRKYNLRPLPGGYHRGTPGAGAGCSSMQAVGGEELSRRAFAGLDPEFMTAENSPDPPSPISSTHSLFQSPNSSLKSYENVIVSRSSTVSPMSVHVVQEATASQFAPSTGQKRARKRWNDEMNMFIWRKYLILTHLEQQNKRGHLGPLHQQFSEAFPAMEASRQRIGDQRRAIVNNKLLPQQILDEIRTEVAIELQQSRQRTEFTQNTTQNQGYERMRWSEEINEMIIRSYFEVTELETDMTIYRKKLYDKFKEHYPHLSHVSEQRVSDQRRVILRNRLISEERIEQIKREVGAILQQTNQVTTKNGINHKDAISITEIDNHIDLQLNQTNNKVHLDTQTKSRKQYRHKSYIETDTIEKQFNISLDKFITTDPISRPYIPKQKSSRKFAFIVEHINKEILPKHIATDQDFSTLQTIIYSAAFTSAICNGAKIHENSCDSTNKSNRDNKPKWQKRLEKKIRALRLYIAHLTEFIRGNSNHSIVKTVQEIKEKYKVHASYEAENTELIHFLDTLKQKLNTTSSRLKRYLTCTNRKTQNVNFNTNEKVFYRNLTSNNTNISTNNETPTSESLHEFWANIWQNPVEHNSNADWLQEDNTESDTQEMEFDMITAETFIEIIRRTHNWKAPGTDNIHNFWYKKFTCTHPYIHQHLNNFIQMPETMPNYITQGVTYMLPKDQDTKNPAKYRPITCLQTIYKILTACISETIYTHLDRNNLLAEEQKGCRKFSQGCKEQLTLDAIAIKEALKKRKNIHTMFVDYRKAFDSVPHSWLIQVLCINKIHPTIVSFLKTTMQNWQTVLKLKQNKDISLTTEPIQIKRGIFQGDALSPLWFCLALNPLSQLLNKSQAGYRINQINSSNSQTLSHLMYMDDIKLYAPDIDRLYKLADITQKFSQDIRMKFGVEKCKINSIEKGKLQDKSYALETGEIITPMDDYTTYKYLGFQQCKHINQKQTKAELISKFKHRLNQILRSHLNSKNIVKAINSYAIPILTYSFGIIRWSQTELTTLQRTINTHMTKHRKHHPKSCTQRLTLPRREGGRGLIDVTNLHNKQVTTLRKYFYRKAETSSLHKFSIEADNKLTPLNLHDSHVQKNEIITDNQTKIAEWAQKSLHGRHKADLSQNHVDFEASNEWLTRGELFPETEAFMMAIQDQVIATRNYRKHVTKEIQTDQCRHCNSAPETIQHITGACKTLVQSDYKHRHDQIASIIHQYLAHAFKFIREKVPYYKYSPTTVFENQQTKLYWDRTIITDKTVHFNRPDITLHDKDNKTIYLIDIAVPNTHNLQATISEKITKYHDLAIELKQQWHAETVHIIPIVISSTGVIPNSIKKSLELLNIPTKITYLLQKASILNTCRIARKFLSSGSTTLNPMTLD

SEQ ID NO: 23009 - protein, 1064 aa, Ostrinia furnacalis
MSTTIHETTSQNTSNLEGIPNESQISDSTPDGTNNEPSPQHANTFNGRIEVTKIEEQFNTAFGLFQFTDPVCRPFIPKQKTSKNLSFIVETLNNHVLPKHLSHDQDFATLHAIIYSAAYTAAICNNSKVYDRTSSNAVRNKRKPSWQQRLENKIARLRTDIGRLTSYMQGNRSSIVTKTVEEIKGKYHIHSVHEEPNSEIVHFLDTLKQKLNAASSRLKRYLTCTARKVQNNQFRHNEKYFYRHLTSDQNQNQLNQSNNRAPLPQELRQFWAKIWENPLEHNKDADWINDSELYPNSTEMHFEFIPADTFIQVIKRTHNWKAPGTDNIHNYWYKKFTSTYPYIHSHINQFIQEPHTIPEFITQGVTYMLPKDHHDTSNPAKYRPITCLQTIYKIMTSCVSETIYEHLDEHCILAEQQKGCRRSSQGCKEQLTIDAIVMREAQRKRKNIHTMFIDYQKAFDSVPHSWLIHVLNIYKIHPTIVTFLKSAMQNWQTILKIQQNGSSVTTEPIRIQRGIFQGDALSPLWFCLALNPLSHLLNKVNLGYSISVENNHQILSHLMYMDDIKLYGSSKEELFTLANITESFSRDIKMQFGIDKCKVHSIERGKVQHNPYFVETGEEIEAMNEEASYKYLGFYQARQLLQKQTKQQLKNKFKHRLKTILKTHLSSRNLIKAINTFAIPVLTYSFGIISWTQTELDTLQRNINTHMTKFRKHHPKSCIQRTVLSRDEGGRGLIDIKNLHNRQITTLRKFFHKKAETLPLYHNLNLTDKKLTPLNLHDKSTQRNEKCSLDQEKATQWAQKSLHGRHKADLSQPHVDKDASNAWLRRGELFPETEAFMLAIQDQVIVTRNYRKHITKELQVDLCRRCNSVPETIQHITGACKSLVQSDYKHRHDQVAAIIHQYVAHKYKFIPNKSPYYKYTPSTILENNELKIYWDRTIITDKTIHYNRPDITIHNKSEKTVYLIDIAIPNTHNLQTTISEKLTKYHDLAIELKTQWSANAVYIVPIVISSTGVVPKSLAKSLKVLDINEKITYLLQKAVILNTCRLTRKFLSSDLTSFNAVMLG

SEQ ID NO: 23010 - protein, 1414 aa, Cnaphalocrocis medinalis
MESNRRKYNLRPLPGGYRRGTPGAGAGCSSMQAVGGEELSRRALAGLDPEFITAENPLSPPSPISSTQSLFPSPSSSPYSFEAHSRSRSTSVSSVSVDVVQEASAAQSAPATKTISTRKRWSDDMNKLIWRTYLIVTNLEQNTHRGYLEPLHQKFTQEFPLMGASKQRIGDQRRAIVNNKLLSQETLNQIRAEVTEELRTTGAFNLDQGTRKTGRMQWTPNMNETILRCYFEVTEMEKNMTVYRSRLYGKFIEHYPELTHLSEQRISDQRRVIARNRLVKEEKIEQIKREIEKKLMLSAQKSNYATHDYNPTHCIDQTQSDTPDFQLNLTQLHTSDTPITTENLEQSNTQIDLTQSNTSNIQIESSQSSTQTHSTQQKTDCYNTTATQTNRNNYITDQTSIEEKFNEVFEQFSQTDPTSRPRIPKQKTSKKLAIIVNCLNKEVLPKHLNVDQDFNTFQTIIYSAAYTAAVCNGTKITSDSDINSNSSKRDRKPKWQRRLESKIEKLRLYLAHLTEYIKGSRSIKIVKTVEEIKTNYRTHASFENPNTQLPHFLDTLKQKLNAASTRLKRYLACTDRKKQNALFKNNEKHFYRNLDNSNNNQNNGNTANETPPLHNLHTFWSNIWENPLQHNKNADWLNDINNTHHTPQMEFEFVPADTFIQVIRRTHNWKSPGSDNIQNYWYKKLTCIYPYLHNHINKFIVQPETMPKYITQGITHLIPKDSDTKNPAKYRPITCLQTIYKILTACISEIIYEHLSDHNILAEEQKGCRKYSQGCKEQLIIDAIAMKEACRKRRNIHTMFIDYQKAFDSVPHSWLLHVLELYKINPKIVSFLNSAMQNWQTSLKIRQDGVSLTSKPIRIMRGIFQGDALSPLWFCLALNPLSTLLNNSNSGYPLKYNNSHHRLSHLMYMDDIKLFAADKPSLFKLADITQEFSRDIHMHFGIDKCKVLSINRGKVECNSYPLESGESITPMDENSTYKYLGFHQSRQIQQKQTKSELKNKFTRRLKQICRTHLNSSNLVKAINSYAIPILTYSFGIISWSQTDLTSLQRTISTQMTKFRKHHPNSCTQRLTLPRDEGGRGIIDIVNLHNKQISTLRSFFYSKAETSILHKSATAIDNKLTPLNLQDSNRQSNENITSNQQKLEDWAKKSLHGRHKADLGRTNVDNIKSNAWLKKGELFPETEAFMLAIQDQVIATRNYRRYITRELQADLCRYCNSAPETIQHITGACKAFAQTDYKHRHDQVAAIIHQHLAYTHNFITKKEPYYKYLPSTVLENDHAKLYWDRTIITDKTIHYNRPDITLFDKAQKTAYLIDIAIPNSHNLQSTISEKISKYRDLAIEVKTQWRADTIFIVPVVLSSTGIIPETLNRSIEALNIPPHIIYTLQKATILNTCRITRKFLSSGLTTVALHPVALD

SEQ ID NO: 23011 - protein, 1276 aa, Cnaphalocrocis medinalis
MESNRRKYNLRPLPGGYRRGTPGAGAGCSSMQAVGGEELSRRALAGLDPEFITAENPLSPPSPISSTQSLFPSPSSSPYSFEVHSRSRSTSVSPVSVDVVQEASAAQPAPATKTISTRKRWSDDMNKLIWRTYLIVTNLEQHTHRGYLEPLHQKFTQEFPLMGASKQRVGDQRRAIVNNKLLSQETLDQIRAEVREELQTTGSFYLDQGTRKTGRMQWTPNMNETILRCYFEVTEMEKNMTVYRSRLYEKFIEHYPELTHLSEQRISDQRRVIVRNRLVKEEKIEQIKKEIEKKLMPPGQKSNYATHDYNPTQRIDQTQSDTPDLQLNLTQLHTSDTPRTTENREQSNTQIDLTQLNTSNIQIELSQLSTPIHLTQPNTPEIDYNTTATQTNRNKYITDQTSIEEKFNEVFEQFSQTDPTSRPRIPKQKTSKKLAIIVDCLNKEVLPKHLNVDQDFNTFQTIIYSAAYTAAVCNGTKITNDSDNSNSSKKDRKPKWQRRLESKIEKLRLYLAHLTEYVKGNRSIKIVKTVEEIKANYRIHASFENPNTQLPHFLDTLKQKLNAASTRLKRYLACTARKKQNALFKSNEKHFYRNMDNNNNNQNNGNTEKETPPLHNLHKFWSNIWENPLQHNRNAGWLDDINDTHPTPQMEFEFVPADTFIQVIRRTHNWKSPGSDNIQNYWYKKLTCIYPYLHNHINKFIIQPETMPKYITQGITYLIPKDSDTKNPAKYRPITCLQTIYKILTACISEIIYEHLSDHNILAEEQKGCRKYSQGCKEQLIIDAIAMKEACRKRRNIHTMFIDYQKAFDSVPHSWLLHVLELYKINPKIVSFLNSAMQNWQTSLKIKQDGVSLTSEPIRIMRGIFQGDALSPLWFCLALNPLSTLLNNSNSGYPLKCNNSHHRLSHLMYMDDIKLFAADKPNLFKLADITQEFSRDIHMHFGIDKCKVHSINRGKVECNSYPLENGESITPMDENSTYKYLGFHQSRQIQQKQTKSELKSKFTRRLKQICRTHLNSSNLIKAINSYAIPILTYSFGIISWSQTDLTSLQRIINTQMTKFRKHHPNSCTQRLTLPRDEGGRGIIDIVNLHNKQISTLRTFFYNKAGTSILHKCATAIDNKLTPLNLQDSNRQSNENIKSNQQKLEDWAIKALHGRHKADLGKTNVDKIKSNAWLKKGELFPETEAFMLAIQDQVIATRNYRRYITRELQSDLCRYCNSAPETIQHITGACKAFAQTDYKHRHDQVAAIIHQHLAHTHNFITKKGAILQIPTINSPRE

SEQ ID NO: 23012 - protein, 1362 aa, Cnaphalocrocis medinalis
MERNRRNYNLRPLPGGNRRGTPGAGAGCSSMQAVGGEELSRRALAGLDPEFMTAENPENPSSPISSTHSLFPSPSSSPYSYEAQNSSRSTTVSPMLADVVQEAPATQPAPTASTKSTRKRWSDDMNRFIWRTYLTITNLEQQMQRGYLDPLHQQFTLEFPSMGASKQRIGDQRRAIVNNKLLSQDVLEQIRAEVRDELQSSPPLQLNTNTSERMRWTPDMNETILRCYFEVTDMEKNMTVYRKKLHESFIQRYPELAHITEQRISDQRRVIIRNKLIEEGKIEQIKRDVEEKLKESGEQQVISSDIHHTTQQFEHTQLNTPDTEIDPDILHTTDNTQTNTRDSNIIDQNKIEEQFKKVFEQFVDTDPTSRPRIPKQRTSRKLALIVEYMNKNILPRHLSADQDFTAFQTIIYSAAYTTAVCNGTKINDGNKDSNTNKHDKRPRWQRRLENKIEKLRLYTGHLTQYINGNRSCRIIKTVEEIKQNFRIHASYENPNTELQHFLDTLKQKLNAASSRLKRYLKCTERKQQNTLFNSNEKHFYRNLDMNNNNQNHRNATEIPPLHTLHQFWAGIWESPVQHNSDAAWLKDAIETSPAPEMEFEFIPAEVFIQVIRRTHNWKAPGSDNIQNYWYKKFTCAYPYLHNHINDFIQKPESMPKFITQGVTYMISKDNDTKNPAKYRPITCLQTVYKILTACLSEVIYEHISDNNILAEEQKGCRKYSQGCKEQLIIDAVAMKEALRKRKNIHTMFIDYRKAFDSVPHSWLLHVLDIYSINPKIVSFLKSAMQNWETSLKIGQDGTLLTTEPIRIMRGIFQGDALSPLWFCLALNPLSKLLNKSNAGYSLKHNNSHHLLTHLMYMDDIKLYAADKTELFRLADITQDFSEDIHMHFGIDKCKIHSVHRGKVQDHSYTLQNGEVIAPMDENSTYKYLGFHQSKQIQQKQTKLELKQKFTRRLKQIFRTHLNSKNLVKAVNSYAIPILTYSFGIISWSQTDLMTLQRTINKFMTKFRKHHPNSCTQRLTLPRNEGGRGFIDIINLHNKQISTLRYFFHNKSETSILHKSITQIDNKLTPLNLLNTTRQPNEQTTSNQQKLEDWSKKSLHGRHRADLSQPFVDKEKSNAWLKRGELFPETEAFMLAIQDQVIATRNYRRYITKELRADLCRYCNSAPETIQHVTGACKAFVQTDYKHRHDQVASIIHQHLAHAHKFITNKEPYYKYQPSTILESDQVKLYWDRTIITDKTVHFNRPDITLFKKTSRTAYLIDIAIPNTHNLQSTVSEKVAKYRDLAIEIKTQWRAETVFIVPIVISSTGVIPSSLTRSLDALDIPHHIIYTIQKAIILNTCRITRKFLSSGLTAVALHPVTLD

SEQ ID NO: 23013 - protein, 999 aa, Marasmia exigua
MNTNPTTRPYIPKQKSSRKLGFIIDYLNKTVLPKHLSADQDFATLQTIIYSAAYTTAICNGSKIYENNSNTSNKQDTNKKPKWQIRLENKIKTFRLYIAHLTQFIAGNKNKSIIKTVESIKTKFKIHATHEAENTELTHFLDTLKQKLNTASSRLKRYLTCTNRKIQNSNFNSNEKIFYRNLSNDFNSNKTVNETPTPESLHNFWAKIWQDPKAHNSNAKWLQKDRSTPDIPDMEFEIITAETFIEVVRRTHNWKSPGTDNIHNFWYKKLTCIYPYIHNHINDFIKMPDTLPKYITQGITYMIPKDQDTKNPAKYRPITCLQTIYKILTSCISETIYSHLCTNNLLAEEQKGCRKYSQGCKEQLTIDAIVIKEALRKRKSIHTMFIDYRKAFDSVPHSWLIHVLQINKIHPVLVEFLKTTMQSWQTVLKIKQNTETLLTTEPINIKRGIFQGDALSPLWFCLALNPLSQLLNRSQAGYEINPNNHNNHILSHLMYMDDIKLYASNKKDLFTLADITQTFSRDICMEFGVDKCKINSIEQGKFQNDRYTLESGEVIEPMDEHSTYKYLGFQQSKHIHQKQTKTELKSKFKHRLNQILKSHLNSKNLVKAINTYAIPILTYSFGIITWSQTDLTVLQRMINTNMTRHRKHHPKSCVQRLTLPRREGGRGLIDITNLHNRQITTLRQYFHNKSEISKLHKSASKIDKKLTPLNLKDTTIQKNERVTDNQTKTTEWSQKSLHGRHKADLSLPHVDIDASNEWLTRGELFPETEAFMMAIQDQVIATRNYRRYITKEIQSDNCRHCNSAPETIQHITGSCKSLVQTDYKHRHDQVASIIHQYLAHKFKFIQEKLPYYKYTPSTIYEDQQYKLYWDRTLITDRTVHYNRPDITLQDKVNKTIYLIDIAIPNSHNLQPTISAKITKYHDLAIQLKKQWHADTVHIIPIVISSTGLIPHSIKKSLEILNIPTKLTYLLQKASILNTCRITRKFLSSGSTTLNTMTLD

SEQ ID NO: 23014 - protein, 1422 aa, Cnaphalocrocis medinalis
MNRKQRLIELRPCPCTIVSFDRSTGLHLPSPSRLPFLTNDPKPTQMMETQKKKYNLRPLPGGYRRGTPGAGAGCSSMQAVGGEELNRRAPAGLDPEYMTAETTNPPSPISSTHSLFQSPSSSPNPFENPIVSRSSTVSPVSVDVVQEATASQSAPTAGPKRARKRWSDEMNSFIWRQYLILTRLEQENKRGHLGPLHQKFCENFPTMDASRQRIGDQRRAIVNNKLLPQHILDEIRAEVAIELHQPSQTTTCTQGTTLSQGYERMSWSEEMNEMVMRSYYEVTELETNMTIYRKKLYDKFIEHYPHLTHLTEQRVSDQKRVILRNKLIPKEKIEKIKREVETHLQQTTEPIPNNEIEHSDIISITETEDEFDQQLNQTNNETQSHTQTRHRKSYTQAHKSYIDPNTIEKQFNNTFAKFIHTEPTSRPYIPKQKTSRKLGFIIEHINKIILPKHISADQDFATLQTIIYCAAYTSAICNGTKIHENQPGTTNPSNQDKKPKWQIRLERKIQALRLYIAHLTAYINGNRNHTIVKTVKDITTKYKIHAKYEEENTELDHFLDTLKQKLNTAAGRLKRYLVCTNRKAQNSKFNTNEKIFYRNLSTNNRNMNTTTTQETPTPETLHEFWANIWQNPVEHNSNADWIPEINAGPDTEEMEFDMITAETFIEVVRRTHNWKAPGSDNIHNFWYKKFTCTYPYIHQHLNNFVQMPDTIPKYVTQGITYMLPKDQDTKNPAKYRPITCLQTIYKILTACISETIYTHLDNNNLLAEEQKGCRKYSQGCKEQLTLDAIAIKKALKKKENIHTMFIDYRKAFDSVPHSWLIEVLHVYKIHPTVISFLQTAMQNWETVLKIKQNKDISLTTDPIQIKRGIFQGDALSPLWFCLALNPLSQLLNKSQAGYTINQNSSTNSQKLSHLMYMDDIKLYAPNKDNLFQLADITQTFSQDICMEFGVEKCKINSIEKGKLQDADNSYSLDSGDLITPMDEHSTYKYLGFQQCKHINQRETKAELKSKFKHRLNQILRSHLNSKNIIKAINTYAIPILTYSFGIIKWSQTELTTLQRTINTHLTKHRKHHPKSCTQRLTLPRREGGRGLIDITNLHNKQITTLRQYFYRKSETSSLHKSATETDNKLTPLNLHDTNIQPNEKIRDNQMKASEWSQKSLHGRHKADLSQDHVDIEASNDWLKRGELFPETEAFMLAIQDQVIATRNYRKHITKELQNDLCRHCNSAAETIQHITGACKTLVQSDYKHRHDQIASIIHQYLAHAFKFIPEKVPYYKYSPSTILENKRIKLYWDRTIITDRTIHFNRPDITLHDKDTKTIYLIDIAVPNTHNLQATISEKISKYHDLAIELKKQWHAGTVHIIPIVISATGVIPKSIKKSLDLLKIPTNITYLLQKASILNTCRITRKFLSSGSTTLNTMTLD

SEQ ID NO: 23015 - protein, 921 aa, Cnaphalocrocis medinalis
MRLERKIQALRLYIAHLTAYINGNRNHTIVKTVKYITTKYKVHARYEEENSELAHFLDTLKQKLNTTAGRLKRYLVCTNRKAQNSKFNTNEKIFYRNLSTANNRNMDKTSIQETPSPETLHEFWANIWQNPVAHNSNADWIPEINAGSDTEEMEFDMITAETFIEVIRRTHNWKAPGTDNIHNFWYKKFTCTYPYIHQHLNNFVQMPDTIPKFVTQGITYMLPKDQDTKNPAKYRPITCLQTIYKILTACISETIYTHLDNNNLLAEEQKGCRKYSQGCKEQLTLDAIAIKKALKKKENIHTMFVDYRKAFDSVPHSWLIEVLHVYKIHPTVISFLQTAMQNWETVLKIKQNKDISLTTDPIQIKRGIFQGDALSPLWFCLALNPLSQLLNKSQAGYTIDQNNSTNSQKLSHLMYMDDIKLYAPNKDNLFQLADITQTFSQDICMEFGVEKCKINSIEKGKLQVADNSYLLESGDLITPMDEHSTYKYLGFQQCKHINQRETKAELKSKFKHRLNQILRSHLNSKNIIKAINTYAIPILTYSFGIIRWSQTELSTLQRTINTHLTKHRKHHPKSCTQRLTLPRREGGRGLIDITNLHNKQITTLRQYFYRKSETSSLHKSATETDNKLTPLNLHDTNIQPNEKIRDNQMKATEWSQKSLHGRHKADLSQDHVDIEASNDWLTRGELFPETEAFMLAIQDQVIATRNYRKHITKELQTDLCRHCNSAAETIQHITGACKTLVQSDYKHRHDQIASIIHQYLAHAFKFIPEKVPYYKYSPSTILENKRIKLYWDRTIITDRTIHFNRPDITLHDKDTKTIYLIDIAVPNTHNLQATISEKISKYHDLAIELKKQWHAGTVHIIPIVISATGVIPKSIKKSLELLKIPTNITYLLQKASILNTCRITRKFLSSGSTTLNTMTLD

SEQ ID NO: 23016 - protein, 1202 aa, Ceratina japonica
MHRLIYYLIMQNSTNSNASDVEQPGPGCSTTDSSVQQGTIEDDQAIVFGPTNTDISIRMPFPEDGLTCSLCVEQGKNIAFLDAKNFASHCQSLHSIKKIEWKCGRCNKLWPGVHNWRCHYAKCKGVDATVQNNFQCLICKRSFETKSGLSTHERHIHPVTRNEKRRMEHEKEKVPSGRKLTVWSTDEIKLLEELNERYKHLSRPNVEIQRHFLNKTVKQISDKRRGLKSPNATNAAINVEINEDPDVEEIADLVEDIEVPTEDSVMPTEGIEVPRLSSSIDPQKEHIDTIKKFIEIVNNSWEDPNNLQKEFKDLWQKVVSSENNMIRAEAIDLFIVNSLTKFMLNNYKPKQKEDNKTNKAKKSAKDKANKYNRQQNEDDTNVNNNNKRRKFAKRRNNSKNNDRKVNKNKRNQSKYARCQDWFHNCPKKLVDMVLSGNIDYEERSYSLPDLNTIKEFYEELWGNEIPTTIKFNTSNTVLDFQQILKPFDEQEVRKKIMKIANKTAAGPDKIKKFHINNKDILTILPQLFNLLLVTNYFPKPWLQNATVLLPKLGKDTKDIKNWRPITISSLLSRVFTSLIDARIRSVVAHNIRQKGFVKTNGCQNNITILKHAINNMKYNGGGVMISVDITKAFDTVPHLAVYEALKAKGIPPIITNLIKNMYTGCLTDIKGANDEKARVELKRGVKQGDPLSPLLFNLVLDNIIEKIINNTEGLDLDGGKVELLAFADDIILLARNEKEAQKQINILLQELKNLGMSLSAEKCSCFQINQTHRSWYTKDPNITIGDQLIKHVGPDESFAYLGVKMGPWKECYRGVSLPDLILILNNVKKLKLKPHQKIKLINMYIIPRFIYDLSAFPPSSSTLKLIDLELRRHYKEILHLPSSTTNGLLYSRKKDGGLGILKIEHIIKLSTLKSNIKNKYAADPVIKALACDEANEKYLKETANSLRINWPATLKDIENAKIRLKREASTEWENLKSQGHGVSEFRNNKLSNMWLYQPEFLKSSRFIDALRLRSNTYGTRVVLNRAKMTTEVNCRRCESQPESLGHVLGICTFTKPMRIRRHDEINKFLAEKLATKETVTIEPSIPTSLGLLKPDLVIANEERVAVVDVSVRYEDRDYLKKAYEEKRSKYKQLAVELKTKYKKKEAIVLPVIVGSRGAIPHFTQKILSDLGFKKSDIMTISMMTLRSSIEIANAFLDYDRIT

SEQ ID NO: 23017 - protein, 1076 aa, Zanna intricata
MDAEGEYIVPWEPGPCQLCAGWFQKAAELMRRHRLMHQGVRVAFRCAKCDRKFGGPHAALCHYAKCKGVVLHELPFRCEVCERCFGTKTGVSQHKRHMHPEVRLEERRGPMAGRERRGPRVWNTEEEDIVVKFFAEWEGGDRYTDALSMRLPGKTRKQLRDKVALLRRGGVISSSTRAPLSPSSAEDIFLAGVVDEGSSPSHSEESTGGHPMAGEHQPGRRSEAIREDWISREHVNPLAKELAEKWGMADPEADWIEEFVGKITELIRSNIKERELRRRSNRLGRRRPARNEKRRRFANTQEMFKGCPTKLGEMVRNNRLGDLMPGEVIRPPTDRITKMYEELWGVEGECGLRVPEGGRETELTPVTSGEIRTRIRRMKPNGAPGPDGIKKEMIIGIPGTYDLLACIFRLLIWTGYYPVRWKSNCTTMIPRVGKDLTEAGGWRPITVGNLLAHAFSGVLEGRLRTPVELVGAQRGFAEGNGCFINIRLMDEALRAGKKSSLYAAVLDVSKAFDCVSHDAIMEVLRAQGVNGELSTMIRGMYRGITTTFKNCGGVQMPIRRGVKQGDPLSPLLFNMVLDPLVRSIQSMPGALKIYGEAVPVLAFADDLVLLFEDEQSLQQGLNEVVAYLAKVGLGLSPEKCGVIDVKGKGKTWVDAKVKVSVEGIPLRQFGVTEEVRYLGAYFSVADGVSCRRGAEEVVLSMERIGRLALKPRQKLDLLCFFVLPGYYHLFVSDLPSSSRLNEIDLVVRRVVKEFFHLPRGTSSGLIYCRRRDGGLGVPKMLDIVRAANLRAYCALENTTDRTVRKILVEEQADMCRRTAEGMGLCWPTSLSAIDKWKRSRKLAELEEWSHQPVQGRGVGCFKGNRLGNCWLRRQALHAGEEIDLLKMRSEVFPVRSYLHRVDPDTSKICRRCHVKDESLGHVLGECPAGRGARIARHDKVVDVIQERAEGAGWRVAREQLFRAGADALRPDLVIKTPGRAFIVDVKVRFEQGDSLKEAAREKREKYGRIIDAVKTDMSVQGVLILPVVIGARGGMMSETERNLRTLGLGGLKEIEDIILGVLRGSIYIGRTHLDCG

SEQ ID NO: 23018 - protein, 1144 aa, Frankliniella occidentalis
MGGKGVKWTEAEFQTLAEAEARITAAETRLMQKDSDKRLAAEPDVTRTADAIHKARQKPAYKALLAVAREKLKARQQPPRPTVDRRAEERPAQRQERVVPVSVASKAKGKTPAGQARGTNRPQTKETQAEPRVSTQKAKAAKAGKQTDQACGSSLDVTEKGEVSAGPEASGGNSSETGRLRTRAARAEARAQAVGESDRGSSVTIPDYDNPTIPCGPASGSGRAANTPDAEAPVSSHDQDEPDERALANAERATDRAQSEGRRNLTTSAIGPMEPRVLLEKVDAPGKLISKPSIRVALRTVVELCSADMKALVEDALSDKGTKAEIEARMDRFVEGLSTTSRKKRRNGPQKKGRAAPKGNRHSERAQRFALTQRAYEQNPSHCARMILDGADTPKEHPPLEEVEEFYEKLFETPSDLPWPEGETSGQVDMSYGITVAELKKSLGRLNDSAAGPDGINRKHLRAANVYDLVAFSNIVFGSCIVPSSLRKNRTTLLPKKGDMNKVGNWRPVTVSSLLLRLIHKIIAARITKHVPLHHSQRGFTPQDGIMANTQLLQALIQEQRRKGKSLYLVSIDLAKAFDKVSPQAIRRALLRLGVDAHTMKYVESIYEDIETTISVGSVTTRTMKVRRGVKQGDPTSGGLFNMIMDELLTLLEEAHGLLLGGTRVAGIGFADDTVLVSDSVHGMRRHLRVLEEFLRCTNMEVNPAKCLALQLGAVSDAKSMKSTILTRPLFQIGGVDVPCMNAETQLGYLGLQYDYRGSVAPSAANITVLLERLRLAALRPWQKMEILRTYLLPRLVHSLQTPKVRAGKLRWIDRCVLRFVKTTTHLPVTAPSAVAYAKQSKGGFGLPCFWRFIPTLYGQRLAKLEASTDPQLACLARTQTIKGLQQRLLKMSGGMDTMKQYHDQMAINLASTALGSGLVSTSSAAKCTWLYEPPKSWTGRDYCSAAQLRVGLLPTNGAPFKKAEDAKCRNPPCRNRGERESLYHVLQRCPQTHWARIERHNAICKVLASDFSRNGYQVLSEPHYRVGQKLYKPDLVIQKRGTKTAMLVEVTVAFEHKNSLASAYFLKEEKYKPILSTIQKSLLVEEVKNLPIVVGARGGFFPKSYKHLKDILGDAARTARGLVHTSLRYGCGIHEQFNASVWR

SEQ ID NO: 23019 - protein, 1175 aa, Adineta vaga
MNTRNTRQARVNLLTQHAHSDSGMIDNGAPSKETLVSPSSVYTIEYPIEGIICLICDDTSCRTHLELREHVMNDHNVHDIKYKCKICGKIFLTIGSIKSHHPACKRKQPTTPIATTNQQLPPSTLAATITPKAPLNIPALQCEICYDENIIHIATNKRGLTSHMRAKHAEAYEKSKKTALIRIAWNKDEDIMLANLEIKLKSIKKGQILDRLCNEWNKLVKQSHANPRSKDAIRTRRQQAAYKDVVNDLQRRTISDSQNPVDTPSDKTSSSTESDPETDQNIAANLNVEDVSAIKNMLNDMHITNRKLSTFMKDAIQAFLNSSMTTDAVQLTMLGINHSLSNIRNRNRNNSSSQRINKNMLATNKKNARNLSRISKANERAYYQRLYSHNKSRLMDELINGVSPNIDPPPINAAVQFYEQIWSVYTRDQHSVEPKSMTNNSNFQLLSPITKLDIDNVIKRTKRDTAKGLDLVTLQEAKLLADEDLLVAFNIWLGSRRIPSELKLNRTTLIPKGNIDLDKITNWRPITISSVLLRLFNKIIGHRMSKYFEIDKRQLGFTPINGCSMNIQWLHHLLKHARLRKRDINVCLIDVAKAFDSVPHESIFRALTRHRAPPSFIELVRNQYIDSCTSISYKEVSSKKIFIKRGVKQGDSLSPLLFNLVTDELFEILGDQFGYRIDNIGSTNIKCFADDICLISGTKIGMGHMISETTKFLDERGLQVNAKKCMSIALEKGYKGKKSKIVTEPVFTIKDVPIPILGYVTNYTKYLGIKFTSVGSINANTIKEEISNTLVKLQKISLKPQQKIDLLRSHVIPLYIYQLINLELYPKILKQIDICIRRTIRSILHLPTSLSIEFFYLPTKEGGLQIPLLRDVIGLAKVRIYKSIMRSDDAILKYLMENQGFPFIHRFTNELSLDSSFEADDLKQRKIEIMKERRVSFANKVHGYGAEVFATCPLTNFWLYGDCKTLKGRTYINGIKLRTNTLETRVTTTRGLLTDKMCRRCHAENESLMHILQYCKSTKGLRYKRHNLICSRVTEKLTKRGFTVYAEKAFTTDITGLPNTLRPDIIAVKDGHAYVIDIQNVYESSGASFTNASAMKTQKYMPLTEFIKTRHQCSEVSFKILIVGSRGSFHYGHLNIWYEFGFTSSELRYLALNCMENSLKIIYSFHNNLQEFSEQ

SEQ ID NO: 23020 - protein, 1181 aa, Adineta ricciae
MNTRQKVRETTTRHAHSDSNTIDNDSPTRSTNDPRVTTYTVEYPITKRACLICRETLSDLNLEIREHVNDVHNVYDIKYQCTICDKTYDSISSMKSHYPACRRKQTNVIPTVTKRPLPSNKKTSTTNDAQAAGISDLQCLACHKDNISFVAKDKKSLTSHMRAKHPETYENSKKVANIRVAWSKDEDILLANLELELKSIQKGQILDRLCSEWNKKVEKSHANFRSKDAIRTRRQQAAYKATLHDIQTRMQTTIQNKKKDDVSDDDQTSSESEDDAEVHNATTSNNDNNRSDEDDVSTIKNLLRELLSRNGNKLSAYMSEAIQTFLNPNQATDAVQLTMLGINHAITNIRNRSTKNSSSRQGDKNMLATNKKLARNPSRIRKANERAYYQHLYKHNKSRLMDELINGVPPNSEPPPIHDAVQFYEQMWSTCTHDQHGVEVKIQSNNNDYQLLSPITKIDIANAIKRTKRETAKGVDMITLQEAKQLAEDELLIAFNIWLGSKQIPKELKLNRTTLIPKGNQDLDKITNWRPITISSVLLRLYNKIIGYRMNKFFEIDKRQMGFTPINGCSLNILWLHHLLKHARLNKREINVCLIDVAKAFDSVPHESIFRALKRHKAPLSFIEMVRNQYTDSFTSITYKDLCSKKIRITRGVKQGDSLSPLLFNLVTDELFEILGDQLGYQINNIGSTNIKCFADDICLVSGTKIGMGHMITESIKFLNERGLQVNAKKCMSIALEKGYKGKKSKIVTESVFSTNDTPIPILGFIDNHTKYLGIKFTSVGVIKADIIKDEIRSTLAKLQKVSLKPQQKIDLLRSHVIPLYVYQLTNLELYPKLLKQIDLIIRRTVRTILHLPISLSTEFFYLPIKEGGLQLPLMRDNIGMAKVRIYKTIMRSDDAVLKYLMENQGFPIIHRFTDELKLDSSFESDDIKQRKIEIQKERRVSFANKVHGYGSEVFATCPLTNFWLYGDCKTLSGRTYINGIKLRTNTLETRVTTTRGLQVDKKCRRCQTENESIMHILQYCKSTKGLRYRRHNATCAKVVAKLRERGFIVHVEKAFTSDITGLPTTLRPDIIAVKEGKAYVIDIQNVYESSGASFINASSMKTQKYTPLIQFIKQRHQCSEVLFKMLIVGSRGSFHHGHLNIWQEFGFTSTELRYLALNCMENSLRIVYSFYNSLQEFNNQ

SEQ ID NO: 23021 - protein, 1122 aa, Microplitis demolitor
MPRESHRNFYRVGNGDDALPEPQLITSGVSSLSSNANHDISSYNNNIFLTGPLVSSVPSGRQTNRQLNILYEDSSAGYTQLNNTANRSSGSVSMLPSSGSNSLDFSVTPNFPSQSQQSTSNGDQSTTLQNTNCYQCPFCDKPFPTLRGLGVHKVSKHREQTNAAIDTSRRKPRWQDEDLRRLAAAEAKAPSDTRFMNEFLSQNVKFDPPRTAQSIASLRRKQSYRDLVSEFKESTPLPDLSSPQQSPRQATQSEERGIIEQRASWLRSARAYLTSGRCRMPGKDYIVQAIDAVERNENPEQLLTDWFHIRFPVAPNKSRIRYQSQNNELHLSRKQKRRREYAALQTLWTKNISKAASKVLDGDTGAHAGPPLSQQEAFWRPLLEASSVPFEGSPTTRPKPELEFISAPITTDDVRKYKPVARSAAGPDNLSASRWFKEVPDMVKATIMNIIMIWGKVPAIWRDSRTILIPKVSDTQDPSKFRPISISSIILRHFHRILASRLMTGLKHDERQRGFINADGTAENVAVLSAILYEARTKFKELHIALIDVMKAFDSVSHASITWALHELGLPKNFVDYISALYNDATTTLEANSQKSHPIHPGRGVRQGDPLSSVIFNVIMDLILKKIPEEIGFTLLSTNINALAFADDLVLVAGTAAGLQAAINCVTEEMSRHGLKPMPDKCKALSIVPSGKEKKIKVFTKPKFKISNSAVKQLGIKDKWNLLGVDFTFQGSQAPSFDIGEYLQKITSAPLKPQQRMHLLRTYLLPKFFHSLVLGRAKYGFLRKNDKVIRSFVRRWLMLPHDVPTAFFHAPIKEGGLGIISLLTKIPELTLRRLDVMKNSSFNAAIMASRSEWARKKRKWCSILPFKNENWAKKLHSQTDGRELRETRNSPASYSWVDDRYAHIPAKDWIQYIRTRINALPSLMRTTRGLRRLNQDYLCRAGCRVPETTAHIIQECIRTHGGCIYRHNTIVDRVAQSLEHRGYQVIKEDKISTRVGVRKPDIIAFKDDRVSVLDAQIVSGYRDINLAHIKKTDYYKKNNDIVKYVSDKYNVVPSNIHWSSITISWRGVWAKKSSDDLLLMGLSKAELRGLTTRTLMGSFLNFVRFNKIRTVQFHNLWPVRYR

SEQ ID NO: 23022 - protein, 1198 aa, Perkinsus marinus
MPSPPSPRRTRRADERQRLGLALPQQRQETASRDGSRGVAEIRPATARHQWSLADKQALCEAEAHWEKHRECCKGSKGSILKVEFEKRSGLVGKTGEQLASYLYKLSRSPEYAELKRNACGIIDSERSACAVQNTNEQGQAEELNRTQNGNQENWQDRLSQVQSPGQGEPQGPRRQCGRPKGPDDPRTEPERRLIANFREELRVVKNLSISERERLPDMKDKMNLIKERARVIEEAMLEECGEEPTAEMINHIIFAAARVLLSEQGVSTKQVKKKKGKLPAKRRLESKLKATRKDLGRITAYLQHYENPSRRLKMITKELRNKHGHSKSALLNLQGKLTLSLKNVSAKLRKWNIKEERTKLERLMNSDQKQLYRDLSHSEDQTHEGEETVNGEELGRFWKNVWAYQNTPGFENETWYIEYRNKLRRKNISPLGLTMISQEQVKEAIGKARPWKAAGPDKLKTYWFKLFPRIHEKLAVAFTKILTGEHDPPDWFYHGTTHLLEKPLRENRCRRASDYRPITCLCTMYKFLTSIIATKLTSHLEMNDIIAKEQLGCRAGRRGCVHQLLIDHAVSHHVRTSYHNLACGWVDFAKAYDSLAHSWIKIWLKEFGVGENIINFISRCMENWKLALHVNGVAVEGGNVEVRKGIYQGDSLSPCLFIIGTQPISEALKQLEAGYYFGNVRHRSSRIDHLLFVDDLKLFARNPKELGTQIECTQKVGEFAGLKFGLQKCAWLNISRGVSTECPQRIPESLRSIRYLGDRGTYTYLGIPQNMLPEKSEVKANAGRIILGRVQRVLKTKLSGNNTIKAINSWCISVAYYPIQVGLFSKSEAAELDTRIRNKLRQAHAHDYNSCTDLLYIARNEGGRGLISIEDAWNKITISMGEYVANHLSGIIPNINETNPLGKILRRRDKIKVGLQIHDDSNFPHNVFMKLKQLRLARFRAMPAAGMWYNKILALASDGLDLEASLNWFGSANITPQLESDILAFRTLAIPTNAFPVQAQDPLCRLCGKEKETLYHVASSCSTLAGAEYLDRHNRVCRLVYKACCDLLNVDFENHWWTCRPPCISNISGSLFWDQVIPTPNKIEHYKPDIVCVLNERKVVIVGEVAVCADLSVLRKEEEKRSKYQALLQELAVLYPGFSIKIVPIVIGVTGAVSKSLPRVLKNALLVGVDIKTCQRVASISTMHIVRRVLGGPLLGT

SEQ ID NO: 23023 - protein, 1242 aa, Ancylostoma ceylanicum
MFLFQVLVTPARNVVQANSCTQNQAQEDQTIRSQSAALTVPAPTTNENRRLGATTNNAQRPTEELAPMNNENQNSEEQPAPRKRNLWTTQELGTLATLVERHRGANGRVKWTDITKQWCDLQMPARTVAALKAAHAKLAKETRPQQQMTEIVNESMNCSPTVSVGDNENHAQQNPETQTQNEVAGEGDEINRNLKNQDLKQKMGQLFARCYDAARAKQDRASIVRPKGEIPKVILRIGNEILAEQIRQIKIEKLKSLNAAVYAIGKAITIVTADKLREKEAESREKLCNALDLKSTLIRFISTLSNELTRRETRGENKQPSKKYLELREIYNIENKSEIERLLRKLKDEYNIVNIDIQRMQETQRRHQVRSRGLSSLINKPQQREIQIPVEQIRDYWETIVGRSKSFEITSELKAWARENERRTRQAGDLTEGEWKTLFSRIKPWTAPGPDGIQGFWWKNLPEARTRLIQWCLRALRKPKQTIPTWLCHGRVALIPKNKEGPLGPGDYRPITCLNTCYKILTAMMALQITKEVGERLPPEQLALRKGIWGCTHAHILDQSACKDAEKSGKELHMLWVDMAKAYDSVSHGAVRWIMAKWGVSSLIRNTLSTLINLQTIRYGNMQNGKLITSRPLQIRNGLMQGDALSPLLFCMVISPISHWLRHNVLPYETKTGSGPSSDGPLRLGHIFYMDDLKVYTSRWDQVVKAKEGIQKVAQQLGLVMNPAKCAVKSLNSLQQGPPQPELREIPVLAATQFYKYLGIEQNLFSNIEEMWARAEESALATTKIIMDSELTVHQKIMGYNQTVIPKMKYVVSCIIFGSGRFVSLKKHARELDNKVRKQLVESHLRFGHSCVARLYVKREKGGLGLKSVEEEVEHAIVYTWCYFASNPDFIVPYQLAESLRSRNKRSLTSDFQAVLAAHGLEECVTRTILTNIKIDSHEYTSATKAARELVKKIHEQWTEGHLQEWKNKSTASRILQPADDGSSQLSLKDSFIWMVKGKVSSEVMRNVMAVQEGSLLTRCSPANRAIHPVMEWCRMGCHVRETPEHIVSTCEFWRTNIMMERHDEVARVIYNSILKKYDLLRSRQSSINETQVIDVGGIVIHWNDTIRTSENIPHNKPDILVWDKKTERIWIIEIAVSWYTRIHIQEERKLKKYSVNGTLPSDTEPWMYHPGPNLKAALQKDRKCRVDIVPLVIGTCGECSPNLRYQINALGLPDKTETLIEKMARSAVQGTNRLIKCHLSN

SEQ ID NO: 23024 - protein, 1046 aa, Acanthoscurria geniculata
MANKTGNINKKTFYNKNYTGAAPGGGGGPNNTRMPVPATRAQTKKKVTFKDAPTICTESSVTGAPSNVPATAPQVVCINVDDTDSEEVPPASPSEGVTVEEDLPASIPLQVNEPSHEVPLMEKFSAPLHYIVENGNFNEFEHLLEEVKDFITEHFKLRPNATSGGNNKKKGIDLDNAKELQKLYRRNRPRCVREIIKGSQGRCELAKEVLQQHFDSVWPNSTYDEDLISHLQPMELDVYCEPFAVDEVRRILYKCENTAPGPDRISYFHLRELDPDAVICTYILNMCLKHRKIPECWKYSSTVLIPKKGDLADPKNWRPIALSDTLYKLYGKCLLGRLMDWVLSTDALSPCQKGFMPHDGVYENNYVLSERIRRAKAQRADICICALDLTNAFGTVPHSLMLDTLSKLGAGEQFVEIVKDMYEDTFTRIITNDGLTEAIPINGGVLQGQPMSGMLFNLAFNAVIDNVQREESTHTVLAYADDLLIITSNPADLQSSLIKVHEDAKKAGLSFNPDKCVSLHIRGTTPVGACNTSFYIDGRLIPNLGEGDPSVFLGKPFGHLIINHDEAIESIIDKGKKILSAKLAPWQRLDALRTFFFPAVQFPLRTSQLKKEEWDRIDEALKTDIRKTLSLPSRATNDVLHSSRTRGGFQIPKLGSDSYICSIDGAFKLLTSFDPIVKQLAQDDLMEHVRSRTKLPAPTCEDTIFFLNGESDEIYKRTNNPRTSIWTKARDASRKLGVIWDFEDINNPRLWISDKAVTSSNRHKTQFLLRAQIANEAANKLSNKKNQGKTLHCTSLDKESCHFFYNGQYTRFKDWRFVHRARLNCVALNDTKPWARNQPALRRCRRCNNPDNFETLPHVLNHCFKQHAKTYQNRHNNILNRLAKAAAWQWNIHSINEQFEGTQLRPDLIVTKGEKAIILDATVVFENGAQAFNDARMSKKMKYEPIVQELRKRFKEVYCDAVIVGSLGSWDPANDSILRHLATPRYIKKFKQICVSETISWSRDIYVEHLSGKRQYTSNTAIYRGNDREEPTNDEQLEVAPEQQVP

SEQ ID NO: 23025 - protein, 1344 aa, Parascaris univalens
MWAARKNSIAKKKKRKDWLGGDSSGLKESPHGTEGGASVPQSEASPSSIHLLEVGEEMVSWSGGLQGHPTEGGVGPLSPPRIPVLLPSWPGGAPRTQNPGQSLVSATEVNIPGSRLLKNAHSGESEGGAGVEVEGINQESVQMRRGRWSSEEEQYVAELCGAYSGHVAWNKVLEEYNKRYEPRSKAALTAKWAAIKKQRLTAQETIPLSPEVSVIRDSVSRAISMAGGETSDCPKDEASKEDDKSSETGKSISHVSVALEGSFNNNDESRIHDAVITNAFRRSFMGYYHWASKSFDRVPIRRFSGTYPKALMEAGNKLIDEVWKRPLEKNQSRIGKLNALVYAAGRTIHQVCADEKSKMHQSTQNWFRRKAKVEAEHEELIHLLTHELKRRSRKIPPTARELKSIKELVDRCRTRSTAMLMKRLEQTKQELVLVRNRISVREQEMKRKQLRKEFAKRPSLQVLRQYGGVEKGGEKSTGKQPRMSVILEYWRSIIGKSKPFDASQDKHLELWRKRQKAVYPEDALVPKSELGNLYQEALKKARPFKAAGPDGIYAFWWKNLPTAGKLLEEIIVEWLYNGKVSSKWLMKGRTVLIPKKGDLRLPQNYRPITCLNTCYKFLTATIAKVLQAHLEKGDAIPKEQRALRKKEWGCTHAILLDRAVAIDATSQRHRPLSVAWLDYRKAFDSISHSYISWILNSVNVPKGIMGTFTKLMAGWETRYEIKYERNCGKIMTQKSQPIKIANGIFQGDALSPLLFVLCMSPISFALNETAQPYRSGAGQRSGTAFSLGHQFYIDDLKIYAPNRQELLKAIKIVHGISTVIGLDLNTEKCAQAHYLPKAKGKEVENEVNVETEVKVPILGIRQSYRYLGIDEKFLATKDALQRFEESLYYRGSMIFRSQLTWRQMVNAFLSIALGGLRYGFLNTNGSGPRLQEAKKKAREMDVRVRELLAASKCRFRKSIADRLYVSRSQGGYGLKSVESLLEDTIVATFSYVALGPEMAPQYHLFESLTKRGKRTPITDGQKILTQYGIGIHIEDEERSVKVDNRTFHEPTHLVRYLTAQMNQCRDRRYFERWKNAPMAGRFPRNDGIDYRLSCLWIEKALVSSIIIRNAFAVQEGNLMAHATAAGGTQVANKLCRHCHSDLETVAHIVSNCQKWLPNLYIDRHDSVARNVYFAICVKYGLSIIHYSNQIPPVAENESAKVLWNMEIRTKSLLFHRRPDILIFDKVRRRILVIEISISGMYGMKQQLSIKTNRYTVNSMKLNEESSTPYPPGPNLVRDLQETYRQEVRFYPLIVGVCGEQISETRTYLSEILERKVSDCDSIVERMSRSAAIGTSRIVKAHFSR

SEQ ID NO: 23026 - protein, 898 aa, Ascaris suum
MLRKRFAESPSLQVLIQYDNKENKSNMQHGRDNQLNMNAILDFWKAVIGKPKFFDVSQVEELQTWRERQKAAYSSNVGFSKSELGKIYEEELRRSRPFKAAGPDGIHAYWWKHLPSAGKLLGNIIVEWLVTGKVSCRWLMRGRTVLIPKKGDLRLPQNYRPITCLNTCYKLLTATIAKALLRHLDKGEAIPQQQRAPRKKEWGCTHAILLDRAVATDATTQKGRPLSIAWLDFKKAFDSLSHSYIRWILESVNVPKTITATFLKLMAGWETRYELKYKTKRGCMSIQRSQPVKIVNGIFQGDALSPLLFILSVSPISFALENKSKPYRSSVGQLSGMGFSLGHQFYVDDLKIYAPNRRELVNALVVAKNISTAIGLDLNVEKCAQAHYTPNVQQLEVETLADEEPLMELPVLGLRQSYRYLGIDQKFLATKNALQRFEESLFNRAAAIFRSDLTWRQMSSAFQSIALGGLRYGFLNTNGAGQKLSEALKHARDIDVRIRSLLSDSRCRFQKSINDRLYISRDLGGYGLKSVESLLEDTIVATFAYLALGPGLAPQYHLFASLASRGKRTPLSDGQKILAQYGIAVEINSEQRVAKVENRSFSEPTPFLRCLRSKLQQLRDHIHFEQWKMAPMAGRFPRNAEIDYRLSCLWIKAALLSAINLRNAFAVQEGNLLAHATPAGGKLGQNKLCRHCNKDLETVAHIVSNCPKWLPNLYIYRHDSVARNIYYALCVRYGLPIVHYSNQIPPVVENDKAKLLWNMEIRTKATLFHRRPDITVFDKVDRHIMIIEVAVANMYGMRQQHNIKFSRYTINSLELENETNLPYPPGPNLVGDLQDTYQQQVRFYPLIVGVCGEHLAETPIYLSEILGFPLSRCDDIIERMSRSAVIGTSRIVKAHFSS

SEQ ID NO: 23027 - protein, 1008 aa, Folsomia candida
MYKKVSCTFRPLKLTDLGILVKNAFPMLTTRKLRTELHGAPKIHYVGIQLKSEGIIDPVFDFKSIISLLKQNCPTLKQCPKACRIQVAQVLKTAIDKCISENTIEAWHLLLTFPYIVLQCEPKSHTKMGQSLNSKIKTNLTIFESLSNNTYQDFLLSQITKTSFKNETKVSNNIGRKVISKVSEGNIRGAIRLLTSDDTIAPNSPDTLEVLLEKHPPQSLDHFTVLEGHNISPHTTTKEQILSGIFSFPSGSAGGLDGLRPQILKDLVSQRTGEAGAQLVKSLTNLCNFMVAGKVPLEICTFIYGASLTALTKKSGGIRPIAVGCTYRRLVSKLGVRVMNDVFKDYFSPIQVGFNVKNGAEAGAHAARRFFTHPHNSPKAFLKIDFKNAFNMLDRGKLLSSVHEMVPALYPYINQCYRFTSSLVWNSSLIDSSRGVQQGDPLGPPLFCLSLHPVIMNLGSDLNMWYLDDGTLGGNPDTVLEDFKHIISGAEKVGLELNYDKCEISVLGPQTNTIDILSSFQEVAPGISVMTQENAELLGAPLTFESIESIFRKKIKAFNNMVDRLHCIPNHIAYYLLKHSLAIPRLIYLLRAAPIFKSPHLLDEFDSLLHNALEQIINCQIDFPSLEEFSVPVKLGGIGIRQSKTLATPCFLASSFATTDLVSAILPSYVTALSDSLVTEAQDLWKTISVSEIPSDTIASMQSAWEIPIFSRISSHILDSSNTPINTARILASRSSETGAWLQALPSRNLGTLLDDNTFRIAMGLRLGLKLCFPHKCGKCGSQVGELGLHGLSCTNSAGRHPRHTQANDIIRRALISADIPAIREPKGCCRTDGKRPDGLTLIPYKKGRSLIWDFTCNDTYAHSYISQTQTHAGTASTLAEKNKHKLYAELEEKYIFVPVAVETSGVWGAEGLKFIKEVGRKIQDTTGQPMSTTYLIQRISMAVQRGNAASIMGTIPDSKGLEELFHVLQEVSNNKGPNGDVDRQLSTSSSGFPISPSLGFPSALLAN

SEQ ID NO: 23028 - protein, 1320 aa, Folsomia candida
MPLFKSLDIWKYVNLTLLPPLPPSSSSPPLPPSSSPLPPSSSPLPPSSSPLPPSSSPLPPSSSPLPPSSSPLPPSSSPLPPSSSPLPPSSSPLPPSSSPLPPSSSPLPPSSSPLPPSSSPLPPPSSSSSRPHPGPRKKRNKQKKRTGPRKCPPPTSSRPLPHTTEGLNPVSDDLFCPVSGCPGPSSSATDEWIECSACLLWYHTSCLLLQAIPEDDWFCANCPQIHTQIGPQVNSNTPSPANQSTLGTHSQIIQSSPCTNPRASQPISTLSTPLSNFISSKATCTSLTLEWLNNNIVPGGIIEKNLLHEAYRQDSLGIFKPLNDAEIGKLIKNSFSNIRTKRLRTEFHGASKYHYVGIQLKSEQVPETVFDFKSIISSLRQNCPTLKQCPKACRIPVAQSIKSAIDKCITENTPEAWHLLLTFPYVTLQCDSRANIKNGQSLNKIRNNLSIFESLDKNTYQDYLISLSSKNSVFDKSGSKINDIGPKVISKVSEGNIRGAIRLLTSDDVVAPNSSATLDTLVEKHPQKSLDNFTVLDEPNIPPFTTTTEQVISAIFSFPSGSAGGLDALRPQILKDLVSQHTGDVGTQLLESLTKFCNFMLAGKVPLDICPFIYGASLTALKKKSGGIRPIAVGCTYRRIVSKICVKVMNHVFQDYFSPVQVGFNVKNGAEAGAHAARRFFSFPHQSPTAFLKIDFKNAFNMVDRGKLLSSVHELVPTLYPYINQCYRFSSSLVWNSSLIDSCRGVQQGDPLGPPLFCLTLHPVISNLGSEFNMWYLDDGTLGGNPTTVLDDFQHIISCANEVGLELNFDKCEVSVLGPQTNTQCILESFQSVAPGISCMTQENAELLGAPLTLESIEHVFRKKIHAFTNMAGRLHSIPSHIAYYLLKHSLAIPRLVYLLRAAPIFKSPHLLEEFDSLLHNALEQITNCQINPLSLEEIALPIKLGGLGIRQSKTLATPCFLASSFATTDLVSLILPSYVTALSDSLVTEAQDLWKSISCEELPRSTITSFQSSWESPIFNYVSSRILESSTTPINTARILASRSKESGAWLQALPSRNLGTLLDDNSFRIAIGLRLGLNLCFPHKCVCGAQVDELGLHGLSCKKSAGRHSRHTQANDIIKRALISADIPSIREPLGCCRTDGKRPDGLTLIPYKQGRSLIWDFTCTDTFAPSYLSHTLRHAGTAAKLAETKKHKLYSELKTNYIFVPVAIETSGVWGTEGLKFIQDVGRRMKDVTGPMSTTFLIQRISLAVQRGNAASIMGAVPSQRGLEELFYILNDRSFYLQKSCKGPNGDLGRLSGSSKGFPNPPTSGFSSTPQAN

SEQ ID NO: 23029 - protein, 721 aa, Folsomia candida
MLAGKVPLDICPFIYGASLTALKKKSGGIRPIAVGCTYRRIVSKICVKVMNHVFQDYFSPVQVGFNVKNGAEAGAHAARRFFSFPHQSPTAFLKIDFKNAFNMVDRGKLLSSVHELVPTLYPYINQCYRFSSSLVWNSSLIDSCRGVQQGDPLGPPLFCLTLHPVISNLGSEFNMWYLDDGTLGGNPTTVLDDFQHIISCANEVGLELNFDKCEVSVLGPQTNTQCILESFQSVAPGISCMTQENAELLSAPLTLESIEHVFRKKIHAFTNMAGRLHSIPSHIAYYLLKHSLAIPRLVYLLRAAPIFKSPHLLEEFDSLLHNALEQITNCQINPLSLKEIALPIKLGGLGIRQSETLATPCFLASSFATTDLVSLILPSYVTALSDSLVTEAQDLWKSISCEELPRSTITSFQSSWESPIFNYVSSRILESSTTPINTARILASRSKESGAWLQALPSRNLGTLLDDNSFRIAIGLRLGLNLCFPHKCVCGAQVDEHGLHGLSCKKSAGRHSRHTQANDIIKRALIFADIPSIREPLGCYRTDGKRPDGLTLIPYKQGRSLIWDFTCTDTFAPSYLSHTLRHAGTAAKLAETKKHKLYSELKTNYIFVPVAIKTSGVCGTEGLKFIQDVGRRMKDVTGPMSTTFLIQRISLAVQRGNAASIMGAVPSQRGLEELFYILNDRSFYLQKSCKGPNGDLGRLSGSSKGFPNPPTSGFSSTPQAN

SEQ ID NO: 23030 - protein, 995 aa, Folsomia candida
MGKLIKNSFSNIRTKRIRTELHGTSKYHYVGIQFKSEHSADSVFDFQTIISSLRQNCPTLKQCPKACRIPVAQVLKSAVDKCISENTPEAWHLLLTFPYITLQCESKANIKNGQSLNSKIRNNLSIFESLDKNTYQDYLITLSSKNSAHDKPGSTIKDIGPKVISKVSEGNIRGAIRLLTSDDIIAPNSSETLETLVEKHPPQPLDNFTVLDEPNIPPFTTTVEQVISAIFSFPSGSAGGLDALRPQILKDLVSQHTGDVGTQLLESMTKFCNFMLAGKVPLDICPFIYGASLTALKKKSGGIRPIAVGCTYRRIVSKICVKVMNHVFQDYFSPVQVGFNVKNGAEAGAHAARRFFSFPHKSPTAFLKIDFKNAFNMVDRGKLLSSVHELVPTLYPYINQCYRFSSSLVWNSSLIESCRGVQQGDPLGPPLFCLILYPVVSNLGSEFNMWYLDDGTLGGDPTTVLDDFKHIISCANEVGLELNFDKCEVSVLGLQTNTQCILESFQSVAPGISCMTQENAELLGAPLTYESIEHVFRKKINAFSNMAGRLNSIPNHIAYYLLKHSLAIPRLVYLLRVAPIFKSPHLLEEFDSLLHDTLEQITNCQINPLSLEEIALPVKLGGLGIKQSKTLATPCFLASSFATTDLVSLILPSYVTALSDSLVTEAQDLWKSISCDELPRSTISSIQSSWEIPIFNQVCSRILDSSTTPINTARILASRSKESGAWLQALPSRNLGTLLDDNSFRIAIGLRLGLKLCFPHKCVCGTQIDELGLHGLSCKKSAGRHSRHTQCNDIIKRALISADIPSIREPLGCCRTDGKRPDGLTLIPYKQGRSLIWDFTCTDTFAPSYLSHTLRHAGTAAKLAETKKHKLYSELEKQYIFVPVAVETSGVWGMEGLKFIQDVGRRMKDVTGPMSTTFLIQRISLAVQRGNAASIMGAVPSQRGLEELFYILNDRSFYLQKSCKGPNGDLGRLSGSSKGFPNPPTSGFSSTPQAN

SEQ ID NO: 23031 - protein, 1236 aa, Folsomia candida
MPLFKSLDIWKYVNLTLLPPLPPSSSSPPLPPSSSPLPPPSSSSSRPHPGPRKKRNKQKKRTGPRKCPPPTSSRPLPHTTEGLNPVSDDLFCPVSGCPGPSSSATDEWIECSACLLWYHTSCLLLQAIPEDDWFCANCPQIHTQIGPQVNSNTPSPANQSTLGTHSQIIQSSPCTNPRASQPISTLSTPLSNFISSKATCTSLTLEWLNNNIVPGGIIEKNLLHEAYRQDSLGIFKPLNDAEIGKLIKNSFSNIRTKRLRTEFHGASKYHYVGIQLKSEQVPETVFDFKSIISSLRQNCPTLKQCPKACRIPVAQSIKSAIDKCITENTPEAWHLLLTFPYVTLQCDSRANIKNGQSLNNKIRNNLSIFESLDKNTYQDYLISLSSKNSVFDKSGSKINDIGPKVISKVSEGNIRGAIRLLTSDDVVAPNSSATLDTLVEKHPQQSLDNFTVLDEPNIPPFTTTTEQVISAIFSFPSGSAGGLDALRPQILKDLVSQHTGDVGTQLLESLTKFCNFMLAGKVPLDICPFIYGASLTALKKKSGGIRPIAVGCTYRRIVSKICVKVMNHVFQDYFSPVQVGFNVKNGAEAGAHAARRFFSFPHQSPTAFLKIDFKNAFNMVDRGKLEIGNELVPTLYPYINQCYRFSSSLVWNSSLIDSCRGVQQGDPLGPPLFCLTLHPVISNLGSEFNMWYLDDGTLGGNPTTVLDDFQHIISCANEVGLELNFDKCEVSVLGPQTNTQCILESFQSVAPGISCMTQENAELLGAPLTLESIEHVFRKKIHAFTNMAGRLHSIPSHIAYYLLKHSLAIPRLVYLLRAAPIFKSPHLLEEFDSLLHNALEQITNCQINPLSLEEIALPIKLGGLGIRQSKTLATPCFLASSFATTDLVSLILPSYVTALSDSLVTEAQDLWKSISCEELPRSTITSFQSSWESPIFNYVSSRILESSTTPINTARILASRSKESGAWLQALPSRNLGTLLDDNSFRIAIGLRLGLNLCFPHKCVCGAQVDELGLHGLSCKKSAGRHSRHTQANDIIKRALISADIPSIREPLGCCRTDGKRPDGLTLIPYKQGRSLIWDFTCTDTFAPSYLSHTLRHAGTAAKLAETKKHKLYSELEKQYIFVPVAVETSGVWGTEGLKFIQDVGRRMKDVTGPMSTTFLIQRISLAVQRGNAASIMGAVPSQRGLEELFYILNDRSFYLQKSCKGPNGDLGRLSGSSKGFPNPPTSGFSSTPQAN

SEQ ID NO: 23032 - protein, 721 aa, Folsomia candida
MLAGKVPLDICPFIYGASLTALKKKSGGIRPIAVGCTYRRIVSKICVKVMNHVFQDYFSPVQVGFNVKNGAEAGAHAARRFFSFPHQSPTAFLKIDFKNAFNMVDRGKLLSSVHELVPTLHPYINQCYRFSSSLVWNSSLIDSCRGVQQGDPLGPPLFCLTLHPVISNLGSEFNMWYLDDGTLGGNPTTVLDDFQHIISCANEVGLELNFDKCEVSVLGPQTNTQCILESFQSVAPGISCMTQENAELLGAPLTLESIEHVFRKKIHAFTNMAGRLHSIPSHIAYYLLKHSLAIPRLVYLLRAAPIFKSLHLLEEFDSLLHNALEEITNCQINPLSLEEIALPIKLGGLGIRQSKTLATPCFLASSFATTDLVSLILPSYVTALSDSLVTEAQDLWKSISCEELPRSTITSFQSSWESPIFNYVSSRILESSTTPINTARILASRSKESGAWLQALPSRNLGTLLDDNSFRIAIGLRLGLNLCFPHKCVCGAQVDELGLHGLSCKKSAGRHSRHTQANDIIKRALISAGIPSIREPVGCCRTDGKRPDGLTLIPYKQGRSLIWDFTCTDTFAPSYLSHTLRHAGTAAKLAETKKHKLYSELKTNYIFVPVAIETSGVWGTEGLKFIQDVGRRMKDVTGPMSTTFLIQRISLAVQRGNAASIMGAVPSQRGLEELFYILNDRSFYLQKSCKGPNGDLGRLSGSSKGFPNPPTSGFSSTPQAN

SEQ ID NO: 23033 - protein, 1251 aa, Folsomia candida
MPLFKSLDIWKYVNLTLLPPLPPSSSSPPLPPSSSPLPPSSSPLPPSSSPLPPTSSSSSRPHPGPRKKRNKQKKRTGPRKCPPPTSSRPLPHTTEGLNPVSDDLFCPVSGCPGPSSSATDEWIECSACLLWYHTSCLLLQAIPEDDWFCANCPQIHTQIGPQVNSNTPSPANQSTLGTHSQIIQSSPCTNPRASQPISTLSTPLSNFISSKATCTSLTLEWLNNNIVPGGIIEKNLLHEAYRQDSLGIFKPLNDAEIGKLIKNSFSNIRTKRLRTEFHGASKYHYVGIQLKSEQVPETVFDFKSIISSLRQNCPTLKQCPKACRIPVAQSIKSAIDKCITENTPEAWHLLLTFPYVTLQCDSRANIKNGQSLNNKIRNNLSIFESLDKNTYQDYLISLSSKNSVFDKSGSKINDIGPKVISKVSEGNIRGAIRLLTSDDVVAPNSSATLDTLVEKHPQQSLDNFTVLDEPNIPPFTTTTEQVISAIFSFPSGSAGGLDALRPQILKDLVSQHTGDVGTQLLESLTKFCNFMLAGKVPLDICPFIYGASLTALKKKSGGIRPIAVGCTYRRIVSKICVKVMNHVFQDYFSPVQVGFNVKNGAEAGAHAARRFFSFPHQSPTAFLKIDFKNAFNMVDRGKLLSSVHELVPTLYPYINQCYRFSSSLVWNSPLIDSCRGVQQGDPLGPPLFCLTLHPVISNLGSEFNMWYLDDGTLGGNPTTVLDDFQHIISCANEVGLELNFDKCEVSVLGPQTNTQCILESFQSVAPGISCMTQENAELLGAPLTLESIEHVFRKKIHAFTNMAGRLHSIPSHIAYYLLKHSLAIPRLVYLLRAAPIFKSPHLLEEFDSLLHNALEQITNCQINPLSLEEIALPIKLGGLGIRQSKTLATPCFLASSFATTDLVSLILPSYVTALSDSLVTEAQDLWKSISCEELPRSTITSFQSSWESPIFNYVSSRILESSTTPINTARILASRSKESGAWLQALPSRNLGTLLDDNSFRIAIGLRLGLNLCFPHKCVCGAQVDELGLHGLSCKKSAGRHSRHTQANDIIKRALISADIPSIREPLGCCRTDGKRPDGLTLIPYKQGRSLIWDFTCTDTFAPSYLSHTLRHAGTAAKLAETKKHKLYSELKTNYIFVPVAIETSGVWGTEGLKFIQDVGRRMKDVTGPMSTTFLIQRISLAVQRGNAASIMGAVPSQRGLEELFYILNDRSFYLQKSCKGPNGDLGRLSGSSKGFPNPPTSGFSSTPQAN

SEQ ID NO: 23034 - protein, 1510 aa, Folsomia candida
MHNQDYLTLYQSIGRLTLPSDDEDEDSFSTYTNQFYASLASSSQLPVLLDTSRQTTMPLFKSLDIWKYVNLTLLPPLPPSSSSPPLPPSSSPLPPSSSPLPPSSSPLPPSSSPLPPSSSPLPPSSSPLPPSSSPLPPSSSPLPPSSSPLPPSSSPLPPSSSPLPPSSSPLPPSSSPLPPSSSPLPPSSSPLPPSSSPLPPSSSPLPPSSSPLPPSSSPLPPSSSPLPPSSSPLPPSSSPLPPSSSPLPPSSSPLPPSSSPLPPSSSPLPPSSSPLPPSSSPLPPSSSPLPPSSSPLPPSSSPLPPSSSPLPPPSSSSPRPHPGPRKKRNKQKKRTGPRKCPPPTSSRPLPHTTEGLNPVSDDLFCPVSGCPGPSSSATDEWIECSACLLWYHTSCLLLQAIPEDDWFCANCPQIHTQIGPQVNSNTPSPANQSTLGTHSQITQSSPCTNPRASQPISTLSTPLSNFISSKATCTSLTLEWLNNNIVPGGIIEKNLLHEAYRQDSLGIFKPLNDAEIGKLIKNSFSNIRTKRLRTEFHGASKYHYVGIQLKSEQVPETVFDFKSIISSLRQNCPTLKQCPKACRIPVAQSIKSAIDKCITENTPEAWHLLLTFPYVTLQCDSRANIKNGQSLNNKIRNNLSIFESLDKNTYQDYLISLSSKNSVFDKSGSKINDIGPKVISKVSEGNIRGAIRLLTSDDVVAPNSSATLDTLVEKHPQQSLDNFTVLDEPNIPPFTTTTEQVISAIFSFPSGSAGGLDALRPQILKDLVSQHTGDVGTQLLESLTKFCNFMLAGKVPLDICPFIYGASLTALKKKSGGIRPIAVGCTYRRIVSKICVKVMNHVFQDYFSPVQVGFNVKNGAEAGAHAARRFFSFPHQSPTAFLKIDFKNAFNMVDRGKLLSSVHELVPTLYPYINQCYRFSSSLVWNSPLIDSCRGVQQGDPLGPPLFCLTLHPVISNLGSEFNMWYLDDGTLGGNPTTVLDDFQHIISCANEVGLELNFDKCEVSVLGPQTNTQCILESFQSVAPGISCMTQENAELLGAPLTLESIEHVFRKKIHAFTNMAGRLHSIPSHIAYYLLKHSLAIPRLVYLLRAAPIFKSPHLLEEFDSLLHNALEQITNCQINPLSLEKIALPIKLGGLGIRQSKTLATPCFLASSFATTDLVSLILPSYVTALSDSLVTEAQDLWKSISCEELPRSTITSFQSSWESPIFNYVSSRILESSTTPINTARILASRSKESGAWLQALPSRNLGTLLDDNSFRIAIGLRLGLNLCFPHKCVCGAQVDELGLHGLSCKKSAGRHSRHTQANDIIKRALISADIPSIREPLGCCTTDGKRPDGLTLIPYKQGRSLIWDFTCTDTFAPSYLSHTLRHAGTAAKLAETKKHKLYSELKTNYIFVPVAIETSGVWGTEGLKFIQDVGRRMKDVTGPMSTTFLIQRISLAVQRGNAQSIMGAVPSQRGLEELFYILNHRSFYLQKSCKGPNGDLGRLSGSSKGFPNPPTSGFSSTPQAN

SEQ ID NO: 23035 - protein, 995 aa, Folsomia candida
MGKLIKNSFSNIRTKRFRTELHSTSKYHYVGIQFKSEHSADSVFDFQTIISSLRQNCPSLKQCPKACRIPVAQVLKSAVDKCISENTPEAWHLLLTFPYITLQCESKANIKNGQSLNSKIRNNLSIFESLDKNTYQDYLITLSSKNSAHDKPGSTIKDIGPKVISKVSEGNIRGAIRLLTSDDIIAPNSSETLETLVEKHPPQPLDNFTVLDEPNIPPFTTTVEQVISAIFSFPSGSAGGLDALRPQILKDLVSQHTGDVGTQLLESMTKFCNFMLAGKVPLDICPFIYGASLTALKKKSGGIRPIAVGCTYRRIVSKICVKVMNHVFQDYFSPVQVGFNVKNGAEAGAHAARRFLSFPHKSPTAFLKIDFKNAFNMVDRGKLLSSVHELVPTLYPYINQCYRFSSSLVWNSSLIESCRGVQQGDPLGPPLFCLILHPVVSNLGSEFNMWYLDDGTLGGDPTTVLDDFKHIISCANEVGLELNFDKCEVSVLGLQTNTQCILESFQSVAPGISCMTQENAELLGAPLTYESIEHVFRKKINAFSNMAGRLNSIPNHIAYYLLKHSLAIPRLVYLLRAAPIFKSPHLLEEFDSLLHDTLEQITNCQINPLSLEEIALPVKLGGLGIKQSKTLATPCFLASSFATTDLVSLILPSYVTALSDSLVTEAQDLWKSISCDELPRSTISSIQSSWEIPIFNQVCSRILDSSTTPINTARILASRSKESSAWLQALPSRNLGTLLDDNSFRIAIGLRLGLKLCFPHKCVCGTQIDELGLHGLSCKKSAGRHSRHTQCNDIIKRALISADIPSIREPLGCCRTDGKRPDGLTLIPYKQGRSLIWDFTCTDTFAPSYLSHTLRHAGTAAKLAETKKHKLYSELEKQYIFVPVAVETSGVWGMEGLKFITDVGRRMKDVTGPMSTTFLIQRISLAVQRGNAASIMGAVPSQRGLEELFYILNDRSFYLQKSCKGPNGDLGRLSGSSKGFPNPPTSGFSSTPQAN

SEQ ID NO: 23036 - protein, 1290 aa, Adalia bipunctata
MEFPCVCGKSFGTRKNLKSHQTRHCRGHPPPPEEESTTCHCGNTYTTLTNLRAHQRRFCSREPKQPTSRPEGVDPASHRCPVCPRDFPTYPGMRQHMKRSHPVEYNEDALNEYESRSHRRVWTEEDMEEMAREEAEYGGTELLERLALIANRSKEAVRKRRQRADYQELVERFKSERNSRSNLPTSRRPPSSNPGPPTPRVETISTPSAASAAAASRLQTPCRAPSATPSTSRDFPSTSYPGMRQQMRRLHPIGHSEEDLNEHEPRPHRRVWTEEDMEEMAREEAEYGGTELLERLALITNRTKEAVRKRRQRTDYEELVKRFKSERNNRSSPPSSNPGPATPRTKTLSTPSAASVASALLLRAPYRAPSATPPTSRLGVLSTPLAACAATSPLGRVSDVASYVTPSTAAPATNPGSIPQEEIIHPDNTILDMDLQNLDPIKKHLIELSPELEEIQDIELSKSVCLMEPGFRNTIDQWTENLANTYARPRKKTPERRAIPTPPPNMSKKKMRIYEYRRIQARYSENKKQLAQELISGTSGAGREAGLGPSTEEIREQFLRIQGTTSGDDHPLIDLGRETIDVYKPISKTEVEGMIQNCPKTAPGPDGITWAKVARIPAVRLELLYNIMLYTQYVPKCLKLSRTTLIPKNSGDRDKMSGWRPITVTSILLRLLNRLIAERLAVLPLNSNQRGFSDIDGCLANNLTIQTIIKRKRRAGQGFVLITLDLEKAFDTVSHQSVERALRRLNVDPKTSNYIINNLSDCETSITCQGRNIVGMPIRRGLKQGDPLSPILFNSVMDELLDELSSQRGLTLGDFRASALAYADDLILMADRVDSAQRLLKTTTNFLERRGLQLNVPKCESVVLRTLPSKKKVFTVTTPLFYIQGQPIRPVGVEETFRYLGQRFSTAGAIECDTSKLKEQLARISRAPLKPQQKLTIIKSHLVPIYIHAMQSPSINQKTLKEVDRQIRIVVKRILHLPLHIIDEYLYSPAKMGGLGLFSFRKKIPLILNQRCTRLSDRSESFAAVLGEAWEWTARLRRMIRPDETTKEQVNRRNGIALEQSFYGGGTMQFQNDAASNHLIDNPPKYWSGQDYIKTIHLRGNCLPTRGLPYNPPEERQCRAGCGRVESLSHVLQKCPLGHTKRIQRHNFVAQRIKTMALKKGWIVEEEPNIRDARGVLKKPDLIISNDVRVIVVDVSVSWETPRDLGETYDCKRMVYDQPEFVQVLETRYQGKEIQILPFIIGARGMWCRQSSNTLDQLGINSTGNRRELVQTTIRGSWYIHQDFSRRCWG

SEQ ID NO: 23037 - protein, 1005 aa, Tinea trinotella
MSTACLCGILVLGTTQDAPDVLCTGCGIWLHSGCAKVSIVEITVDNWLCQTCVDAEASQTQSQTYVSPHVECPVCHKNNLKGSRGLRIHYARMHKGVPLPTDTLIDLASSGNSHISFEEFIRDHRQNCKVLKRIPKGARHQAATKLCQLIASCIHNDSIQAWQNLFLFSYTALRIPQNKGSKVSLTTAIKENITNFNTFGIPEDQQIKRHTNITKRIESKVADGDVRGAVRLLFSNDEFAPNNESTLESLRAKHPIPSRPLLFPHPDPDNNNIKVSPNEIIAAIRSFPNGSSGGLDGLRPQILKDLISFSAGAAGPRLVDHLCGLTNIMLAGSVNNDFTRFLYGASLCALEKKDGGLRPLAVGNVIRRIASKIACKNVSDSLASHLKPIQIGFAVPNGCEAAVHATRQFIQSSQMSPRIILKIDYKNAFNSVERDCMLNEIKNTCPNVFNYMYQCYHTPSALFFNDKIIESKVGCQQGDLMGPAAFSLSIHPIISKLSSELNVWYLDDGTIGGDPIGGGTVLSDFQSIISDSQAIGLEVNPSKCELFFLSEPRDSVIKSFQSVAPGIRVLNSNNMTLLGTYLTDSGIPTALNEKFDKLKLATRRLEDIDSNIAFYLLKNCLAAPKFIYSLRTTPCWDSEILSDIDNHLKITLETILNISLTCVQFTQASLPVKFSGLGIRKISDLTVPAYLCSINSTKSLCTTILSKTSCNIDKFHREEEALALWKTLSSEDLPPVSPSLKTSQKDWDRPITIKIYNSLPRLSITEEARLRASCVSEAGAWLRAIPSPYTGTLLDASTLRIAAALRLGCKVSGQHICFCGDNADELGRHVLCCQKSAGRISRHHAINHILSRALTTANIPCILEPSGIVRNDGRRPDGMSLIPYTRGRALVWDATCVDTLCQSHVTSSHKKPGAAAESAARLKRNKYAEIIINHHFIPFAVETMGPWSEEALVFSRELGEKLYLATGDPLSREYLVQRVSLAVQRGNAASVLGTLCPSNSRNFIY

SEQ ID NO: 23038 - protein, 976 aa, Blastobasis lacticolella
MYQLTVNCVSVSVFVYIVYQFIFLHMSQVPSAQPSSLANWIRCPRCPQPHLCKGQRGLNIHIGKAHKDRCALTASVPLPGPVPTATAAVPLKPFWERVSDFKTTKRVVKRIPRGARVAVAQTLARDIQIATTKNDTHSWEHLLTFPYRILHVEDSEPNNANSLTSCIKNNCLHPVSPITVNGRRFSSYPSIFQHVENKISDGDIKGAARILFSSDTFAPDTPETLAGLRSKHPVPSADLRLPDAPSAADPALQISADAVRQAVYSFPNGSAGGIDGLTPQHLKDLLSCAGEAEDILLNAITWLLNLMLSGAVVSSVIDTLYGANLIALNKKDGGIRPIAVGTTYRRLTAKLCCRFAAPSLKDYFQPLQLGFGTKGGCEATVHALRTSLMNDGGEVLLKVDVKNAFNSVDRGALLEQIRTKLPAAYKFLWQCYKEPTNLVHKGHLLHSAVGCQQGDPLGPAIFSLAIHPIIEKLNSKFNVFLDDGTLGGEASPVLRDLQLLIREFSAIGMELNFSKCELFISESCPTPGAICTAFSALAPNITVIGKSSLHLLGSPIFDDSFQNFVDKKIQNFNDVSDRLLQINSHMAYVIIRYCLFVPKFMFVLRCCQLWKHPALLEFLDNTVKQTLCSVININFDNSSWDQASLPIRYGGLGIRKVSNVSLPAFLSSVNSSQSLVNKILSKLGTFESAFSTEAKNAWQLACPESDLPANPCSQRLWDEPLCRLVRNNLLSASTNSAERARLLAAGEWESGLWLQAMPSKNIGTLLDRATFRIATALRLGAPCSAPHQCRCGRPVDQLGHHGLSCGRSAGRIPRHAELNDVIRRAFTTAGAPAVLEPIGLARNDGKRPDSTPWKLGRPLVWDATCIDTLAPSHLPVTACQAATGAAAAENAKRRKYASLSGDYIFAPFGVETLGPWGPGAHSLFRELSKRLVQITNHQKAGLFLGQRLSLAIQRGNAASLLGTFPNSGDLGQVFYI

SEQ ID NO: 23039 - protein, 1001 aa, Blastobasis lacticolella
MSQDANDARSRSLQNLIRCPRCPQPLFFKGQRGLNIHIGKSHKDRSILIASVPSSAPIPSAPVSDPLVPLKPFWERVAHLKTSKRILKRIPRGARIAVAQALARDIQRATAKNDKESWEHLLTFPFRILHVEDTGPNTFLNSLTASIKKNCLNPLTLNNSNSHTRYTPTQNVLQHVENKINDGDIKGAARILFSNDTFAPDTPETLADLHSKHPQPPADLQLPDAPSAADSALHVSADAVRQAVFSFPTGSAGGIDGLTPQHLKDLLSCAGEAGDILLNSITGLTNMMLLGAVDSSVVDTLYGANLIALKKKDGGIRPIAVGTTYRRLTAKLCCRFSAPSLKEYFQPIQLGYGSKGGCEAAVHALRTFLQHNGGEVLLKVDVKNAFNSVDRGALLNQVKSKMPAAYNFLWQCYEQPTNLIHKGHLLNSAVGCQQGDPLGPAIFSLAIHPIVEKLNSKLNVWYLDDGTLGGDATTVLQDLQLLIREFSAIGLDLNFSKCELYISESCPSARAVLQAFCAQAPNITVVDKTNLHLLGSPIFDESLKYFVDHKIQNFNSIADRLLKINSHMAFAIIRYCLFVPKFMYVLRCCQLWKHPVLLELLDNTVKQTLTSVLNINLENSSWEQASLPIRYGGLGVRKMSSVSLPAFLSSVHSSQSLVDKLLSKLGTFPSAFSTEAKIAWQLACPEAEPTNSYSQRLWDEPLCRSARNKLLNATTNSAERARLLAAGEWESGLWLQAMPSKNIGTLLDRATFRIATALRLGAPCSAPHDCHCGRPVDQLGHHGLSCSRSAGRIPRHADLNDVIRRAFASAGAPAVLEPNGLARDDGKRPDGMTLTPWKLGRPLVWDATCIDTLASSHLPATACQAGAGAASAENAKRRKYACLSGDYIFAPFGVETLGPHSDSDLKKRGNSKKRHNFDKKKLLPIGNLIYNNICYVKFFYKLCLTWSKIIKKKKMYGGISFFEFFLKPLKVLKLKPFLYYYIQLCLRPRKEIFCIYLQLWL

SEQ ID NO: 23040 - protein, 962 aa, Blastobasis lacticolella
MSQDANDARSRSLQNLIRCPRCPQPLFFKGQRGLNIHIGKSHKDRSILIASVPSSAPIPSAPVSDPLVPLKPFWERVAHLKTSKRILKRIPRGARIAVAQALARDIQRATAKNDKESWEHLLTFPFRILHVEDTGPNTFLNSLTASIKKNCLNPLTLNNSNSHTRYTPTQNVLQHVENKINDGDIKGAARILFSNDTFAPDTPETLADLHSKHPQPPADLQLPDAPSAADSTLHVSADAVRQAVFSFPTGSAGGIDGLTPQHLKDLLSCAGEAGDILLNSITGLTNMMLLGAVDSSVVDTLYGANLIALKKKDGGIRPIAVGTTYRRLTAKLCCRFSAPSLKEYFQPIQLGYGSKGGCEAAVHALRTFLQHNGGEVLLKVDVKNAFNSVDRGALLNQVKSKMPAAYNFLWQCYEQPTNLIHKGHLLNSAVGCQQGDPLGPAIFSLAIHPIVEKLNSKLNVWYLDDGTLGGDATTVLQDLQLLIREFSAIGLDLNFSKCELYISESCPSARAVLQAFCAQAPNITVVDKTNLHLLGSPIFDESLKYFVDHKIQNFNSIADRLLKINSHMAFAIIRYCLFVPKFMYVLRCCQLWKHPVLLELLDNTVKQTLTSVLNINLENSSWEQASLPIRYGGLGVRKMSSVSLPAFLSSVHSSQSLVDKLLSKLGTFPSAFSTEAKIAWQLACPEAEPTNSYSQRLWDEPLCRLARNKLLNATTNSAERARLLAAGEWESGLWLQAMPSKNIGTLLDRATFRIATALRLGAPCSAPHDCHCGRPVDQLGHHGLSCSRSAGRIPRHADLNDVIRRAFASAGAPAVLEPNGLARDDGKRPDGMTLTPWKLGRPLVWDATCIDTLASSHLPATACQAGAGAASAENAKRRKYACLSGDYIFAPFGVETLGPWGPGAHSLYRELAKRLVDISKDQKAGLYLGQRISLAIQRGNAASLLGTFPYSGDLGQIFYLFK

SEQ ID NO: 23041 - protein, 962 aa, Blastobasis lacticolella
MSQDANDARSRSLQNLIRCPRCPQPLFFKGQRGLNIHIGKSHKDRSILIASVPSSAPIPSAPVSDPLVPLKPFWERVAHLKTSKRILKRIPRGARIAVAQALARDIQRATAKNDKESWEHLLTFPFRILHVEDTGPNTFLNSLTASIKKNCLNPLTLNNSNSHTRYTPTQNVLQHVENKINDGDIKGAARILFSNDTFAPDTPETLAGLHSKHPQPPADLQLPDAPSAADSALHVSADAVRQAVFSFPTGSAGGIDGLTPQHLKDLLSCAGEAGDILLNSITGLTNMMLLGAVDSSVVDTLYGANLIALKKKDGGIRPIAVGTTYRRLTAKLCCRFSAPSLKEYFQPIQLGYGSKGGCEAAVHALRTFLQHNGGEVLLKVDVKNAFNSVDRGALLNQVKSKMPAAYNFLWQCYEQPTNLIHKGHLLNSAVGCQQGDPLGPAIFSLAIHPIVEKLNSKLNVWYLDDGTLGGDATTVLQDLQLLIREFSAIGLDLNFSKCELYISESCPSARAVLQAFCAQAPNITVVDKTNLHLLGSPIFDESLKYFVDHKIQNFNSIADRLLKINSHMAFAIIRYCLFVPKFMYVLRCCQLWKHPVLLELLDNTVKQTLTSVLNINLENSSWEQASLPIRYGGLGVRKMSSVSLPAFLSSVHSSQSLVDKLLSKLGTFPSAFSTEAKIAWQLACPEAEPTNSYSQRLWDEPLCRLARNKLLNATTNSAERARLLAAGEWESGLWLQAMPSKNIGTLLDRATFRIATALRLGAPCSAPHDCHCGRPVDQLGHHGLSCSRSAGRIPRHADLNDVIRRAFASAGAPAVLEPNGLARDDGKRPDGMTLTPWKLGRPLVWDATCIDTLASSHLPATACQAGAGAASAENAKRRKYACLSGDYIFAPFGVETLGPWGPGAHSLYRELAKRLVDISKDQKAGLYLGQRISLAIQRGNAASLLGTFPYSGDLGQIFYLFK

SEQ ID NO: 23042 - protein, 962 aa, Blastobasis lacticolella
MSQDANDARSRSLQNLIRCPRCPQPLFFKGQRGLNIHIGKSHKDRSILIASVPSSAPIPSAPVSDPLVPLKPFWERVAHLKTSKRILKRIPRGARIAVAQALARDIQRATAKNDKESWEHLLTFPFRILHVEDTGPNTFLNSLTASIKKNCLNPLTLNNSNSHTRYTPTQNVLQHVENKINDGDIKGAARILFSNDTFAPDTPETLADLHSKHPQPPADLQLPDAPSAADSALHVSADAVRQAVFSFPTGSAGGIDGLTPQHLKDLLSCAGEAGDILLNSITGLTNMMLLGAVDSSVVDTLYGANLIALKKKDGGIRPIAVGTTYRRLTAKLCCRFSAPSLKEYFQPIQLGYGSKGGCEAAVHALRTFLQHNGGEVLLKVDVKNAFNSVDRGALLHQVKSKMPAAYNFLWQCYEQPTNLIHKGHLLNSAVGCQQGDPLGPAIFSLAIHPIVEKLNSKLNVWYLDDGTLGGDATTVLQDLQLLIREFSAIGLDLNFSKCELYISESCPSARAVLQAFCAQAPNITVVDKTNLHLLGSPIFDESLKYFVDHKIQNFNSIADRLLKINSHMAFAIIRYCLFVPKFMYVLRCCQLWKHPVLLELLDNTVKQTLTSVLNINLENSSWEQASLPIRYGGLGVRKMSSVSLPAFLSSVHSSQSLVDKLLSKLGTFPSAFSTEAKIAWQLACPEAEPTNSYSQRLWDEPLCRLARNKLLNATTNSAERARLLAAGEWESGLWLQAMPSKNIGTLLDRATFRIATALRLGAPCSAPHDCHCGRPVDQLGHHGLSCSRSAGRIPRHADLNDVIRRAFASAGAPAVLEPNGLARDDGKRPDGMTLTPWKLGRPLVWDATCIDTLASSHLPATACQAGAGAASAENAKRRKYACLSGDYIFAPFGVETLGPWGPGAHSLYRELAKRLVDISKDQKAGLYLGQRISLAIQRGNAASLLGTFPYSGDLGQIFYLFK

SEQ ID NO: 23043 - protein, 931 aa, Blastobasis lacticolella
MDYYYYYYKSHKDRSILIASVPSSAPIPSAPVSDPLVPLKPFWERVAHLKTSKRILKRIPRGARIAVAQALARDIQRATAKNDKESWEHLLTFPFRILHVEDTGPNTFLNSLTASIKKNCLNPLTLNNSNSHTRYTPTQNVLQHVENKINDGDIKGAARILFSNDTFAPDTPETLADLHSKHPQPPADLQLPDAPSAADSALHVSADAVRQAVFSFPTGSAGGIDGLTPQHLKDLLSCAGEAGDILLNSITGLTNMMLSGAVDSSVVDTLYGANLIALKKKDGGIRPIAVGTTYRRLTAKLCCRFSAPSLKEYFQPIQLGYGSKGGCEAAVHALRTFLQHNGGEVLLKVDVKNAFNSVDRGALLNQVKSKMPAAYNFLWQCYEQPTNLIHKGHLLNSAVGCQQGDPLGPAIFSLAIHPIVEKLNSKLNVWYLDDGTLGGDATTVLQDLQLLIREFSAIGLDLNFSKCELYISESCPSARAVLQAFCAQAPNITVVDKTNLHLLGSPIFDESLKYFVDHKIQNFNSIADRLLKINSHMAFAIIRYCLFVPKFMYVLRCCQLWKHPVLLELLDNTVKQTLTSVLNINLENSSWEQASLPIRYGGLGVRKMSSVSLPAFLSSVHSSQSLVDKLLSKLGTFPSAFSTEAKIAWQLACPEAEPTNSYSQRLWDEPLCRLARNKLLNATTNSAERARLLAAGEWESGLWLQAMPSKNIGTLLDRATFRIATALRLGAPCSAPHDCHCGRPVDQLGHHGLSCSRSAGRIPRHADLNDVIRRAFASAGAPAVLEPNGLARDDGKRPDGMTLTPWKLGRPLVWDATCIDTLASSHLPATACQAGAGAASAENAKRRKYACLSGDYIFAPFGVETLGPWGPGAHSLYRELAKRLVDISKDQKAGLYLGQRISLAIQRGNAASVLGTFPYSGDLGQIFYLFK

SEQ ID NO: 23044 - protein, 674 aa, Blastobasis adustella
MLSGSVVSSVVETLYGANLIALNKKDGGIRPIAVGTTYRRLTAKLCCRLSAPNLKEYFQPLQLGFGTNGGCESSVHALRTFLQNEGGEVLLKVDVKNAFNSVDRGALLDQIRKKLPAAYKFLWQCYKEPTNLLHKGHLLHSAVGCQQGDPLGPAIFSLAIHPIIEKLNSKFNVWYLDDGTLGGEASTVLRDLQLLIREFSAIGLELNFSKCELFISESCPTPGAISAAFSALAPNIKVVGKSSLHLLGSPIFDDSLQDFVNQKIQNFNDVSDRLLQINSHMAYVIIRYCLFVPKFMYVLRCCQLWKHPALLELLDNTVKHTLCSVFNINLANSSWDQASLPIRFGGLGIRKVSSVSLPAFLSSVNSSQSLVNKILSKLGTFELAFSTEAKNAWQLACPESEPPANPCSQRLWDEPLCRLVRNNLLSASTNSAERARLLAAGEWESGLWLQALPSKNIGTLLDSATFRLATALRLGAPCSAPHQCRCGRPVDQLSHHGLSCGRSAGRLPRHAELNDVIRRAFTTAGAPAVLEPSGLAREDGKRPDGMTLTPWKLGRPLVWDATCIDTLAPSHLPVTACQVAMGAASAEDAKRRKYANLSGDYIFAPFGVETLGPWGPGAHSLYRELSKRLVEVTNHQKAGLFFGQRLSLAIQRGNAASLLGTFPNSGDLGQIFYL

SEQ ID NO: 23045 - protein, 674 aa, Blastobasis adustella
MLSGSVVSSVVETLYGANLIALNKKDGGIRPIAVGITYRRLTAKLCCRFSAPNLKEYFQPLQLGFGTNGGCESSVHALRTFLQNEGGEVLLKVDVKNAFNSVDRGALLDQIRKKLPAAYKFLWQCYKEPTNLLHKGHLLHSAVGCQQGDPLGPSILSLAIHPIIEKLNSKFNVWYLDDGTLGGEASTVLRDLQLLIREFSAIGLELNFSKCELFISESCPTPGAISAAFSALAPNITVVGKSSLHLLGSPIFDDSLQDYVDQKIQNFNDVSDRLLQINSHMAYVIIRYCLFVPKFMYVLRCCQLWKHPALLELLDNTVKHTLCSVLNINLANSSWDQASLPIRFGGLGIRKVSSVSLPAFLSSVNSSQSLVNKILSKLGTFVLAFSTEAKNAWQLSCPESEPPAYPCSQRLWDEPLCRLVRNNLLSASTNSAERARLLAAGEWESGLWLQALPSKNIGTLLDSATFRLATALRLGAPCSAPHQCRCGRPVDQLGHHGLSCGRSAGRLPRHAELNDVIRRAFTTAGAPAVLEPSGLTREDGKRPDGMTLSPWKLGRPLVWDATCIDTLAPSHLPVTACQVAMGAASAEDAKRRKYANLSGDYIFAPFGVETLGPWGPGAHSLYRELSKRLVEVTNHQKAGLFFGQRLSLAIQRGNAASFLGTFPNSGDLGQIFYL

SEQ ID NO: 23046 - protein, 957 aa, Blastobasis adustella
MSQVPNNAQSSSLANWIRCPRCPQPHLCKGQRGLNIHIGKSHKDRSVLTASAPSSAPVPTASASDSIKLFWERVSELKSTKRVIKRIPRGARVTVAQTLAKDILSATAKNDEQSWEHLLTFPFRILHIEDTAYPNKTNSLTSCIKNNCSNPASLITINDHRFFNYPSISQYVENKISDGDIKGAARILFSSDTFAPDTPETLAGLRSKHPLPSADLRLPDAPSAADPALQVSADAVRQAVFSFPNGSAGGIDALTPQHLKDLLSCAGEAGDILLNAITGLVNLMLSGSVVSSVIETLYGANLIALNKKDGGIRPIAVGTTYRRLTAKLCCRFSAPNLKEYFQPLQLGFGTNGGCESSVHALRTFLQNEGGEVLLKVDVKNAFNSVDRGALLDQIRKKLPATYKFLWQCYKEPTNLLHKGHLLHSAVGCQQGDPLGPAIFSLAIHLIIGKLNSKFNVWYLDDGTLGGEASTVLRDLQLLIREFSAIGLELNFSKCELFISESCPTPGAISAAFSALAPNITVVGKSSLHLLGSPIFDDSLQDFVDQKIQNFNDISDRLLQINSHMAYVIIRYCLFVPKFMYVLRCCQLWKHPALLEFLDNTVKHTLCSVLNINLANSSWDQASLPIRFGGLGIRKVSSVSLPAFLSSVNSSQSLVNKILSKLGTFELAFSTEAKNAWQLACPESEPPANPCSQRLWDEPLCRLVRNNLLSASTNSAERARLIAAGVWESGLWLQALPSKNIGTLLDSATFRLATALRLGAPCSAPHQCRCGRPVDQLGHHGLSCGRSAGRLPRHAELNDVIRRAFTTAGAPAVLEPSGLAREDGKRPDGMTLTPWKLGRPLVWDATCIDTLAPSHLPVTACQVAMGAASAEDAKRRKYANLSGDYIFAPFGVETLGPWGPGAHSLYRELSKRLVAVTNHQKAGLFFGQRLSLAIQRGNAASLLGTFPNSGDLGQIFYL

SEQ ID NO: 23047 - protein, 965 aa, Blastobasis adustella
MSQDTPVSDGSSSAPPPVDWIRCPRCPQPHLCKGQRGLSIHLGKSHKVRGEVTTSSVPSSTPVPLILDGPSTKPFWERVSNLKLSVPIVKRIPRGARVSVAQTLAQDIIRVTSKNDQQSWKHQLTFGFRILHVVDSNNTSCKKSLTTCIKDNCTNPLSFDSANFLSRPHNFRRNSIYQHVENKINDCDIKGAARILFSNDSFAPDTPATLVGLRSKHPQPSVGLLLPDAPDAADSSLQVSADSVRQAVFAFPNGSAGGIDGLTPQHLKDLLCCGGEAGNNLLVAITGLVNLMLSGSVEQSIVSTLYGANLIALKKKDGGIRPIAVGTTYRRLTAKLCCRFSAPSLAEYFQPIQLGFGSKGGCEAAVHALRTFLENNSGEVLLKVDVKNAFNSVDRGALLAQIRSKLPAAYKFLWQCYKESSNLIYKGHLLQSAVGCQQGDPLGPAIFSLVIHPILEKLNSKFNVWYLDDGTLGGDANTVLQDLQLLMREFKAIGLDLNLSKCELYISESCPTASAVSAAFDAIAPNISVVDKTSLHLLGSPIFDESLSDFVKEKIQNFNSVSDRLLQINSHMAYAIIRFCLFVPKFTYVLRCCQLWKHPALLEDLDNAVKHTLISILNINLDNSSWNQASLPIRYGGLGVRKVSGVSLPAFLSSVHSSQSLVQKLLSKLGNFTAAYSTEAKNAWQVACPEAELPTNSCSQRLWDEPLCRLVRNNLLSASTNSAERARLLAAGEWESGLWLQAMPSKNIGTLLDRTTFRIATALRLGAPCSAPHQCHCGHLVDHLGHHGLSCSRSAGRFPRHADLNDIIRRAFTSAGAPAVLEPSGLARNDGRRPDGMTLTPWKLGRPLVWDATCVDTLAQSHLPVTACHAGAGAAAAENAKRRKYASLGEDHIFAPFGVETLGPWGPGAHSLFRELAKRLVDVTKDQKAGLYFGQRISLAIQRGNAASLLGSIPNTVDLGQIFYL

SEQ ID NO: 23048 - protein, 957 aa, Blastobasis adustella
MSQVPNNAQSSSLANWIRCPRCPQPHLCKGQRGLNIHIGKSHKDRSVLTASAPSSAPVPTASASDSIKLFWERVSELKSTKRVIKRIPRGARVTVAQTLAKDILSATAKNDEQSWEHLLTFPFRILHIEDTACPNKINSLTSCIKNNCSNPASLITINDHRFFNYPSISQYVENKISDGDIKGAARILFSSDTFAPDTPETLAGLRSKHPLPSADLRLPDAPSAADPALQVSADAVRQAVFSFPNGSAGGIDALTPQHLKDLLSCAGEAGDILLNAITGLVNLMLSGSVVSSVIETLYGANLIALNKKDGGIRPIAVGTTYRRLTAKLCCRFSAPNLKEYFQPLQLGFGTNGGCESSVHALRTFLQNEGGEVLLKVDVKNAFNSVDRGALLDQIRKKLPATYKFLWQCYKEPTNLLHKGHLLHSAVGCQQGDPLGPAIFSLAIHPIIGKLNSKFNVWYLDDGTLGGEASTVLRDLQLLIREFSAIGLELNFSKCELFISESCPTPGAISAAFSALAPNITVVGKSSLHLLGSPIFDDSLQDFVDQKIQNFNDISDRLLQINSHMAYVIIRYCLFVPKFMYVLRCCQLWKHPALLEFLDNTVKHTLCSVLNINLANSSWDQASLPIRFGGLGIRKVSSVSLPAFLSSVNSSQSLVNKILSKLGTFELAFSTEAKNAWQLACPESEPPANPCSQRLWDEPLCRLVRNNLLSASTNSAERARLIAAGVWESGLWLQALPSKNIGTLLDSATFRLATALRLGAPCSAPHQCRCGRPVDQLGHHGLSCGRSAGRLPRHAELNDVIRRAFTTAGAPAVLEPSGLAREDGKRPDGMTLTPWKLGRPLVWDATCIDTLAPSHLPVTACQVAMGAASAEDAKRRKYANLSGDYIFAPFGVETLGPWGPGAHSLYRELSKRLVAVTNHQKAGLFFGQRLSLAIQRGNAASLLGTFPNSGDLGQIFYL

SEQ ID NO: 23049 - protein, 957 aa, Blastobasis adustella
MSQVPNNAQSSSLANWIRCPRCPQPHLCKGQRGLNIHIGKSHKDRSVLTASAPSSAPVPTASASDSIKLFWERVSELKSTKRVIKRIPRGARVTVAQTLAKDILSATAKNDEQSWEHLLTFPFRILHIEDTACPNKTNSLTSCIKNNCSNPASLITINDHRFFNYPSISQYVENKISDGDIKGAARILFSSDTFAPDTPETLAGLRSKHPLPSADLRLPDAPSAADPALQVSADAVRQAVFSFPNGSAGGIDALTPQHLKDLLSCAGEAGDILLNAITGLVNLMLSGSVVSSVIETLYGANLIALNKKDGGIRPIAVGTTYRRLTAKLCCRFSAPNLKEYFQPLQLGFGTNGGCESSVHALRTFLQNEGGEVLLKVDVKNAFNSVDRGALLDQIRKKLPATYKFLWQCYKEPTNLLHKGHLLHSAVGCQQGDPLGPAIFSLAIHPIIGKLNSKFNVWYLDDGTLGGEASTVLRDLQLLIREFSAIGLELNFSKCELFISESCPTPGAISAAFSALAPNITVVGKSSLHLLGSPIFDDSLQDFVDQKIQNFNDISDRLLQINSHMAYVIIRYCLFVPKFMYVLRCCQLWKHPALLEFLDNTVKHTLCSVLNINLANSSWDQASLPIRFGGLGIRKVSSVSLPAFLSSVNSSQSLVNKILSKLGTFELAFSTEAKNAWQLACPESEPPANPCSQRLWDEPLCRLVRNNLLSASTNSAERARLIAAGVWESGLWLQALPSKNIGTLLDSATFRLATALRLGAPCSAPHQCRCGRPVDQLGHHGLSCGRSAGRLPRHAELNDVIRRAFTTAGAPAVLEPSGLAREDGKRPDGMTLTPWKLGRPLVWDATCIDTLAPSHLPVTACQVAMGAASAEDAKRRKYANLSGDYIFAPFGVETLGPWGPGAHSLYRELSKRLVAVTNHQKAGLFFGQRLSLAIQRGNAASLLGTFPNSGDLDQIFYL

SEQ ID NO: 23050 - protein, 924 aa, Blastobasis adustella
MSQVPNNAQSSSLANWIRCPRCPQPHLCKGQKGLNIHIGKSHRDRSVLTASAPSSAPVPTASASDSIKLFWERVSELKSTKRVIKRIPRGARVTVAQTLAKDILSATAKNDEQSWEHLLTFPFRILHIEDTACQNKTNSLTSCIKNNCSNPASLITINDHRFFNYPSISQYVENKISDGDIKGAARILFSSDTFAPDTPETLAGLRSKHPLPSADLRLPDAPSAADPALQVSADAVRQAVFSFPNGSAGGIDALTPQHLKDLLSCAGEAGDILLNAITGLVNLMLSGSVVSSVIETLYGANLIALNKKDGGIRLIAVGTTYRRLTAKLCCRFSAPNLKEYFQPLQLGFGTNGGCESSVHALRTFLQNEGGEVLLKVDVKNAFNSVDRGALLDQIRKKLPATYKFLWQCYKEPTNLLHKGHLLHSAVGCQQGDPLGPAIFSLAIHPIIGKLNSKFNVWYLDDGTLGGEASTVLRDLQLLIREFSAIGLELNFSKCELFISESCPTPDAISAAFSALAPNITVVGKSSLHLLGSPIFDDSLQDFVDQKIQNFNDISDRLLQINSHMAYVIIRYCLFVPKFMYVLRCCQLWKHPALLEFLDNTVKHTLCSVLNINLANSSWDQASLPIRFGGLGIRKVSSVSLPAFLSSVNSSQSLVNKILSKLGTFELAFSTEAKNAWQLACPESEPPANPCSQRLWDEPLCRLVRNNLLSASTNSAERARLIAAGVWESGLWLQALPSKNIGTLLDGATFRLATALRLGAPCSAPHQCRCGRPVDQLGHHGLSCGRSAGRLPRHAELNDVIRRAFTTAGAPAVLEPSGLAREDGKRPDGMTLTPWKLGRPLVWDATCIDTLAPSHLPVTACQVAMGAASANLSGDYIFAPFGVETLGPWGPGAHSLYRELSKRLVEVTNHQKAGLFFGQRLSLAI

SEQ ID NO: 23051 - protein, 957 aa, Blastobasis adustella
MSQVPNNAQSSSLANWIRCPRCPQPHLCKGQRGLNIHIGKSHKDRSVLTASAPSSAPVPTASASDSIKLFWERVSELKSTKRVIKRIPRGARVTVAQTLAKDILSATAKNDEQSWEHLLTFPFRILHIEDTACPNKTNSLTSCIKNNCSNPASLITINDHRFFNYPSISQYVENKISDGDIKGAARILFSSDTFAPDTPETLAGLRSKHPLPSADLRLPDAPSAADPALQVSADAVRQAVFSFPNGSAGGIDALTPQHLKDLLSCAGEAGDILLNAITGLVNLMLSGSVVSSVIETLYGANLIALNKKDGGIRPIAVGTTYRRLTAKLCCRFSAPNLKEYFQPLQLGFGTNGGCESSVHALRTFLQNEGGEVLLKVDVKNAFNSVDRGALLDQIRKKLPATYKFLWQCYKKPTNLLHKGHLLHSAVGSQQGDPLGPAIFSLAIHPIIGKLNSKFNVWYLDDGTLGGEASTVLRDLQLLIREFSAIGLELNFSKCELFISESCPTPGAISAAFSALAPNITVVGKSSLHLLGSPIFDDSLQDFVDQKIQNFNDISDRLLQINSHMAYVIIRYCLFVPKFMYVLRCCQLWKHPALLEFLDNTVKHTLCSVLNINLANSSWDQASLPIRFGGLGIRKVSSVSLLAFLSSVNSSQSLVNKILSKLGTFELAFSTEAKNAWQLACPESEPPANPCSQRLWDEPLCRLVRNNLLSASTNSAERARLIAAGVWESGLWLQALPSKNIGTLLDSATFRLATALRLGAPCSAPHQCRCGRPVDQLGHHGLSCGRSAGRLPRHAELNDVIRRAFTTAGAPAVLEPSGLAREDGKRPDGMTLTPWKLGRPLVWDATCIDTLAPSHLPVTACQVAMGAASAEDAKRRKYANLSGDYIFAPFGVETLGPWGPGAHSLYRELSKRLVAVTNHQKAGLFFGQRLSLAIQRGNAASLLGTFPNSGDLGQIFYL

SEQ ID NO: 23052 - protein, 955 aa, Blastobasis lacticolella
MSQVPSAQSSSLANWIRCPRCPQPHLCKGQRGLNIHIGKAHKDRCALTASVPLPGPVPTATAAVPLKPFWERVSDFKTSKRVVKRIPRGARVAVAQTLARDIQIATTKNDTHSWEHLLTFPYRILHVEDSEPNNANSLTSCIKNNCLHLVSPITVNGHRFSSYPSIYQHVENKISDGDIKGAARILFSSDTFAPDTPETLAGLRSKHPVPSADLRLPDAPSAADPALQISADAVRQAVYSFPNGSAGGIDGLTPQHLKDLLSCAGEAEDILLNAITGLLNLMLSGAVVSSVIDTLYGANLIALNKKDGGIRPIAVGTTYRRLTAKLCCRFAAPSLKDYFQPLQLGFGTKGGCEATVHALRTSLMNDGGEVLLKVDVKNAFNSVDRGALLEQIRTKLPAAYKFLWQCYKEPTNLVHKGHLLHSAVGCQQGDPLGPAIFSIAIHPIIEKLNSKFNVWYLDDGTLGGEASTVLRDLQLLIREFSAIGMELNFSKCELFISESCPTPGAICTAFSALAPNITVVGKSSLHLLGSPIFDDSFQNFVDKKIQNFNDVSDRLLQINSHMAYVIIRYCLFVPKFMFVLRCCQLWKHPALLEFLDNTVKQTLCSVININFDNSSWDQASLPIRYGGLGIRKVSNVSLPAFLSSVNSSQSLVNKILSKLGTFESAFSTEAKNAWQLACPESDLPANPCSQRLWDEPLCRLVRNNLLSASTNSAERARLLAAGEWESGLWLQAMPSKNIGTLLDRATFRIATALRLGAPCSAPHQCRCGRPVDQLGHHGLSCGRSAGRIPRHAELNDVIRRAFTTAGAPAVLEPIGLARDDGKRPDGMTLTPWKLGRPLVWDATCIDTLAPSHLPVTACQAATGAAAAENAKRRKYASLSGDYIFAPFGVETLGPWGPGAHSLFRELSKSLVQITNHQKAGLFLGQRLSLAIQRGNAASLLGTFPNSGDLGQVFYI

SEQ ID NO: 23053 - protein, 955 aa, Blastobasis lacticolella
MSQVPSAQSSSLANWIRCPRCPQPHLCKGQRGLNIHIGKAHKDRCALTASVPLPGPVPTATAAVPLKPFWERVSDFKTSKRVVKRIPRGARVAVAQTLARDIQIATTKNDTHSWEHLLTFPYRILHVEDSEPNNANSLTSCIKNNCLHPVSPITVNGHRFSSYPSIFQHVENKISDGDIKGAARILFSSDTFAPDTPETLAGLRSKHPVPSADLRLPDAPSAADPALQISADAVRQAVYSFPNGSAGGIDGLTPQHLKDLLSCAGEAEDILLNAITGLLNLMLSGAVVSSVIDTLYGANLIALNKKDGGIRPIAVGTTYRRLTAKLCCRFAAPSLKDYFQPLQLGFGTKGGCEATVHALRTSLMNDGGEVLLKVDVKNAFNSVDRGALLEQIRTKLPAAYKFLWQCYKEPTNLVHKGHLLHSAVGCQQGDPLGPAIFSLAIHPIIEKLNSKFNVWYLDDGTLGGEASTVLRDLQLLIREFSAIGMELNFSKCELFISESCPTPGAICTAFSALAPNITVVGKSSLHLLGSPIFDDSFQNFVDKKIQNFNDVSDRLLQINSHMAYVIIRYCLFVPKFMFVLRCCQLWKHPALLEFLDNTVKQTLCSVININFDNSSWDQASLPIRYGGLGIRKVSNVSLPAFLSSVNSSQSLVNKILSKLGTFESAFSTEAKNAWQLACPESDLPANPCSQRLWDEPLCRLVRNNLLSASTNSAERARLLAAGEWESGLWLQAMPSKNIGTLLDRATFRIATALRLGAPCSAPHQCRCGRPVDQLGHHGLSCGRSAGRIPRHAELNDVIRRAFTTAGAPAVLEPIGLARDDGKRPDGMTLTPWKLGRPLVWDATCIDTLAPSHLPVTACQAATGAAAAENAKRRKYASLSGDYIFAPFGVETLGPWGPGAHSLFRELSKRLVQITNHQKAGLFLGQRLSLAIQRGNAASLLGTFPNSEDLGQVFYI

SEQ ID NO: 23054 - protein, 953 aa, Blastobasis lacticolella
MSQVPSAQSSSLANWIRCPRCPQPHLCKGQRGLNIHIGKAHKDRCALTASVPLPGPVPTATAAVPLKPFWERVSDFKTSKRVVKRIPRGARVAVAQTLARDIQIATTKNDTHSWEHLLTFPYRILHVEDSEPNNANSLTSCIKNNCLHPVSPITVNGHRFSSYPSIFQHVENKISDGDIKGAARILFSSDTFAPDTPETLAGLRSKHPVPSADLRLPDAPSAADPALQISADAVRQAVYSFPNGSAGGIDGLTPHHLKDLLSCAGEAEDILLNAITGLLNLMLSGAVVSSVIDTLYGANLIALNKKDGGIRPIAVGTTYRRLTAKLCCRFAAPSLKDYFQPLQLGFGTKGGCEATVHALRTSLMNDGGEVLLKVDVKNAFNSVDRGALLEQIRTKLPAAYKFLWQCYKEPTNLVHKGHLLHSAVGCQQGDPLGPAIFSLAIHPIIEKLNSKFNVWYLDDGTLGGEASTVLRDLQLLIREFSAIGMELNFSKCELFISESCPTPGAICTAFSALAPNITVVGKSSLHLLGSPIFDDSFQNFVDKKIQNFNDVSDRLLQINSHMAYVIIRYCLFVPKFMFVLRCCQLWKHPALLEFLDNTVKQTLCSVININFDNSSWDQASLPIRYGGLGIRKVSNVSLPAFLSSVNSSQSLVNKILSKLGTFESAFSTEAKNAWQLACPESDLPANPCSQRLWDEPLCRLVRNNLLSASTNSAERARLLAAGEWESGLWLQAMPSKNIGTLLDRATFRIATALRLGAPCSAPHQCRCGRPVDQLGHHGLSCGRSAGRIPRHAELNDVIRRAFTTAGAPAVLEPIGLARDDGKRPDGMTLTPWKLGRPLVWDATCIDTLAPSHLPVTACQAATGAAAAENAKRRKYASLSGDYIFAPFGVETLGPWGPGAHSLFRGLSKRLVQITNHQKAGLFLGQRLSLAIQRGNAASLLGTFPNSGDLGQVL

SEQ ID NO: 23055 - protein, 957 aa, Blastobasis adustella
MSQVPNNAQSSSLANWIRCPRCPQPHLCKGQRGLNIHIGKSHKDRSVLTASAPSSAPVPTASASDSIKLFWERVSELKSTKRVIKRIPRGARVTVAQTLAKDILSTTAKNDEQSWEHLLTFPFRILHIEDTACPNKTNSLTSCIKNNCSYPASLITINDHCFFNYPSISQYVENKISDGDIKGAARILFSSDTFAPDTPETLAGLRSKHPLPSADLRLPDAPSAADPALQVSADAVRQAVFSFPNGSAGGIDALTPQHLKDLLSCAGEAGDILLNAITGLVNLMLSGSVVSSVIETLYGANLIALNKKDGGIRPIAVGTTYRRLTAKLCCRFSAPNLKEYFQPLQLGFGTNGGCESSVHALRTFLQNEGGEVLLKVDVKNAFNSVDRGALLDQIRKKLPATYKFLWQCYKEPTNLLHKGHLLHSAVGCQQGDPLGPAIFSLAIHPIIGKLNSKFNVWYLDDGTLGGEASTVLRDLQLLIREFSAIGLELNFSKCELFISESCPTPGAISAAFSALAPNITVVGKSSLHLLGSPIFDDSLQDFVDQKIQNFNDISDRLLQINSHMAYVIIRYCLFVPKFMYVLRCCQLWKHPALLEFLDNTVKHTLCSVLNINLANSSWDQASLPIRFGGLGIRKVSSVSLPAFLSSVNSSQSLVNKILSKLETFELAFSTEAKNAWQLACPESEPPANPCSQRLWDEPLCRLVRNNLLSASTNSADRARLIATGVWESGLWLQALPSKNIGTLLDSATFRLVTALRLGAPCSAPHQCRCGRPVDQLGHHGLSCGRSAGRLPRHAELNDVIRRAFTTAGAPAVLEPSGLAREDGKRPDGMTLTPWKLGRPLVWDATCIDTLAPSHLPVTACQVAMGAASAEDAKRRKYANLSGDYIFAPFGVETLGPWGPGAHSLYRELSKRLVEVTNHQKAGLFFGQRLSLAIQRGNAASLLGTFPNSGDLGQIFYL

SEQ ID NO: 23056 - protein, 957 aa, Blastobasis adustella
MSQVPNNAQSSSLANWIRCPRCPQPHLCKGQRGLNIHIGKSHKDRSVLTASAPSSAPVPTASASDSIKLFWERVSELKSTKRVIKRIPRGARVTVAQTLAKDILSATAKNDEQSWEHLLTFPFRILHIEDTACPNKTNSLTSCIKNNCSNPASLITINDHRFFNYPSISQYVENKISDGDIKGAARILFSSDTFAPDTPETLAGLRSKHPLPSADLRLPDAPSAADPALQVSADAVRQAVFSFPNGSAGGIDALTPQHLKDLLSCAGEAGDILLKAITGLVNLMLSGSVVSSVIETLYGANLIALNKKDGGIRPIAVGTTYRRLTAKLCCRFSAPNLKEYFQPLQLGFGTNGGCESSVHALRTFLQNEGGEVLLKVDVKNAFNSVDRGALLDQIRKKLPATYKFLWQCYKEPTNLLHKGHLLHSAVGCQQGDPLGPAIFSLAIHPIIGKLNSKFNVWYLDDGTLGGEASTVLRDLQLLIREFSAIGLELNFSKCELFISESCPTPGAISAAFSALAPNITVVGKSSLHLLGSPIFDDSLQDFVDQKIQNFNDISDRLLQINSHMAYVIIRYCLFVPKFMYVLRCCQLWKHPALLEFLDNTVKHTLCSVLNINLANSSWDQASLPIRFGGLGIRKVSSVSLPAFLSSVNSSQSLVNKILSKLGTFELAFSTEAKNAWQLACPESEPPANPCSQRLWDEPLCRLVRNNLLSASTNSAERARLIAAGVWESGLWLQALPSKNIGTLLDSATFRLATALRLGAPCSAPHQCRCGRPVDQLGHHGLSCGRSAGRLPRHAELNDVIRRAFTTAGAPAVLEPSGLAREDGKRPDGMTLTPWKLGRPLVWDATCIDTLAPSHLPVTACQVAMGAASAEDAKRRKYANLSGDYIFAPFGVETLGPWGPGAHSLYRELSKRLVAVTNHQKAGLFFGQRLSLAIQRGNAASLLGTFPNSGDLGQIFYL

SEQ ID NO: 23057 - protein, 479 aa, Blastobasis adustella
MREFKAIGLDLNLSKCELYISESCPTASAVSAAFDAIAPNISVVDKTSLHLLGSPIFDESLSDFVKEKIQNFNSVSDRLLQINSHMAYAIIRFCLFVPKFTYVLRCCQLWKHPALLEDLDNAVKHTLISILNINLDNSSWNQASLPIRYGGLGVRKVSGVSLPAFLSSVHSSQSLVQKLLSKLGNFTAAYSTEAKNAWQVACPEAELPTNSCSQRLWDEPLCRLVRNNLFSASTNSAERARLLAAGEWESGLWLQAMPSKNIGTLLDRTTFRIATALRLGAPCSAPHQCHCGHLVDHLGHHGLSCSRSAGRFPRHADLNDIIRRAFTSAGAPAVLEPSGLARNDGRRPDGMTLTPWKLGRPLVWDATCVDTLAQSHLPVTACHAGAGAAAAENAKRRKYASLGEDHIFAPFGVETLGPWGPGAHSLFRELAKRLVDVTKDQKAGLYLGQRISLAIQRGNAASLLGSIPNTVDLGQIFYL

SEQ ID NO: 23058 - protein, 966 aa, Blastobasis adustella
MSQDTPVSDGSSSVPPPVDWIRCPRCPQPHLCKGQRGLSIHLGKSHKVRGEVTTSSVPSSTPFYDLILDGPSTKPFWERVSNLKLSVPIVKRIPRGARVSVAQTLAQDIIRVTSKNDQQSWEHLLTFGFRILHVVDSNNTSCKKSLTTCIKDNCTNPLSFDSANFLSRPHNFRRNSIYQHVENKINDCDIKGAARILFSNDSFAPDTPETLVGLRSKHPQPSVGLLLPDAPDAADSSLQVSADSVRQAVFAFPNGSAGGIDGLTPQHLKDLLCCGGEAGNNLLVAITGLVNLMLSGSVEQSIVSTLYGANLIALKKKDGGIRPIAVGTTYRRLTAKLCCRFSAPSLVEYFQPIQLGFGSKGGCEAAVHALRTFLESNSGEVLLKVDVKNAFNSVDRGALLAQIRSKLPAAYKFMWQCYKESSNLIYKGHLLQSAVGCHQGDPLGPAIFSLAIHPILEKLNSKFNVWYLDDGTLGGDADTVLQDLQLLMREFKAIGLDLNLSKCELYISESCPTASAVSAAFDAIAPNISVVDKTSLHLLGSPIFDESLSDFVKEKIQNFNSVSDRLLQINSHMAYAIIRFCLFVPKFTYILRCCQLWKHPALLEDLDNAVKHTLISILNINLDNSSWNQASLPIRYGGLGVRKVSGVSLPAFLSSVHSSQSLVQKLLSKLGNFTAAYSTEAKNAWQVAYPEAELPTNACSQRLWDEPLCRLVRNKLLSASTNSAERARLLAAGEWESGLWLQAMPSKNIGTLLDRTTFRIATALRLGAPCSAPHQCHCGHLVDHLGHHGLSCSRSAGRFPRHADLNDIIRRAFTSAGAPAVLEPSGLARNDGRRPDGMTLTPWKLGRPLVWDATCVDTLAQSHLPVTACHAGAGAAAAENAKRRKYASLGEDHIFAPFGVETLGPWGPGAHSLFRELAKRLVDVTKDQKAGLYLGQRISLAIQRGNAASLLGSIPNTVDLGQIFYL

SEQ ID NO: 23059 - protein, 957 aa, Blastobasis adustella
MSQVPNNAQSSSLANWIRCPRCPQPHLCKGQRGLNIHIGKSHKDRSVLTASAPSSAPVPTASASDSIKLFWERVSELKSTKRVIKRIPRGARVTVAQTLAKDILSATAKNDEQSWEHLLTFPFRILHIEDTACPNKTNSLTSCIKNNCSNPASLITINDHRFFNYPSISQYVENKISDGDIKGAARILFSSDTFAPDTPETLAGLRSKHPLPSADLRLPDAPSAADPALQVSADAVRQAVFSFPNGSAGGIDALTPQHLKDLLSCAGEAGDILLNAITGLVNLMLSGSVVSSVIETLYGANLIALNKKDGGIRPIAVGTTYRRLTAKLCCRFSAPNLKEYFQPLQLGFGTNGGCESSVHALRTFLQNEGGEVLLKVDVKNAFNSVNRGALLDQIRKKLPATYKFLWQCYKEPTNLLHKGHLLHSAVGCQQGDPLGPAIFSLAIHPIIGKLNSKFNVWYLDDGTLGGEASTVLRDLQLLIREFSAIGLELNFSKCELFISESCLTPGAISAAFSALAPNITVVGKSSLHLLGSPIFDDSLQDFVDQKIQNFNDISDRLLQINSHMAYVIIRYCLFVPKFMYVLRCCQLWKHPALLEFLDNTVKHTLCSVLNINLANSSWDQASLPIRFGGLGIRKVSSVSLPAFLSSLNSSQSLVNKILSKLGTFELAFSTEAKNAWQLACPESEPPVNPCSQRLWDEPLCRLVRNNLLSASTNSAERARLIAAGVWESGLWLQALPSKNIGTLLDSATFRLATALRLGAPCSAPHQCRCGRPVDQLGHHGLSCGRSAGRLPRHAELNDVIRRAFTTAGAPAVLEPSGLAREDGKRPDGMTLTPWKLGRPLVWDATCIDTLAPSHLPVTACQVAMGAASAEDAKRRKYANLSGDYIFAPFGVETLGPWGPGAHSLYRELSKRLVEVTNHQKAGLFFGQRLSLAIQRGNAASLLGTFPNSGDLGQIFYL

SEQ ID NO: 23060 - protein, 957 aa, Blastobasis adustella
MSQVPNNAQSSSLANWIRCPRCPQPHLCKGQRGLNIHIGKSHKDRSVLTASAPSSAPVPTASASDSIKLFWERVSDLKSTKRVVKRIPRGARVAVAQTLSKDILSATAKNDEQSWEHLLTFPFRILHIEDTACPNKTNSLTSCIKNNCSNPASLITINDHRFFNYPSISQYVENKISDGDIKGAARILFSSDTFAPDTPETLAGLRSKHPLPSADLRLPDALSAADSALQVSADAVRQAVFSFPNGSAGGIDALTPQHLKDLLSCAGEAGDILLNAITGLVNLMLSGSVVSSVVETLYGANLIALNKKDGGIRPIAVGTTYRRLTAKLCCRISAPNLKEYFQPLQLGFGTNGGCESSVHALRTFLQNDGGEVLLKVDVKNAFNSLDRGALLDQIRKKLPAAYKFLWQCYKEPTNLLHKGHLLHSAVGCQQGDPLGPAIFSLAIHPIIEKLNSKFNVWYLDDGTLGGEASTVLLDLQLLIREFSAIGLELNFSKCELFISESCPTPGAISAAFSALAPNITVVGKSSLHLLGSPIFDGSLQDFVDQKIQNFNDVSDRLLQINSHMAYVIIRYCLFVPKFMYVLRCFQLWKHPALVELLDNTVKHTLCSVLNINLANSSWDQASLPIRFGGLGIRKVSSVSLPAFLSSVNSSQSLVNKILSKLGTFELAFSTEAKNAWQLACPESEPPANPCSQRLWDEPLCRLVRNNLLSASTNSAERARVLAAGEWESGLWLQALPSKNIGTLLDSATFRLATALRLGAPCSAPHQCRCGRPVDQLGYHGLSCGRSAGRLPRHAELNDVIRRAFTTAGAPAVLEPSGLAREDGKRPDGMTLTPWKLGRPLVWDATCIDTLAPSRLPVTACQVAMGAASAEDAKRRKYANLSGDYIFAPFGVETLGPWGPGAHSLYRELSKRLVEVTNHQKAGLFFGQRLSLAIQRGNAASLLGTFPNSGDLGQIFYL

SEQ ID NO: 23061 - protein, 955 aa, Blastobasis lacticolella
MSQVPNAQSSSLANWIRCPRCPQPHLCKGQRGLNIHIGKAHKDRCALTASVPLPGPVPTATAAVPLKPFWERVSDLKDTKRVVKRIPRGARVAVAQTLARDIQSATTKNDTHSWEHLLTFPYRILHVKDSEPNNTISLTSCIKNNCLHPVSPITVNGHRFSSYPSIFQHVENKISDGDIKGAARILFSSDTFAPDTPETLAGLRSKHPVPSADLRLPDAPSAADPALQISADAVRQAVYSFPNGSAGGIDGLTPQHLKDLLSCAGEAEDILLNAITGLLNLMLSGAVVSSVIDTLYGANLIALNKKDGGIRPIAVGTTYRRLTAKLCCRFAAPSLKDYFQPLQLGFGTKGGCEATVHALRTSLMNNGGEVLLKVDVKNAFNSVDRGTLLDQIRTKLPAAYKFLWQCYKEPTNLVHKGHLLHSAVGCQQGDPLGPAIFSLAIQPIIEKLNSKFNVWYLDDGTLGGEASTVLRDLQLLIREFSAIGMELNFSKCELFISESCPTPGAICTAFSALAPNITVVGKSSLHLLGSPIFDDSFQNFVDKKIQNFNDVSDRLLQINSHMAYVIIRYCLFVPKFMYVLRCCQLWKHPALLEFLDNTVKQTLCSVININFDNSSWDQASLPIRYGGLGIRKVSNVSLPAFLSSVNSSQSLVNKILSKLGTFESAFSTEAKNAWQLACPESDPPANPCSQRLWDEPLCRLVRNNLLSASTNSAERARLLAAGEWESGLWLQAMPSKNIGTLLDRATFRIATALRLGAPCSAPHQCRCGRPVDQLGHHGLSCGTSAGRFPRHAELNDIIRRAFTTAGAPAVLEPIGLARDDGKRPDGMTLTPWKLGRPLVWDATCIDTLAPSHLPVTACQAATGAAAAENAKRRKYASLNGDYIFAPFGVETLGPWGPGAHSLFRELSKRLVQITNHQKAGLFLGQRLSLAIQRGNAASVLGTFPNSGDLGHVFYL

SEQ ID NO: 23062 - protein, 964 aa, Endotricha flammealis
MTQNPQVTVQSSSQLSQDNFIQCPRCPQPRLFKGRRGLNIHIGKSHQIHAEVTSSAPVSAPDDAPRLEATEPIWKRLSSLKRSKPVLKRIPRGARISVAQLLTKDIKLALSNTEKAWEHLLTFPYRILHVNSNNSNEIKQSLTSRVKQNCSNPTVSFTTLDPSNSQTRKHYNIYKNVEDKISEGDIRGAARLLFSSDTIAPDVPETLDALRAKHPQPSAGLQLPNPPDNTINELQVGADAVRQAVFSFPTGSAGGLDGLTPQHLKDLLGGSCGDTGDGLLKELTALVNLMLSGSVTETITDILYGANLIALKKKCGGIRPIAVDTTYRRLTAKLCFRSAAENLTGIFQPIQLGFGSKGGCEASVHALRSFLNHQEGEVVLKVDVKNAFNSVDRGALLTQVRSKLPNIYKFLWQCYKEPSKLVYKDNLLFSSVGCQQGDPLGPAIFGVAIHHVIERLNSKLNVWFLDDGTLGGDVNTVLDDMRLMIREFGVIGLEFNFSKCELYISETCQNVPNVINDFNSLAPNIKVVDKSNNLLLGSPIFEESFSSFIEEKIQNFAAVSDRLQHISTHMAYYILRYCLFVPKFTYVLRCSQFWKHQDILDRLDSIIKQTLISVLNINMDDTAWTQASLPIRFGGLGIRKISSVSLPAFLSSAHSTQNLVSKILASCPNSSEISFAGEAENAWRQACPNTDYPENRLSQKLWDEPLCKLVRNSLLNTSTDSAERARLLAAGEWESGLWLQALPSANIGTLLDSSTFRIATALRLGAPCIAPHQCGCGHVVNYLSRHGLSCCRSAGRFSRHAELNDVIRRSFATAGSPAVLEPNGLSRDDGKRPDGMTLVPWKMGRCLVWDATCVDTFAPSHLPGTATKAGSAAATAESAKRRKYAGLSSDLIFAPFGVETLGPWGPGAHYLFKEISERLVNASYDRKAGLYFAQRISLAIQRGNSASLLGTLPFSRDLGQVFYL

SEQ ID NO: 23063 - protein, 961 aa, Endotricha flammealis
MTQNPQVSVQSSSQLSQDNFIQCPRCPQPRLFKGRRGLNIHIGKSHQNHAEITSSAPVSAPDDAPRLEATEPIWKRLSSLKRSKPVLKRIPRGARISVAQLLTKDIKSALSNTEKAWEHLLTFPYRILHVNNNNSNEIKQSLTSRVKQNCSNPTVSFTTLDPSNRKHYNIYKNVENKISEGDIRGAARLLFSSDTIAPDVPETLDALRAKHPQPSAGLQLPNPPDNTINALQVGADAVRQAVFSFPTGSAGGLDGLTPQHLKDLLGGSCGDTGDGLLKELTALVNLMLSGSVTETITDILYGANLIALKKKCGGIRPIAVGTTYRRLTAKLCCRSAAENLTGIFQPIQLGFGSKGGCEASVHALRSFLNHQEGEVVLKVDVKNAFNSVDRGALLTQVRSKLPNIYKFLWQCYKEPSKLVYKDNLLFSSVGCQQGDPLGPAIFGVAIHHVIERLNSKLNVWFLDDGTLGGDVNTVLDDMRLMIQEFGFIGLEFNFSKCELYISETCQNVANVINDFNSLAPNIKVVDKSNLLLLGSPIFEESFSSFIEEKIQNFAAVSDRLQHISTHMAYYILRYCLFVPKFTYVLRCSHFWKHQEILERLDSIIKQTLISVLNINMDDTAWTQASLPIRFGGLGIRKISSVSLPAFLSSAHSTQNLVSKILASCPNGSEISFAGEAENAWRQACPNTDYPENRLSQKLWDEPLCKLVRNSLLNTSTDSAERARLLAAGEWESGLWLQALPSANIGTLLDSSTFRIATALRLGAPCIAPHQCGCGHVVNYLGRHGLSCCRSAGRFSRHAELNDVIRRSFATAGSPAVLEPNGLSRDDGKRPDGMTLVPWKMGRCLVWDATCVDTFASSHLPGTATKAGSAAATAESAKRRKYAGLSSDLIFAPFGVETLGPWGPGAHYLFKEISERLVNASYDRKAGLYFAQRVSLAIQRGNSASLLGTLPFSRDLGQVFYL

SEQ ID NO: 23064 - protein, 964 aa, Endotricha flammealis
MTQNPQVTVQSSSQLSQDNFIQCPRCPQPRLFKGRRGLNIHIGKSHQNHAEVTSSAPVSAPDDAPRLEATEPIWKRLSSLKRSKPVLKRIPRGARISVAQLLTKDIKLALSNTEKAWEHLLTFPYRILHVKSNNSNEIKQSLTSRVKQNCSNPTVSFTTLDPSNSQTRKHYNIYKNVEDKISEGDIRGAARLLFSSDTIAPDVPETLDALRAKHPQPSAGLQLPNPPDNTINELQVGADAVRQAVFSFQTGSAGSLDGLTPQHLKDLLGGSCGDTGDGLLKELTALVNLMLSGSVTETITDILYDANLIALKKKCGGIRPIAVGTTYRRLTAKLCCRSAAENLTGIFQPIQLGFGSKGGCEASVHALRSFLNHQEGEVVLKVDVKNAFNSVDRGALLTQVRSKLPNIYKFLWQCYKEPSKLVYKDNLLFSSVGCQQGDPLGPAIFGVAIHHVIERLNSKLNVWFLDDGTLGGDVNTVLDDMRLMIREFGVIGLEFNFSKCELYISETCQNVANVINDFNSLAQNIKVVDKSNLLLLGSPIFEESFSSFIEEKIQNFAAVSDRLQHISTHMAYYILRYCLFVPKFTYVLRCSQFWKHQDILDRLDSIIKQTLISVLNINMDDTAWTQASLPIRFGGLGIRKISSVSLPAFLSSAHSTQNLVSKILASCPNGSEISFAGEAENAWRQACPNTDYPENRLSQKLWDEPLCKLVRNSLLNTSTDSAERARLLAAGEWESGLWLQALPSANIGTLLDSSTFRIATALRLGAPCIAPHQCGCGHVVNYLGRHGLSCCRSAGRFSRHAELNYVIRRSFATAGSPAVLEPNGLSRDDGKRPDGMTLVPWKMGQCLVWDATCVDTFAPSHLPGTETKAGSAAATAESAKRRKYAGLSSDLIFAPFGVETLGPWGPGAHYLFKEISERLVNASYDRKAGLYFAQRISLAIQRGNSASLLGTLPFSRDLGQVFYL

SEQ ID NO: 23065 - protein, 964 aa, Endotricha flammealis
MTQNPQVTVQSSSQLSQDNFIQCPRCPQPRLFKGRRGLNIHIGKSHQNHAEVTSSAPVSAPDDAPRLEATEPIWKRLSSLKRSKPVLKRIPRGARISVAQLLTKDIKLALSNTEKAWEHLLTFPYRILHVNSNNSNEIKQSLTSRVKQNCSNPTVSFTTLDPSNSQTRKHYNIYKNVEDKISEGDIRGAARLLFSSDTIAPDVPETLDALRAKHPQPSAGLQLPNPPDNTINELQVGADAVRQAVFSFPTGSAGGLDGLTPQHLKDLLGGSCGDTGDGLLKELTALVNLMLSGSVTETITDILYGANLIALKKKCGGLRPIAVGTTYRRLTAKLCCRSAAENLTGIFQPIQLGFGSKGGCEASVHALRSFLNHQEGEVVLKVDVKNAFNSVDRGALLTQVRSKLPNIYKFLWQCYKEPSKLVYKDNLLFSSVGCQQGDPLGPAIFGVAIHHVIERLNSKLNVWFVDDGTLGGDVNTVLDDMRLMIREFGVIGLEFNFSKCELYISETCQNVANVINDFNSLAPNIKVVDKSNLLLLGSPIFEESFSSFIEEKIQNFAAVSDRLQHISTHMAYYILRYCLFVPKFTYVLRCSQFWKHQDILDRLDSIIKQTLISVLNINMDDTAWTQASLPIRFGGLGIRKISSVSLPAFLSSAHSTQNLVSKILASCPNGSEISFAGEAENSWRQACPNTDYPENRLSQKLWDEPLCKLVRNSLLNTSTDSAVRARLLAAGEWESGLWLQALPSANIGTLLDSSTFRIATALRLGAPCIAPHQCGCGHVVNYLGRHGLSCCRSAGRFSRHAELNDVIRRSFATAGSPAVLEPNGLSRDDGKRPDGMTLVPWKMGRCLVWDATCVDTFAPSHLPGTATKAGSAAATAESAKRREYAGLSSDLIFAPFGVETLGPWGPGAHYLFKEISERLVNASYDRKAGLYFAQRISLAIQRGNSASLLGTLPFSRDLGQVFYL

SEQ ID NO: 23066 - protein, 964 aa, Endotricha flammealis
MTQNPQVTVQSSSQLSQDNFIQCPRCPQPRLFKGRRGLNIHIGKSHQNHAEVTSSAPVSAPDDAPRLEATEPIWKRLSSLKRSKPVLKRIPRGARISVAQLLTKDIKLALSNTEKAWEHLLTFPYRILHVNSNNSNEIKQSLTSRVKQNCSNPTVSFTNLDPSNSQTRKHYNIYKNVEDKISEGDIRGAARLLFSSDTIAPDVPETLDALRAKHPQPSAGLQLPNPPDNTINELQVGADAVRQAVFSFPTGSAGGLDGLTPQHLKDLLGGSCGDTGDGPLKELTALVNLMLSGSVTETITDILYGANLIALKKKCGGIRPIAVGTTYRRLTAKLCCRSAAENLTGIFQPIQLGFGSKGGCEASVHALRSFLNHQEGEVVLKVDVKNAFNSVDRGALLTQVRSKLPNIYKFLWQCYKEPSKLVYKDNLLFSSVGCQQGDPLGPAIFGVAIHHVIERLNSKLNVWFLDDGTLGGDVNTVLDDMRLMIREFGVIGLEFNFSKCELYISETCQNVANVINDFNSLAPNIKVVDKSNLLLLGSPIFEESFSSFIEEKIQNFAAVSDRLQHISTHMAYYILRYCLFVPKFTYVLRCSQFWKHQDILERLDSIIKQTLISVLNINMDDTAWTQASLPIRFGGLGIRKISSVSLPAFLSSAHSTQNLVSKILASCPNGSEISFAGEAENAWRQACPNTDYPENRLSQKLWDEPLCKLVRNSLLNTSTDSAERARLLAAGEWESGLWLQALPSANIGTLLDSSTFRIATALRLGAPCIAPHQCGCGHVVNYLGRHGLSCCRSAGRFSRHAELNDVIRRSFATAGSPAVLEPNGLSRDDGKRPDGMTLVPWKMGRCLVWDATCVDTFAPSHLPGTATKAGSAAATAESAKRRKYAGLSSDLIFAPFGVETLGPWGPGAHYLFKEISERLVNASYDRKAGLYFAQRISLAIQRGNSASLLGTLPFSRDLGQVFYL

SEQ ID NO: 23067 - protein, 952 aa, Blastobasis adustella
MSQVPNNAQSSSLANWIRCPRCPQPHLCKGQRGLNIHIGKSHKDRSVLTASAPSSAPVPTASASDSIKLFWERVSELKSTKRVIKRIPRGARVTVAQTLAKDILSATAKNDEQSWEHLLTFPFRILHIEDTACPNKTNSLTSCIKNNCSNPASLITINDHRFFNYPSISQYVENKISDGDIKGAARILFSSDTFAPDTPETLAGLRSKHPLPSADLRLPDAPSAADPALQVSADAVRQAVFSFPNGSAGGIDALTPQHLKDLLSCAGEAGDILLNAITGLVNLMLSGSVVSSVIETLYGANLIALNKKDGGIRPIAVGTTYRRLTAKLCCRFSAPNLKEYFQPLQLGFGTNGGCESSVHALRTFLQNEGGEVLLKVDVKNAFNSVDRGALLDQIRKKLPATYKFLWQCYKEPTNLLHKGHLLHSEVGCQQGDPLGPAIFSLAIHPIIGKLNSKFNVWYLDDGTLGGEASTVIRDLQLLIREFSAIGLELNFSKCELFISESCPTPGAISAAFSALAPNITVVGKSSLHLLGSPIFDDSLQDFVDQKIQNFNDISDRLLQINSHMAYVIIRYCLFVPKRCCQLWKHPALLEFLDNTVKHTLCSVLNINLANSSWDQASLPIRFGGLGIRKVSSVSLPAFLSSVNSSQSLVNKILSKLGTFELAFSTEAKNAWQLACPESEPPANPCSQRLWDEPLCRLVRNNLLSASTNSAERARLIAAGVWESGLWLQALPSKNIGTLLDSATFRLATALRLGAPCSAPHQYRCGRPVDQLGHHGLSCGRSAGRLPRHAELNDVIRRAFTTAGAPAVLEPSGLAREDGKRPDGMTLTPWKLGRPLVWDATCIDTLAPSHLPVTACQVAMGAASAEDAKRRKYANLSGDYIFAPFGVETLGPWGPGAHSLYRELSKRLVEVTNHQKAGLFFGQRLNLAIQRGNAASLLGTFPNSGDLGQIFYL

SEQ ID NO: 23068 - protein, 938 aa, Blastobasis lacticolella
MSQDANDARSRSLQNLIRCPRCPQPLFFKGQRGLNIHIGKSHKDRSILIASVPSSAPIPIAPVSVPLVPLKPFWERVAHLKTSKRILKRIPRGARIAVAQALARDIQRATAKNDKESWEHLLTFPFRILHVEDTGPNTFLNSLTASINTKLFKKNKINDGDIKGAARILFSNDTFAPDTTETLADLHSKHPQPPADLQLPDAPSAADSALHVSADAVRQAVFSFPTGSAGGIDGLTPQHLKDLLSCAGEAGDILLNSITGLTNMMLSGAVDSSVVDTLYGANLIALKKKDGGIRPIAVGTTYRRLTAKLCCRFFAPSLKEYFQPIQLGYGSKGGCEAAVHALRTFLQHNGGEVLLKVDVKNAFNSVDRGALLNQVKSKMPAAYNFLWQFYEQPTNLIHKGHLLNSAVGCQQGDPLGPAIFSLAIHPIVEKLNSKLNVWYLDDGTLGGDATTVLQDLQLLIREFSAIGLDLNFSKCELYISESCPSARAVLQAFCAQAPNITVVDKTNLHLLGSPIFDESLKYFVDHKIQNFNSIADRLLKINSHIAFAIIRYCLFVPKFMYVLRCCQLWKHPVLLELLDNTKQTLTSVLNINLENSSWEQASLPIRYGGLGVRKMSSVSLPAFLSSVHSSQSLVDKLLSKLGTFPSAFSTEAKIAWQLACPEAEPTNSYSQRLWDELLCRLALNKLLNATTNSAERARLLAAGEWKSGLWLQAMPSKNIGSLLDRATFRIATALRLGAPCSAPHDCHCGRPVDQLGHHGLSCSRSAERIPRHADLNDVIRRAFASAGAPAVLEPNGLARDDGKRPDGMTLTPWKLGRPLVWDATCIDTLASSHLPATACQAGAGAASAENAKRRKYACLSGDYIFAPFGVETLGPWGPGAHSLYRELAKRLVDISKDQTAGLYLGQRISLAIQRGDATSLLGTFPYSGDLGQIFYLFK

SEQ ID NO: 23069 - protein, 965 aa, Blastobasis adustella
MSQDTPVSDGSSSVPPPVDWIRCPRCPQPQLCKGQRGLSIHLGKSHKVRGEVTTSSVPSSTPVPLILDGPSTKPFWERVSNLKLSVPIVKRIPRGARVSVAQTLAQDIIRVTSKNDQQSWENLLTFGFRILHVVDSNNTSCKKSLTTCIKDNCTNPLSFDSANFLSRPHNFRRNSIYQHVENKINDCDIKGAARILFSNDSFAPDTPETLVGLRSKHPQPSVGLLLPDAPDAADSSLQVSADSVRQAVFAFPNGSAGGIDGLTPQHLKDLLCCGGEAGNNLLVAITGLVNLMLSGSVEQSIVSTLYGANLIALKKKDGGIRPIAVGTTYRRLTAKLCCRFSAPSLAEYFQPIQLGFGSKGGCEAAVHALRTFLESNSGEVLLKVDVKNAFNSVDRGALLAQIRSKLPAAYKFLWQCYKESSNLIYKGHLLQSAVGCQQGDPLGPAIFSLAIHPILEKLNSKFNVWYLDDGTLGGDADTVLQDLQLLMREFKAIGLDLNLSKCELYISESCPTASAVSAAFDAIAPNISVVDKTSLHLLGSPIFDESLSDFVKEKIQNFNSVSDRLLQINSHMAYAIIRFCLFVPKFTYVLRCCQLWKHPALLDDLDNAVKHTLISILNINLDNSSWNQASLPIRYGGLGVRKVSGVSLPAFLSSVHSSQSLVQKLLSKLGNFTAAYSTEAKNAWQVACPEAELPTNSCSQRLWDEPLCRLVRNNLLSASTNSAERARLLAAGEWESGLWLQAMPSKNIGTLLDRTTFRIATALRLGAPCSAPHQCHCGHLVDHLGHHGLSCSRSAGRFPRHADLNDIIRRAFTSAGASAVLEPSGLARNDGRRPDGMTLTPWKLGRPLVWDATCVDTLAQSHLPVTACHAGAGAAAAENAKRRKYASLGEDHIFAPFGVETLGPWGPGAHSLFRELAKRLVDVTKDQKAGLYLGQRISLAIQRGNAASLLGSIPNTVDLGQIFYL

SEQ ID NO: 23070 - protein, 965 aa, Blastobasis adustella
MSQDTPVSDGSSSAPPPVDWIRCPRCPQPHLCKGQRGLSIHLGKSHKVRGEVTTSSVPSSTPVPLILDGPSTKPFWERVSNLKLSVPIVKRIPRGARVSVAQTLAQDIIRVTSKNDQQSWKHQLTFGFRILHVVDSNNTSCKKSLTTCIKDNCTNPLSFDSANFLSRPHNFRRNSIYQHVENKINDCDIKGAARILFSNDSFAPDTPETLVGLRSKHPQPSVGLLLPDAPDAADSSLQVSADSVRQAVFAFPNGSAGGIDGLTPQHLKDLLCCGGEAGNNLLVAITGLVNLMLSGSVEQSIVSTLYGANLIALKKKDGGIRPIAVGTTYRRLTAKLCCRFSAPSLAEYFQPIQLGFGSKGGCEAAVHALRTFLENNSGEVLLKVDVKNAFNSVDRGALLAQIRSKLPAAYKFLWQCYKESSNLIYKGHLLQSAVGCQQGDPLGPAIFSLVIHPILEKLNSKFNVWYLDDGTLGGDANTVLQDLQLLMREFKAIGLDLNLSKCELYISESCPTASAVSAAFDAIAPNISVVDKTSLHLLGSPIFDESLSDFVKEKIQNFNSVSDRLLQINSHMAYAIIRFCLFVPKFTYVLRCCQLWKHPALLEDLDNAVKHTLISILNINLDNSSWNQASLPIRYGGLGVRKVSGVSLPAFLSSVHSSQSLVQKLLSKLGNFTAAYSTEAKNAWQVACPEAELPTNSCSQRLWDEPLCRLVRNNLLSASTNSAERARLLAAGEWESGLWLQAMPSKNIGTLLDRTTFRIATALRLGAPCSAPHQCHCGHLVDHLGHHGLSCSRSAGRFPRHADLNDIIRRAFTSAGAPAVLEPSGLARNDGRRPDGMTLTPWKLGRPLVWDATCVDTLAQSHLPVTACHAGAGAAAAENAKRRKYASLGEDHIFAPFGVETLGPWGPGAHSLFRELAKRLVDVTKDQKAGLYFGQRISLAIQRGNAASLLGSIPNTVDLGQIFYL

SEQ ID NO: 23071 - protein, 861 aa, Vanessa atalanta
MNTNHEDNTTQNSNTPSPQDLQQFWASIWENPVQHNTNADWLLKSADTGHITAMDFENISIDIFIQIIKRTHNWKAPGTDNIHNYWYKKLTCVHPFIHSHINQFIHSPHTMPKFISHGITYMLSKGADSKNPANYRPITCLQTIYKIITGCISHLIYTHIDHHNILAEQQKGCRKNSQGCKEQLTIDAIVMKQALTKKLNIHTMYIDYKKAFDSVPHSWLLYILQRYKIHPNLITFLRVTMLHWQTKLKLIQNNTSLTTETIKIQRGIFQGDSLSPLWFCIALNPLSELLNKTEMGLQLKHNDSHHTLSHLLYMDDIKIYAKNNAELTKLADITQSFSTDIQMQFGVNKCKIHSIIKGKSQTNSYVLDTGEQIEHMNEHNTYKYLGFHQSKQIEQKQTKLDLIKTFKIRLNQILRTQLNSRNTVKAINTYAIPVLTYSFGIITWSQTDLLKLQRMINTHMSSHRKRHPRSCIQRLTLPRQDGGQGLIDIKNLHNTLTNKLRNYFYSKADHSQLHKHAIEIDKKLTPLNLSNRSIQAKLITRQQKIDLWSQKSLHGRHLADLGQSHVDKDASNEWLRRGELFPETEAFMIAIQDQVIDTRNYQKHIIRLPNLPTDLCRRCHSGSETIQHITGACKSIVQTDYKHRHDQVAAIIHQNLAHAYSLLTKKVAYYKYTPDTVLENSTFKLYWDRTIITDKTIHYNRPDITVIDKNKNIVFIIDIAVCNTHNLLNTYTEKISKYVELATEIKRQWQVDNVKILPIVISTTGVIPKTLSTNLNALQMPASTLFRKQLFSTLAVSHVNSCHHHRLNPTKTDTLGLGSCICFITSSKGRKKRERKIIIIIIYRTYNRIHQLRIDTIFYLV

SEQ ID NO: 23072 - protein, 807 aa, Vanessa atalanta
MNTNHEDNTTQNSNTPSPQDLQQFWASIWENPVQHNTNADWLLKSADTGHITAMDFENISIDIFIQIIKRTHNWKAPGTDNIHNYWYKKLTCVHPFIHSHINQLIHSPHTMPKFISHGITYMLSKGADSKNPANYRPITCLQTIYKIITGCISHLIYTHIDHHNILAEQQKGCRKNSQGCKEQLTIDAIVMKQALTKKLNIHTMYIDYKKAFDSVPHSWLLYILQRYKIHPNLITFLRVTMLHWQTKLKLIQNNTSLTTETIKIQRGIFQRDSLSPLWFCIALNPLSELLNKTEMGLQLKHNDSHHTLSHLLYMDDIKIYAKNNAELTKLADITQSFSTDIQMQFGVNKCKIHSIIKGKSQTNSYVLDTGEQIEHMNEHNTYKYLGFHQSKQIEQKQTKLDLIKTFKIRLNQILRTQLNSRNTVKAINTYAIPVLTYSFGIITWSQTDLLKLQRMINTHMSSHRKRHPRSCIQRLTLPRQDGGQGLIDIKNLHNTLTNKLRNYFYSKADHSQLHKHAIEIDKKLTPLNLSNRSIQAKLITRQQKIDLWSQKSLHGRHLADLGQSHVDKDASNEWLRRGELFPETEAFMIAIQDQVIDTRNYQKHIIRLPNLPTDLCRRCHSSSETIQHITGACKSIVQTDYKHRHDQVAAIIHQNLAHAYSLLTKKVAYYKYTPDTVLENSTFKLYWDRTIITDKTIHYNRPDITVIDKNKNIVFIIDIAVCNTHNLLNTYTEKISKYVELATEIKRQWQVDNVKILPIVISTTGVIPKTLSTNLNALQMPASTITLIQKAVILNTCRLTRKFLSSS

SEQ ID NO: 23073 - protein, 1379 aa, Vanessa cardui
MEKTMESRNKIYSLRPLPGGRRGTSGANAGCHSMRTVGDGGLSRRVPLEKSTTAERSSSTSSNSSSEHSPYSNIPSPSSTHSLFRSLNSSPSSSYSLRSTRSTTVVQEALATKPVPTADLPRARKKWTQDMNRFIWRTYLIITKCETTRMNTYLDSLHKEFDSKFPEMQASRQRLGDQRRAILRTKLLSQRTLDDIRGEVKQLIQTDSHDHSHARKTNSPFDFTHTLTQIKSTTTRMKWTDEINEEIIRCYFLVTELETNKTAYRKKMHELFVKKYPNLSHITEQRIADQRRLLFNNKTNINKLDILKREVEQKLAELNVHLPQTTEKHITLQNLDNNKPEISIDTSSALTQIQPQAQLPTLITDTDLENHLLQKVETEFSNAMAQFNDTNPETRPYIPKQKSSRKLSQIVYYLNNTIVPKYLNHDQHFNTVHTIIYSAAYTAALCNGTRFHAAENAVRNSRYKKPTWQRRIKNKIEKYRLEIGRLTQYIAGNRSHKIIKTVDEIIIKHKTHSQHEEPNTEPQHFLDTLKQKLNAASHRLKRYLNCTKRKQQNHTFINNEKQFYRTMNTNHKDNTIQNSNTPTPQGLQQFWASIWENPVQHNSNAEWLLKSTNTGHIIAMDFENIPIDTFTQIIKRTHNWKAPGTDNIHNYWYKKLTCVHPFIHSHINQFIHAPHTMPSFISHGITYMVSKGSDPKNPANYRPITCLQTIYKIITGCISHLIYSHIDQHNILVEQQKGCRKNSQGCKEQLTIDAIVMKQAHTKKINIHTMYIDYKKAFDSVPHSWLLYILQHYKIHPNLITFLNATMLQWQTKLKLIQNNTSLTTETIKIQRGIFQGDSLSPLWFCIALNPLSELLNKTEMGIQMKHNDSYHTLSHLLYMDDIKIYAKNNAELTKLADITQSFSTDIQMQFGVDKCKIHSIIKGKSQRNTYILDTGEQIEYMDEHSTYKYLGFHQSKQIEQTLTKLDLIKAFKIRLNQILRTQLNSRNTVKAINTYAIPVLTYSFGIISWSQTDLLKLQRMISTHMSHHRKRHPRSCVQRLTLPRQDGGQGLIDIKNLHNTLTDKLRTYLYSKADHSQLHKHAIEIDKKLTPLNLSNRSIQPKLINRQQKIDLWSQKSLHGRHLADLRQSHVDKDASNEWLRRGELFPETEAFMIAIQDQVIDTRNYQKHIIRLPNLPTDLCRRCHSSSETIQHITGACKSIVQTDYKHRHDQVAAIIHQNLAHAHSLITKKVAYYKYTPDTVLENSTFKIYWDRTIITDKTIHYNRPDITVIDKNKNIVIIIDIAVCNTHNLLNTYTEKKTKYLELANEIKRIIKDQWQVDNIKILPIVISTTGVVPKTLSNNLNALQMPSSTIRLIQKAVILNTCRLTRKFLALSDP

SEQ ID NO: 23074 - protein, 1374 aa, Colias croceus
MEKNMDSTNKRYNLRPLPGGRRGTSGANAGCDSMRTVGDGGLSRRVPLEQWTTADRSSSPSSIASSEHSLFSNAPSPSSTHTLFRSSTSSPSSDYSLYSTRTTTVVQEAIAIDPAPTVGQIRARKKWTEDMNRFIWRTYLIITKCETTQMNNYLESLHLQFNSKYPNMQATRQRIGDQKRAILRNKLLPQETLDQIYNEVTKQIQTTQNSYTTPHNTNESTQQTSINSTQNTRMKWTDEMNEEIIRSYLTVTELESDLTAYRSKLHAMFIEKLPHLSHISEQRIADQRRIIFRNKLFAHKICELRKEVEQKLLVSNTNLSCNIQPAITDDTNFSLNEEVIDTLNTLTRQDSGIQSHIDTSIPNISHDSHLYSKIETEFNNAIKRFKNVNPETRPYIPKQKPSRKLSQIISHLNTTVIPKTLNHELDFCSLHTIIYSAAYTAALCNGTKFYSNQNIDNTSKNRKPTWQRRIESKIKKYRLEIGRLTQFIAGNRNNKIIKTVNEIKLKYRSHSQHEEPNTEPQHFLDTLKQKLNVASCRLKRYTNCTKRKQQNFTFVNNEKLFYRTLSDNRSETIQTFDAPSSQEFHKFWADLWENPVEHNTNATWLTKTSDTTHITSMEFDNLPIDTFLQVINRTHNWKAPGTDNIHNYWYKKLTCTQPFIHAHINKFIHSPDMLPEFILHGVTYMIPKGGDPQNPANYRPITCLQTIYKIITGCISHLIYHHLDTHHILAEQQKGCRKNRQGCKEQLTIDAIVMKQAQTKNRNIHTMYIDYKKAFDSIPHSWLLQILEHYKIHPMLQSFLGTAMLHWQTKLKLQYQNVSLTTESIKIQRGIFQGDALSPLWFCIALNPLSELLNNTNLGFKLKHNGSYFTLSHLLYMDDIKIYATNSQELKKLADITQTFSTDIKMQFGVDKCKIHSVIKGKSQYNTYLLDSGEQIEPMDEYSTYKYLGFHQSRQIHQKRAKLDLIKKFKVRLNQILRTQLHSRNTVKAINSYAIPVLTYSFGIINWSQTDLLKLQRIINTHMTAHRKHHPRTCIQRLTLPRCDGGRGLIDIQNLHNNLIVKLRTYFQIMSERSQLHKYVTEIDTKLTPLNLSNKNFQPKLYNKQQKLNLWSQKSLHGRHHADLGQQHVDRDASNEWLKRGELFPETEAFMIAIQDQVIDSRNYQKHIIRIPNLPTDLCRRCHSSSETIQHITGACKSIAQTDYKHRHDQVAAIIHQNLAHKHSFVSKKIAYYKYKPNTILENDSIKIYWDRTIITDKTIHFNRPDITVFDKTKNTVLLIDIAVCNTHNLLNTYTEKMSKYIELATEIKRQWQVHTVNIIPIVISTTGVTPKSLISNLKILQMPLSTLSLIQKAVILNTCRLTKKFLSNTPTST

SEQ ID NO: 23075 - protein, 1408 aa, Laspeyria flexula
MITHRHSKYMKMRLRNRELPQVGTGAPCNGESRPEPSGSGSLSYSGGGNVSRKTAQSRTVVVQNHKNHQKCSFISKSSSPTPSLSKSSSPTSSSPPSIISSDHMLFSSIPSPASTHSLYRSSNSSPSSSVTSHSTRSTRSTTVVQEALATNPAPTAGQIRARKKWTEDMNRFIWRTYLIITKCETTQLNSYLEPLHHEFSSKFPEMQVTRQRLGDQRRAILRSKLLPQSTIDIIHDEVKQQIHTNSYTNSQHLTHTLPQNDITSNSRIKWTNEMNEDIIRGYFEVTKLETNKTAYRKKLHELFIQIHPHLSHITEQRIADQRRLLFNNRTNINKIDDIKKEVQLKLREPNSQAQLDVQIDIITDSIDHNQYQGTTDTPITLTQTQTLTQTQVVTQTHIEPENYLLCKIETQFNNAILQFKDTNPETRPYIPKQKTSRKFSKIIDLLNNTIVPKHLNHEIDFTTLHTIIYSAAFAAAICNGTRLQLDENCVRNRYDNKPNWQRRIENKIKQYRLEIGRLTQYIAGNRSQKILKTVDEIREKYKSHSQHEELNTEPQHFLDTLKQKLSAASNRLKRYLNCTKRKQQNHTFLNNEKQFYRNLGNNDSHDTNQSPSTPSPQDLQQFWANIWENPTLHNANADWLSKLTDTEHINMMDFENIPIDTFIQIIKRTHNWKAPGTDNIHNYWYKKLTCTHPFIHNHISQFIRSPDTMPTFISHGITFMLPKGSDPKNPANYRPITCLQTIYKIITGCISYLIYKHLDHHNILVEHQKGCRKNSQGCKEQLTIDAIVMKQVHTNNRNIHTMYIDYRKAFDSVPHSWLLYILQHYKIHPMLITFLSTAMLQWQTRLKLIQNKTSLTTEPIKIQRGIFQGDSLSPLWFCIALNPLSELLNNTDMGFKLKHNNSSHTLSHLLYMDDIKIYATNNTQLSKLADITQSFSTDIQMQFGVDKCKIHSIIRGKSQKNSYILDTGEEIDHMDEYSTYKYLGFHQSKQIQHKQTKLDLIKKFKIRLNRILRTQLNSRNSIKAINTYAIPVLTYSFGIIRWSQTDLQKLQRIINTHMTTHRKHHPKSCIQRLTLPRQDGGQGLIDVQNLHNTLVSKLRTYFHNKAEQSELHKYITEIDIKFTPLNLSNRNTQIKLTNRQDKLGTWSQKSLHGRHLADLGQAHVDRDASNEWLRRGELFPETEAFMIAIQDQVINTRNYQKHILHLPNLPSDLCRRCHSSSETIQHITGACKSIVQTDYKHRHDQVASIIHQNLAHIHTFISKKVAYYKYKPETILENSLVKIYWDRTIITDKTIHYNRPDITVLDKTNNSVFLIDIAVCNTHNLLSTYTEKMTKYVELATEIKRQWQVDNVKILPIVISTTGIIPKSLKTNLNFLQMPVSTLTLIQKAAILNTCRLTRKFLASSSST

SEQ ID NO: 23076 - protein, 1408 aa, Laspeyria flexula
MITHRHSKYMKMRLRNRELPQVGTGAPCNGESRPEPSGSGSLSYSGGGNVSRKTAQSRTVVVQNHKNHQKCSFISKSSSPTPSLSKSSSPTSSSPPSIISSDHMLFSSIPSPASTHSLYRSSNSSPSSSVTSHSTRSTRSTTVVQEALATNPAPTAGQIRARKKWTEDMNRFIWRTYLIITKCETTQLNSYLEPLHHEFSSKFPEMQVTRQRLGDQRRAILRSKLLPQSTIDIIHDEVKQQIHTNSYTNSQHLTHTLPQNDITSNSRIKWTNEMNEDIIRGYFEVTKLETNKTAYRKKLHELFIQIHPHLSHITEQRIADQRRLLFNNRTNINKIDDIKKEVQLKLREPNSQAQLDVQIDIITDSIDHNQYQGTTDTPITLTQTQTLTQTQVVTQTHIEPENYLLCKIETQFNNAILQFKDTNPETRPYIPKQKTSRKFSKIIDLLNNTIVPKHLNHEIDFTTLHTIIYSAAFAAAICNGTRLQLDENCVRNRYDNKPNWQRRIENKIKQYRLEIGRLTQYIAGNRSQKILKTVDEIREKYKSHSQHEELNTEPQHFLDTLKQKLSAASNRLKRYLNCTKRKQQNHTFLNNEKQFYRNLGNNDSHDTNQSPSTPSPQDLQQFWANIWENPTLHNANADWLSKLTDTEHINMMDSENIPIDTFIQIIKRTHNWKAPGTDNIHNYWYKKLTCTHPFIHNHISQFIRSPDTMPTFISHGITFMLPKGSDPKNPANYRPITCLQTIYKIITGCISYLIYKHLDHHNILVEQQKGCRKNSQGCKEQLTIDAIVMKQVHTNNRNIHTMYIDYRKAFDSVPHSWLLYILQHYKIHPMLITFLSTAMLQWQTRLKLIQNKTSLTTEPIKIQRGIFQGDSLSPLWFCIALNPLSELLNNTDMGFKLKHNNSSHTLSHLLYMDDIKIYATNNTQLSKLADITQSFSTDIQMQFGVDKCKIHSIIRGKSQKNSYILDTGEEIDHMDEYSTYKYLGFHQSKQIQHKQTKLDLIKKFKIRLNRILRTQLNSRNSIKAINTYAIPVLTYSFGIIRWSQTDLQKLQRIINTHMTTHRKHHPKSCIQRLTLPRQDGGQGLIDVQNLHNTLVSKLRTYFHNKAEQSELHKYITEIDIKFTPLNLSNRNTQIKLTNRQDKLGTWSQKSLHGRHLADLGQAHVDRDASNEWLRRGELFPETEAFMIAIQDQVINTRNYQKHILHLPNLPSDLCRRCHSSSETIQHITGACKSIVQTDYKHRHDQVASIIHQNLAHIHTFISKKVAYYKYKPETILENSLVKIYWDRTIITDKTIHYNRPDITVLDKTNNSVFLIDIAVCNTHNLLSTYTEKMTKYVELATEIKRQWQVDNVKILPIVISTTGIIPKSLKTNLNFLQMPVSTLTLIQKAAILNTCRLTRKFLASSSST

SEQ ID NO: 23077 - protein, 1376 aa, Apodemia arnacis
MAMVNTHSMEKKKMKGTNKRYNLRPLPGGRRGASGANAGCYSMRTVGDGGLNRRVPLEQSSTADRSFSPSSTTNSEHSLFHNFPSPSSTHSLFCSSNTSPSSSYSSCSTRTTSVVQEALATNSASNVCPSRARKKWNEDMNRFIWRTYLIITKNETTQMNNYLDPLCKEFNCKYPDMKATRQRLGDQKRAILRRKLLSQETLNEIRNEINQQIYTGSYTNSITQNSTNIHSIHNSTQIKDVTKSRMRWSDEMNEDIICFYFNVTESETNTTAYRKKLHEMFIGKYPHLSHITEQRIADQRRAIFNNKTYTNKIHELRRHVAQLDTQHRDARIESLDYSQLGIIRDTSTTHEHADTQTQSPTQTLDTNMEHENNLVCKIEVEFNNAIARFSDTNPETRPYIPKQKSSRKFSLIVSHLNNTIIPKHLNHDLDFVSLHTIIYSAAFAAAICNGTKFNATERRDKNNFSKKPTWQRRIESKIKIYRLEIGRLTQYIEGNRRQKILKTFNEIKLKYKTHSQHEEPNTEPQHFLDTLKQKLNAAANRLRRYLSCTQRKQQNLIFSNREKQFYRNLGNNHADLDQTLGAPTPQELQQYWASIWENPLQHNTNAEWLSKITNSIHIDPMEFENIPVDTFTQIINRIHNWKAPGTDNVHNYWYKKFTSTHPFIHNHISQFIHSPNSLPKFITHGITFMIPKGSDPKNPANYRPITCLQTIYKIITGCISHLIYKHLDFHNILAEQQKGCRKNSQGCKEQLTIDAIVMKQANAKHRNIHTMYIDYKKAFDSVPHSWLQYILTHYKIHPSLLSFLSIAMSQWETKLKICQNNKTVTTESIKIQRGIFQGDSLSPLWFCMALNPLSELLNLSNIGFKLKYNDSHHTLSHLLYMDDIKIYATSNTELKKLADITQTFSEDIQMQFGVDKCKIHSIIRGKSQHNTYLLNSGEQVEPMDEHNTYKYLGFHQSKQIEQKQTKLDLTKKFKIRLNQILRTQLNSRNSIKAINTYAISILTYSFGIINWSQTDLVKLQRVINTHMTVHRKHHPKSCIQRLTLPRRDGGQGLIDIQNLHNNLITKLRTYFYNKSDQSQLHKFITNIDNKLTPLNLNNKNYALNSTSRQRKLDLWSQKSLHGRHLADLGQSHVDKIASNEWLRRGELFPETEAFMIAIQDQVIGTLNYQKHIIRIPDLPNDLCRRCRNSPETIQHITGACKSIVQTDYKHRHDQVAAIIHQNLAHIHSFIDKKIAYYKYNPKAVLENSLLKIYWDRTIITDKTIHCNRPDITVLDKTNRVAFLIDIAVCNTHNLLNTYTEKITKYAELATEIKIQWQIDKVKIIPIVISTTGVIPKSLQINLNTLQMPASTLTLIQKATILNTCRLTRKFLASSTF

SEQ ID NO: 23078 - protein, 1374 aa, Colias croceus
MEKNMDSTNKRYNLRPLPGGRRGTSGANAGCDSMRTVGDGGLSRRVPLEQWTTADRSSSPSSIASSEHSLFSNAPSPSSTHTLFRSSTSSPSSDYSLYSTRTTTVVQEAIAIDPAPTVGQIRARKKWTEDMNRFIWRTYLIITKCETTQMNNYLESLHLQFNSKYSNMQATRQRIGDQKRAILRNKLLPQETLDQIYNEVTKQIQTTHNSYTTPYNTNESTQQTSINSTQNTRMKWTDEMNEEIIRSYLTVTELESDLTAYRSKLHAMFIEKLPHLTHISEQRIADQRRIIFRNKLFAHKICELRKEVEQNLLESNTHLSCNIQPAITDNTNFSLNEEVIDTLNTLTRQDSGIQSHIDTSIPNISHDSHLYSKIETEFNNAIEHFKNVNPETRPYIPKQKPSRKLSQIISHLNTTVIPKTLNHELDFCSLHTIIYSAAYTAALCNGTKFYSNQNIDNTSKNRKPTWQRRIESKIKKYRLEIGRLTQFIAGNRNNKIIKTVNEIKLKYRSHSQHEEPNTEPQHFLDTLKQKLNVASCRLKRYTNCTKRKQQNFTFVNNEKLFYRTLSDNRSETIQTFDAPSSQEFHKFWADLWENPVEHNTNATWLTKTSDTTHITSMEFDNLPIDTFLQVINRTHNWKAPGTDNIHNYWYKKLTCTQPFIHAHINKFIHSPDMLPEFILHGVTYMIPKGGDPQNPANYRPITCLQTIYKIITGCISHLIYHHLDTHHILAEQQKGCRKNRQGCKEQLTIDAIVMKQAQTKNRNIHTMYIDYKKAFDSIPHSWLLQILEHYKIHPMLQSFLGTAMLHWQTKLKLQYQNVSLTTESIKIQRGIFQGDALSPLWFCIALNPLSELLNNTNLGFKLKHNGSYFTLSHLLYMDDIKIYATNSQELKKLADITQTFSTDIKMQFGVDKCKIHSVIKGKSQYNTYLLDSGEQIEPMDEYSTYKYLGFHQSRQIHQKRAKLDLIKKFKVRLNQILRTQLHSRNTVKAINSYAIPVLTYSFGIINWSQTDLLKLQRIINTHMTAHRKHHPRTCIQRLTLPRCDGGRGLIDIQNLHNNLIVKLRTYFQIMSERSQLHKYVTEIDTKLTPLNLSNKNFQPKLYNKQQKLNLWSQKSLHGRHHADLGQQHVDRDASNEWLKRGELFPETEAFMIAIQDQVIDTRNYQKHIIRIPNLPTDLCRRCHSSSETIQHITGACKSIVQTDYKHRHDQVAAIIHQNLAHKHSFVSKKIAYYKYKPNTILENDSIKIYWDRTIITDKTIHFNRPDITVFDKTKNTVLLIDIAVCNTHNLLNTYTEKMSKYIELATEIKRQWQVHTVNIIPIVISTTGVTPKSLISNLKILQMPLSTLSLIQKAVILNTCRLTRKFLSNTPTST

SEQ ID NO: 23079 - protein, 1042 aa, Hestina assimilis
MQSHKQIHRLQELSSQAGAPSNTNTENQTNNIQSTEIETHQIELELKNAIEKFNKVDPETRPYIPKQKSSRKFSKIVQYLNNDVLPQYLNHELEFTALHSLIYSAAFAAATCNGTRFNLDLNRSSNNRDKKPAWQRRLENKIDKYRLEIGRLTQHMAGNRKNRIIKTVEEIKIKYKTHSQHEEPNIELQHFLDTLKQKLSAASNRLKRYLTCTKRKQQNITFLHNEKHFYRTIDSETNKTVLNAEFPPPQHLHKFWSDIWEHPMQHNTTAEWLHKLSSRATNIRQMDIENIDIQTFTQIIKRTHNWKAPGTDKIHNYWYKKLTCIHPYIHNHINQFIQLPHIMPKFVTQGITYMLSKGADPKNPANYRPITCLQTIYKIITGCISAIIYQHVEKHNILAEQQKGCRKNSQGCKEQLTIDAIVMKQAQTSNRNIHTMYIDYQKAFDSVPHSWLLYVLKHYKIHPNLISFLNITMRQWETKLKLINNDTSLITEPIKIQRGIFQGDSLSPLWFCLALNPLSELLNDTQIGFKLKHNNTYHILSHLMYMDDIKIYATKETELTKLADITQSFSTDIKMQFGIDKCKLHSIKRGKSQFNTYTLNTGEQIEPMDEHSTYKYLGFHQSKQIQQKQAKIELTSKFKFRLNQILRTQLNSRNIIKAINTYAIPILTYSFGIINWSQSDLGKLQRMINTHMTTHRKYHPRSCTQRLTLSRRDGGRGLIDIQNLHNSLITKLRTYFYTKAEHVDLHKYIVEIDKNLTPLKLNDRNLQPNLINSQCKIDKWSQKSLHGRHLADLNQEHVDSEASNYWLQRGELFPETEAFMIAIQDQIMDTRNYQKHIIRVPNLPTDLCRRCHSTSETIQHITGACKAIVQTDYKHRHNQVAAIIHQNLAHKYSFLQKKVAYYKYHPSTVLENDLYKIYWDRTIITDRTIHFNRPDITILEKASKTVFIIDIAVCNTHNLINTHSEKISKYIDLASEIKRQWQVDTIKIIPVVISTTGVIPKTLQTSLNTLEMPKSTITLIQKAVILNTCRLTRKFLQNSSSS

SEQ ID NO: 23080 - protein, 1377 aa, Vanessa atalanta
MEKIMESRNKIYSLRPLPGGRRGTSRANAGCHSMRTVGDGGLSRRVPLEKLTTAERSSSPSSNSSSEHSLFSNIPSPSSTHSLFRSLNSSPSSLYSLRSTRSTAVVQKALAINPVPTADLPRVRKKWTDDMNRFIWRTYLIITKCETTHMNSYLESLHKEFDCKFPEMQASRQRLGDQRRAILRRKLLSQSTLDDIRDEVKQQIQTDSHIIHNHSEAHQTNSLMHLTPTLTQNKPTNSRMKWSDAINDEIIRCYFIVTELETNKTAYRKKLHELFIEKHPHLSHITEQRIADQRRLLFNNKININKLHRLKREVEQKLSELNIHPQLQTPGKNITIENFDNNKPKIATDTSNSLTQIRPQTQIQTLITDIDPENHLLQKIKIEFSNAIAQFSDTNPETRPYIPKQKSSRKFSQIVYYLNNTVVPKHLNHDQNFNTLHTIIYSAAYTAAACNGTRFFAAEYTVRNSRNRKPTWQKRIENKIEKYRLEIGRLTQYIAGNRSHKILKTVDEIKIKYKTHSRHEEPNTEPQHFLDTLKQKLNAASNRLKRYLNCTKRKQQNLTFINNEKQFYRTMNTNHEDNTTQNSNTPSPQDLQQFWASIWENPVQHNTNADWLLKSADTGHITAMDFENISIDIFIQIIKRTHNWKAPGTDNIHNYWYKKLTCVHPFIHSHINQFIHSPHTMPKFISHGITYMLSKGADSKNPANYRPITCLQTIYKIITGCISHLIYTHIDHHNILAEQQKGCRKNSQGCKEQLTIDAIVMKQALTKKLNIHTMYIDYKKAFDSVPHSWLLYILQRYKIHPNLITFLRVTMLHWQTKLKLIQNNTSLTTETIKIQRGIFQGDSLSPLWFCIALNPLSELLNKTEMGLQLKHNDSHHTLSHLLYMDDIKIYAKNNAELTKLADITQSFSTDIQMQFGVNKCKIHSIIKGKSQTNSYVLDTGEQIEHMNEHNTYKYLGFHQSKQIEQKQTKLDLIKTFKIRLNQILRTQLNSRNTVKAINTYAIPVLAYSFGIITWSQTDLLKLQRMINTHMSSHRKRHPRSCIQRLTLPRQDGGQGLIDIKNLHNTLTNKLRNYFYSKADHSQLHKHAIEIDKKLTPLNLSNRSIQAKLITRQQKIDLWSQKSLHGRHLADLGQSHVDKDASNEWLRRGELFPETEAFMIAIQDQVIDTRNYQKHIIRLPNLPTDLCRRCHSSSETIQHITGACKSIVQTDYKHRHDQVAAIIHQNLAHAYSLLTKKVAYYKYTPDTVLENSTFKLYWDRTIITDKTIHYNRPDITVIDKNKNIVFIIDIAVCNTHNLLNTYTEKISKYVELATEIKRQWQVDNVKILPIVISTTGVIPKTLSTNLNALQMPASTITLIQKAVILNTCRLTRKFLSSS

SEQ ID NO: 23081 - protein, 1363 aa, Curvie emesia
MKGMNKRYNLRPLPGGRRGTSGANAGCLSMRTVGDGGLSRRVPLEQLSTADQSFSPSSTTHSEQSLFFNFPSPSSTQSFFRSPYTSPSSSYSSSSTWTTAVVQEALATNTASNVRPARVRKKWTEEMNQFIWRTYLLITRNETTQMNNYLSSLHREFNSKYPNMEATRQRLGDQRRAIIQKKLLTQETLTEIRDEVEHQIYTDSYSYINTQNITNIHNTNSSTQITNFTKSRMKWSDEMNEDIICFYLNATESETNMTAYRKKLHQMFIEKYPHLAHITEQRIADQRRVIFNNKTYTNKITELKIHLAQRDTQHNVRIIDSLDCSQSESIRDTSTTYAHTHTQTHSPRQAHFSNTDYEDNLVGKIKVEFNNAIARFCNTDPETRPYIPKQKSSRKFSQIVSHLNTAIIPPHLNHNLDFISLHTIIYSAAFAAAICNGTKFNAIESRYRNNSNRKPTWQSRIEGKIKKYRLEIGRLTQYIAGNRRQKILQTVNEIKIKYKTHSQYEEPNTEPQHFLDTLKQKLNTSANRLKRYISCTQRKQQNLTFTNNEKLFYRNLGSISQDNNQTISTPTPQELKEYWASIWENPLQHNMNADWLSKLSNSAHIDLMEFENIPVDTFVHIINRTHNWKAPGTDNVHNYWYKKFTCTHPFIHNHISQFIHSPNTMPKFITRGITFLIPKGQDHKNPANYRPITCLQTIYKIITGCISHLIYKHIDLNNILAEQQKGCRKNSQGCKEQLTIDGIVMKLAHTRHRNIHTMYIDYKKAFDSVPHSWLRHILSYYKIHPSLISFLSEAMLHWETKLKICQHNQSVFTEFIKIQRGIFQGDSLSPLWFCMALNPLSELLNCSNLGYKLKYDNSYHTLSHLLYMDDIKIYAASNSQLKQLADITQIFSEDIRMQFGVEKCKIHSIIRGKSQHNTYLLNSKEQIEPMDEHSTYKYLGFHQSKHIQHKQTKLDLTKKFKLRLNQILRTQLNSRNSIKAINTYAISILTYSFGIINWSQTDLIKLQRIINTHMTKHRKHHPKSCIQRLTLPRRDGGQGLIDIQNLHNNLVTKLRTYFYIKSAQSQLHRCVTEIDGKLSPLNLNNKNFVLSSVSKQAKLDLWSQKSLHGRHLADLNQTHVDKDASNEWLRRGELFPETEAFAIAIQDQVIDTLNYRKHIIRVTNLPNDICRRCHSCAETIQHITGACKSIVQTDYKHRHDQVAAIIHQNLAHKYTFINEKIAYYKYSPKAVLENSLVKMYWDRTIITDKTVHCNRPDITVLDKTQKIAFLIDIAVCNTHNLLNTYTEKTTKYTELATEIKKQWKIDNVKIIPLIISTTGVVPKSLQTNLNILKMPASTLTLIQKAAILNTCRLTRKFLQSSTF

SEQ ID NO: 23082 - protein, 975 aa, Schrankia costaestrigalis
MDNLVTLTQIQPFSQTLSDQNHENQQIRQIELEFNKALAHFSNTDPETRPFIPKQRLSRKFSQIVHHLNNLIIPKHLNNELDFLKLHTIIYSAAFAAAICNGTKLQFDNNARINKHNRIPRWQRRIEEKIKKYRLEIGRLTQYIAGNRQPKILNTVSEIKLKYKTHSQHEEPNTVPQHFLDTLKQKLNAASSRLKRYTACTKRKQQNLTFKNNERLFYRSLGNSDLNNTNPSPSLPSSQDLHQFWANIWENPVQHKTNADWLSDLKDTTNINNMQSDSISFDTLIQIIKRTHNWKATGSDNIHNNWYKKLTCTHPFIHNHINKFIQTPHTMPTFISHGITYMLPKGTDSINPANYRPITCLQTIYKIITGCISHLIYKHLDIHNILAEQQKGCRKSSQGCKEQLTIDTVIMKQALISKRNIHTMYIDYKKAFDSVPHSWLLHTLQLYKIHPTLIAFLSSTMLHWQTSLKLKQNNAILTTDPIKIQRGIFQGDSLSPLWFCIALNPLSELLNNSDVGFKLKNNSSYHTVSHLLYMDDIKIYATNNTQLIKLADITQTFSTDIHMEFGVDKCKIHSIVKGKSQPNSYILHSGEQIEHMDEHNTYKYLGFHQSKQIQQKDTKLDLTKKFKIRLNQILRSHLDSRNTVKAVNTYAIPVLTYSFGIINWSQTDLQKLQRIINTHMTTHRKHHPRSCVQRLTLPRQDGGQGLIDIQNLHNSLITKLRTYFYYKAEHSQLHKYVNAIDKKLTPLNLSNDIIQPIVTSRQQKIDMWSQKSLHGRHLADLNQPHVDKNASNEWLRRGELFPETEAFMIAIQDQVMDTRNYQKYIIRLPNLPTDLCRRCHSSSETIQHITGACKSIVQTDYKHRHDQVASIIHQNLAFTHSFIPKKVAYYKYKPETVLENNSVKIYWDRTIITDKTIHFNRPDITLLDKTNNTVNIIDIAVCNTHNLLSTFNEKITKYVDLASEIKRQPNKIMEE

SEQ ID NO: 23083 - protein, 1108 aa, Vanessa cardui
MHELFVKKYPHLSHITEQRIADQRRLLFNNKTNINKLDILKREVEQKLAELNVHLPQTTEKHITLQNLDNNKPEISIDTSSALTQIQPQAQLPTLITDTDLENHLLQKVETEFSNAMAQFNDTNPETRPYIPKQKSSRKLSQIVYYLNNTIVPKYLNHDQHFNIVHTIIYSAAYTAALCNGTRFHAAENAVRNSRNKKPTWQRRIENKIEKYRLEIGRLTQYIAGNRSHKIIKTVDEIKIKHKTHSQHEEPNTEPQHFLDTLKQKLNAASHRLKRYLNCTKRKQQNHTFINNEKQFYRTMNTNHKDNTIQNSNTPTPQGLQQFWASIWENPVQHNSNAEWLLKSTNTGHIIAMDFENIPIDTFTQIIKRTHNWKAPGTDNIHNYWYKKLTCVHPFIHSHINQFIHAPHTMPSFISHGITYMVSKGSDPKNPANYRPITCLQTIYKIITGCISHLIYSHIDQHNILVEQQKGCRKNSQGCKEQLTIDAIVMKQAHTKKINIHTMYIDYKKAFDSVPHSWLLYILQHYKIHPNLITFLHATMLQWQTKLKLIQNNTSLTTETIKIQRGIFQGDSLSPLWFCIALNPLSELLNKTEMGIQMKHNDSYHTLSHLLYMDDIKIYAKNNAELTKLADITQSFSTDIQMQFGVEKCKIHSIIKGKSQRNTYILDTGEQIEYMDEHSTYKYLGFHQSKQIEQKQTKLDLIKAFKIRLNQILRTQLNSRNTVKAINTYAIPALIYSFGIISWSQTDLLKLQRMISTHMSHHRKRHPRSCVQRLTLPRQDGGQGLIDIKNLHNTLTDKLRTYFYSKADHSQLHKHAIEIDKKLTPLNLSNRSIQPKLINRQQKIDLWSQKSLHGRHLADLGQSHVDKDASNEWLRRGELFPETEAFMIAIQDQVIDTRNYQKHIIRLPNLPTDLCRRCHSSSETIQHITGACKSIVQTDYKHRHDQVAAIIHQNLAHAHSLITKKVAYYKYTPDTVLENSTFKIYWDRTIITDKAIHYNRPDITVIDKNKNIVIIIDIAVCNTHNLLNTYTEKITKYLELANEIKRQWQVDNIKILPIVISATGVVPKTLSNNLNALQMPSSTIRLIQKAVILNTCRLTRKFLALSDP

SEQ ID NO: 23084 - protein, 1408 aa, Laspeyria flexula
MITHRHTKYMKMRLRNRELPQVGTGAPCNGESRPEPSGSGSLSYSGGGNVSRKTAQSRTVVVRNHQNHQKCSFISKSSSPTPSLSKSSSPTSSSPPSIISSDHMLFSSIPSPASTHSLYRSSNSSPSSSVTSHSTRSTRSTTVVQEALATNPAPTAGQIRARKKWTEDMNRFIWRTYLIITKCETTQLNSYLEPLHQEFSSKFPEMQVTRQRLGDQRRAILRSKLLPQSTIDIIHDEVKQQIHTNSYTNSQHLTHTLPQNDITSNSRIKWTNEMNEDIIRGYFEVTKLETNKTAYRKKLHELFIQIHPHLSHITEQRIADQRRLLFNNRTNINKIDDIKKEVQLKLREPNSQAQLDVQIDITTDSIDHNQYQGTTNTPITLTQTQTLTQTQVVTQTHIEPENYLLCKIETQFNNAILQFKDTNPETRPYIAKQKTSRKFSKIIDLLNNTIVPKHLNHEIDFTTLHTIIYSAAFAAAICNGTRLQLDENSVRNRYDNKPNWQRRIENKIKQYRLEIGRLTQYIAGNRSQKILKTVDEIREKYKSHSQHEELNTEPQHFLDTLKQKLSAASNRLKRYLNCTKRKQQNHTFLNNEKQFYRNLGNNDSHDTNQSPSTPSPQDLQQFWANIWENPTLHNANADWLSKLTDTEHINMMDFENIPIDTFIQIIKRTHNWKAPGTDNIHNYWYKKLTCTHPFIHNHISQFIRSPDTMPTFISHGITFMLPKGSDPKNPANYRPITCLQTIYKIITGCISYLIYKHLDHHNILVEQQKGCRKNSQGCKEQLTIDAIVMKQVHTNNRNIHTMYIDYRKAFDSVPHSWLLYILQHYKIHPMLITFLSTAMLQWQTRLKLIQNKTSLTTEPIKIQRGIFQGDSLSPLWFCIALNPLSELLNNTDMGFKLKHNDSSHTLSHLLYMDDIKIYATNNTQLSKLADITQSFSTDIQMQFGVDKCKIHSIIRGKSQKNSYILDTGEEIDHMDEYSTYKYLGFHQSKQIQHKQTKLDLIKKFKIRLNQILRTQLNSRNSIKAINTYAIPVLTYSFGIIRWSQTDLQKLQRIINTHMTTHRKHHPKSCIQRLTLPRQDGGQGLIDVQNLHNTLVSKLRTYFHNKAEQSELHKYITEIDIKFTPLNLSNRNTQIKLTNRQEKLDTWSQKSLHGRHLADLGQAHVDRDASNEWLRRGELFPETEAFMIAIQDQVINTRNYQKHILHLPNLPSDLCRRCHSSSETIQHITGACKSIVQTDYKHRHDQVASIIHQNLAHIHTFISKKVAYYKYKPETILENSLVKIYWDRTIITDKTIHYNRPDITVLDKTNNSVFLIDIAVCNTHNLLSTYTEKMTKYVELATEIKRQWQVDNVKILPIVISTTGIIPKSLKTNLNFLQMPVSTLTLIQKAAILNTCRLTRKFLASSSST

SEQ ID NO: 23085 - protein, 758 aa, Laspeyria flexula
MMDFENIPIDTFIQIIKRTHNWKAPGTDNIHNYWYKKLTCTHPFIHNHISQFIRSPDTMPTFISHGITFMLPKGSDPKNPANYRPITCLQTIYKIITGCISYLIYKHLDHHNILVEQQKGCRKNSQGCKEQLTIDAIVMKQVHTNNRNIHTMYIDYRKAFDSVPHSWLLYILQHYKIHPMLITFLSTAMLQWQTRLKLIQNKTSLTTEPIKIQRGIFQGDSLSPLWFCIALNPLSELLNNTDMGFKLKHNDSSHTLSHLLYMDDIKIYATNNTQLSKLADITQSFSADIQMQFGVDKCKIHSIIRGKSQKNSYILDTGEEIDHMDEYSTYKYLGFHQSKQIQHKQTKLDLIKKFKIRLNRILRTQLNSRNSMKAINTYAIPVLTYSFGIIRWSQTDLQKLQRIINTHMTTHRKHHPKSCIQRLTLPRQDGGQGLINVQNLHNTLVSKLRTYFHNKAEQSELHKYITEIDIKFTPLNLSNRNTQIKLTNRQDKLGTWSQKSLHGRHLADLGQAHVDRDASNEWLRRGELFPETEAFMIAIQDQVINTRNYQKHILHLPNLPSDLCRRCHSSSETIQHITGACKSIVQTDYKHRHDQVASIIHQNLAHIHTFISKKVAYYKYKPETILENSLVKIYWDRTIITDKTIHYNRPDITVLDKTNNSVFHIDIAVCNTHNLLSTYTEKMTKYVELATEIKRQWQVDNVKILPIVISTTGIIPKSLKTNLNFLQMPVSTLTLIQKAAILNTCRLTRKFLASSSST

SEQ ID NO: 23086 - protein, 807 aa, Vanessa atalanta
MNTNHEDNTTQNSNTPSPQDLQQFWASIWENPVQHNTNADWLLKSADTGHITAMDFENISIDIFIQIIKRTHNWKAPGTDNIHNYWYKKLTCVHPFIHSHINQFIHSPHTMPKFISHGITYMLSKGADSKNPANYRPITCLQTIYKIITGCISHLIYTHIDHHNILAEQQKGCRKNSQGCKEQLTIDAIVMKQALTKKLNIHTMYIDYKKAFDSVPHSWLLYILQRYKIHPNLITFLRVTMLHWQTKLKLIQNNTSLTTETIKIQRGIFQGDSLSPLWFCIALNPLSELLNKTEMGLQLKHNDSHHTLSHLLYMDDIKIYAKNNAELTKLADITQSFSTDIQMQFGVNKCKIHSIIKGKSQTNSYVLDTGEQIEHMNEHNTYKYLGFHQSKQIEQKQTKLDLIKTFKIRLNQILRTQLNSRNTVKAINTYAIPVLTYSFGIITWSQTDLLKLQRMINTHMSSHRKRHPRSCIQRLTLPRQDGGQGLIDIKNLHNTLTNKLRNYFYSKADHSQLHKHAIEIDKKLTPLNLSNRSIQAKLITRQQKIDLWSQKSLHGRHLADLGQSHVDKDASNEWLRRGELFPETEAFMIAIQDQVIDTRNYQKHIIRLPNLPTDLCRRCHSSSETIQHITGACKSIVQTDYKHRHDQVAAIIHQNLAHAYSLLTKKVAYYKYTPDTVLENSTFKLYWDRTIITDKTIHYNRPDITVIDKNKNIVFIIDIAVCNTHNLLNTYTEKISKYVELATEIKRQWQVDNVKILPIVISTTGVIPKTLSTNLNALQMPASTITLIQKAVILNTCRLTRKFLSSS

SEQ ID NO: 23087 - protein, 1377 aa, Vanessa atalanta
MEKIMESRNKIYSLRPLPGGRRGTSGANAGCHSMRTVGDGGLSRRVPLEKLTTAERSSSPSSNSSSEHSLFSNIPSPSSTHSLFRSLNSSPSSLYSLRSTRSTAVVQKALAINPVPTADLPRVRKKWTDDMNRFIWRTYLIITKCETTHMNSYLESLHKEFDCKFPEMQASRQRLGDQRRAILRRKLLSQSTLDDIRDEVKQQIQTDSHIIHNHSEAHQTNSLMHLTPTLTQNKPTNSRMKWSDAINDEIIRCYFIVTELETNKTAYRKKLHELFIEKHPHLSHITEQRIADQRRLLFNNKININKLHRLKREVEQKLSELNIHPQLQTPGKDITIENFDNNKPKIATDTSNSLTQIRPQTQIQTLITDIDPENHLLQKIEIEFSNAIAQFSDTNPETRPYIPKQKSSRKFSQIVYYLNNTVVPKHLNHDQNFNTLHTIIYSAAYTAAACNGTRFFAAEYAVRNSRNRKPTWQKRIENKIEKYRLEIGRLTQYIAGNRSHKILKTVDEIKIKYKTHSRHEEPNTEPQHFLDTLKQKLNAASNRLKRYLNCTKRKQQNLTFINNEKQFYRTMNTNHEDNTTQNSNTPSPQDLQQFWASIWENPVQHNTNADWLLKSADTGHITAMDFENISIDIFIQIIKRTHNWKAPGTDNIHNYWYKKLTCVHPFIHSHINQFIHSPHTMPKFISHGITYMLSKGADSKNPANYRPITCLQTIYKIITGCISHLIYTHIDHHNILAEQQKGCRKNSQGCKEQLTIDAIVMKQALTKKLNIHTMYIDYKKAFDSVPHSWLLYILQRYKIHPNLITFLRVTMLHWQTKLKLIQNNTSLTTETIKIQRGIFQGDSLSPLWFCIALNPLSELLNKTEMGLQLKHNDSHHTLSHLLYMDDIKIYAKNNAELTKLADITQSFSTDIQMQFGVNKCKIHSIIKGKSQTNSYVLDTGEQIEHMNEHNTYKYLGFHQSKQIEQKQTKLDLIKTFKIRLNQILRTQLNSRNTVKAINTYAIPVLTYSFGIITWSQTDLLKLQRMINTHMSSHRKRHPRSCIQRLTLPRQDGGQGLIDIKNLHNTLTNKLRNYFYSKADHSQLHKHAIEIDKKLTPLNLSNRSIQAKLITRQQKIDLWSQKSLHGRHLADLGQSHVDKDASNEWLRRGELFPETEAFMIAIQDQVIDTRNYQKHIIRLPNLPTDLCRRCHSSSETIQHITGACKSIVQTDYKHRHDQVAAIIHQNLAHAYSLLTKKVAYYKYTPDTVLENSTFKLYWDRTIITDKTIHYNRPDITVIDKNKNIVFIIDIAVCNTHNLLNTCTEKISKYVELATEIKRQWQVDNVKILPIVISTTGVIPKTLSTNLNALQMPASTITLIQKAVILNTCRLTRKFLSSS

SEQ ID NO: 23088 - protein, 1355 aa, Pheosia tremula
MRTVGDGGLNRRVPLEQYTTADQSSSPSSIAHSEPSLFSNIPSPSSIHSLFRSPNPSPSSSYSSRTTRSTAVVQEAFAINPAPTAGYSRARKKWTEDMNHFIWRTYLLITKCETTQMNNYLGLLHQEFDNRYPEMQTTRQRIGDQRRAIIRRKLLSQNVLDEISAEVRENLQTQISQTEYNSYTHNPNHPVHPTLLPSQNTNRHARMKWSDEMNDEIVRGYFELTELEINKTAYRKKLYDYFIERYPHLSHLTEQRIADQRRLIFNNKIYTSRIKQLKREIELKLKAPYNHPLTQVEHDPIIAEQSHQSIPESNIDMTLTQIQTYEQPHTLETNTDNENNPIQIQSNEMEAKIEIEFNHAIARFSEIDPETRPYIPKQKTSRKFSQIVQCLNNVILPKHLHEAIDFTSLHTLIYSAAFAAATCNGTRFNLDNNHVLNDRNGKPTWQRRIEKRIEKYRLEIGRLTQYIAGNRRQKIVKTVEEIKIKYKTHSQYEEPNTEPQHFLDTLKQKLNAVSNRLKRYLTCTKRKQQNSTFTNNEKQFYRTLGNNHQNNTTLPSESPTPQHLQEFWANIWENPVQHDTNAEWLPKISPHTAHINQMDFENIPIDIFTQVVKRTHNWKAPGTDNIYNYWYKKLTCTHPFIYTHINQFIQSPNTMPQFITHGITYMLPKGSDPKNPANYRPITCLQTIYKIITGCISAIIYHHLNLHNVLAEQQKGCRKNSQGCKEQLTIDAIVMKQAQTKNRNIHTMYIDYKKAFDSVPHSWLLYVLEYNKIHPNLISFLNEAMLHWKTKLKLIGNNKSLITGSIKIQRGIFQGDALSPLWFCLALNPLSNLLNDTNIGFKLKHNNTHHTLSHLMYMDDIKIYATNSTELTELVNITQSFSKDIQMQFGVDKCKIHSINRGKSQHNTYTLDTGEQIDPMDEHSTYKYLGFHQCKQIQQKQTKIELTTKFKLRLNQILRTQLNSRNITKAINTYAIPILTYSFGVINWSQSDLVKLQRIINTHMTTHRKHHPRSCIQRLTLPRREGGRGLIDIQNLNNSLVTKLRNYFYAKAEHSELHKYIAHIDNKLTPLNLNDRSMQPNITSRQEKTDKWSQKSLHGRHLSDLSQTHVDKEASNEWLRRGELFPETEAFMIAIQDQIIDTRNYQKHIIRIPNLSTDLCRRCHSSSETIQHITGACKSIVQTDYKHRHDQVAAIVHQNIAHKYLFISQKVAYYKYQPSTVLENSLYKIYWDRTIITDRTIHFNRPDITILDKTKKTVFIIDIAVCNTHNLLTTHTEKMTKYIDLATEIKKQWQVDTVRILPIVISTTGVIPRTLQTNLNVLQMPKSTLTLIQKAVILNTCRLTRKFLQNSSSSP

SEQ ID NO: 23089 - protein, 1384 aa, Pheosia gnoma
MESQVKRYSLRPLPGGRRGASGADAGCHSMRTVGDGGLNRRVPLEQYTTADQSSSPSSIAHSEPSLFSNIPSPSSIHSLFRSPNPSPSSSYSSRTTRSTAVVQEAFAINPAPTAGYSRARKKWTEDMNRFIWRTYLLITKCETTQMNNYLGLLHQEFDNRYPEMQTTRQRIGDQRRAIIRRKLLSQNVLDEISAEVRENLQTQISQTEYNSYTHNPNHPVHPTLLPSQNTNRHARMKWSDEINDEIVRGYFELTELEINKTAYRKKLYDYFIERYPHLSHLTEQRIADQRRLIFNNKIYTSRIKQLKREIELKLKAPYNHPLTQVEHDPIIAEQSHQSIPESNIDMTLTQIQTYEQPHTLETNTDNENNPIQIQSNEMEAKIEIEFNHAIARFSEIDPETRPYIPKQKTSRKFSQIVQCLNNVILPKHLHEAIDFTSLHTLIYSAAFAAATCNGTRFNLDNNNVLNDRNGKPTWQRRIEKRIEKYRLEIGRLTQYIAGNRSQKIVKTVEEIKIKYKTHSQYEEPNTEPQHFLDTLKQKLNAVSNRLKRYLTCTKRKQQNSTFTNNEKQFYRTLGNNHQNNTTLPSESPIPQHLQEFWANIWENPVQHDTNAEWLPKISPHTAHINQMDFENIPIDIFTQVVKRTHNWKAPGTDNIYNYWYKKLTCTHPFIYTHINQFIQSPNTMPQFITHGITYMLPKGSDPKNPANYRPITCLQTIYKIITGCISAIIYHHLNLHNVLAEQQKGCRKNSQGCKEQLTIDAIVMKQAQTKNRNIHTMYIDYKKAFDSVPHSWLLYVLEYNKIHPNLISFLNEAMLHWKTKLKLIGNNKSLITGSIKIQRGIFQGDALSPLWFCLALNPLSNLLNDTNTGFKLKHNNTHHTLSHLMYMDDIKIYATNSTELTELVNITQSFSKDIQMQFGVEKCKIHSINRGKSQHNTYTLDTGEQIDPMDEHSTYKYLGFHQCKQIQQKQTKIELTTKFKLRLNQILRTQLNSRNITKAINTYAIPILTYSFGVINWSQSDLVKLQRIINTHMTTHRKHHPRSCIQRLTLPRREGGRGLIDIQNLNNSLVNKLRNYFYAKAEHSELHKYIAHIDNKLTPLNLNDRSMQPNITSRQEKTDKWSQKSLHGRHLSDLSQTHVDKLASNEWLRRGELFPETEAFMIAIQDQIIDTRNYQKHIIRIPNLSTDLCRRCHSSSETIQHITGACKSIVQTDYKHRHDQVAAIVHQNIAHKYLFISQKVAYYKYQPSTVLENSLYKIYWDRTIITDRTIHFNRPDITILDKTKKTVFIIDIAVCNTHNLLTTHTEKMTKYIDLATEIKKQWQVDTVRILPIVISTTGVIPRTLQTNLNVLQMPKSTLTLIQKAVILNTCRLTRKFLQNSSSSP

SEQ ID NO: 23090 - protein, 1359 aa, Apodemia chisosensis
MKGTNKRYNLRPLPGGRRGASGADAGCHSIRTVGDGGLNRRVPLEQSSTADRSFSPSSTTHSEHSLFHNFSSPSSTHSLFRSSNTSPSSSYSSCSTKTTAVVQEALAINSAPNVCPSRARKKWNEDMNRFIWRTYLVITKNETTQMSNYLGPLHKEFNCKYPDMKATRQRLGDQKRAILRRKLLSQETLNEIRNEINQQTYANSITQNSNNAHFIHNSTQIIDVTKSRMRWSDEMNEDIICFYFNVTEAETNMTAYRKKLHEMFIGKYPHLSHITEQRIADQRRAIFNNKAYTSKIHESRRQVAQLDIQHRQSIIESLDYSQSESIRDTSTTQAHADTQTQSLTQTLNTSMEHENNLICKIEVEFNKAIARFSDTNPETRPYIPKQKSSRKFSLIVSHLNNTILPKHLNHDLDFVSLHTLIYSAAFAAAISNGTKFNTNENRDRNNFSKKPTWQRRIESKIKIYRLEIGRLTQYIQGNRRQKIIKTFNEIKVKYKTHSQHEEPNTEPHHFLDTLKQKLNAAANRLRRYLSCTQRKQQNLTFSNREKQFYRNLGKNHPDNNQTLCAPSLQDLHQYWASIWENPLQHNTNADWLSKLTNSTHIDTMEFENIPIDTFTQIINRIHNWKAPGTDNVHNYWYKKFTSTHPFIINHISKFIHSPSSLPKFITHGITFMIPKGSDPKNPANYRPITCLQTIYKIMTGCISHLIYKHLDFHNILAEQQKGCRKNSQGCKEQLTIDAIVMKQAHTKHRNIHTMYIDYKKAFDSVPHSWLQHILTYYKIHPSLISFLNIAMSQWETKLKIYQNNKSVTTESIKIQRGIFQGDSLSPLWFCMALNPLSELLNLSNIGFKLKYNDSHHTLSHLLYMDDIKIYATSNTELKKLSDITQTFSEDIQMQFGVDKCKIHSIIRGKSQHNTYLLNSGEQVEPMDEHSTYKYLGFHQSKQIEQKQTKLDLIKNFKIRLNQVLRTQLNSRNSIKAINTYAISILTYSFGIINWSQTDLVKLQRIINTHMTMHRKHHPKSCIQRLTLPRRDGGQGLIDIQNLHNSLILKLRTYFYNKSDQSQLHKYITNIDDKLTPLNLNNKNFELNSTSRQRKLDLWSQKSLHGRHLADLSQSHVDRAASNEWLRRGELFPETEAFMIAIQDQVIDTLNYQKHIIRVPDLPNDLCRRCRSSSETIQHITGACKSIVQTDYKHRHDQVAAIIHQNLAHIHSFVDKKIAYYKYNPKAVLENSLLKIYWDRTIITDKTIHCNRPDITVLDKRNRVAFLIDIAVCNTHNLLNTYTEKITKYAELATEIKIQWQIDKVKIIPIVISTTGVIPKSLQINLNTLQMPASTLTLIQKAAILNTCRLTRKFLTSSTF

SEQ ID NO: 23091 - protein, 1458 aa, Schrankia costaestrigalis
MSPSIYFATICLTVANIIIIIITPPGDHLVVVGGLTDTGYWNIAYNIFCRLNRTNILMIIYNNNTYPTNDPKTPKNLMESRPSKYNLRPLPGVRRGTSGADAGCHSMRTVGDGGLNRRVPLDKNTTAERSSSPSSIITLSEHSPFSDIPSPSSTHSLFRSSHSSPHTSPCSSPSSTITLRSTRSTAVVQEALATNPASTAGPSRARKRWTEDMNRFIWRTYLLITKCETTQLNSYLELLHQEFDNKFPDMQASRQRVGDQRRAILRRKLLTQTTFDEIFNEINQLINTHSTNHSLTRYTNTQLTTPMLTQYSTTSSRIRWSDEMNDDIIRFYFEVTKLETDKTAYRKKLHEIFIEKHPQLSHITEQRIADQRRILFNNKIYTNKINNIKAEVQQKLNEYNTELELDTLHVNTQTLNTTETIVDNTDHQNSMDTLATLTQIQPFTQTLSDPDFENQQISQIELEFNKALSHFSNTDPESRPFIPKQKLSRKFSQIIYHLNNIIIPKHLNHELDFLKLHTIIYSSAFAAAICNGTRLQLDNNTRINKQNRIPTWQRRIEEKIKKYRLEIGRLTQYIAGNRQPKILNTVNEIKLKYKTHSQYEEPNSVPQHFLDTLKQKLNAASSRLKRYMACTKRKQQNLTFKNNERQFYRSLGNSNNTNPSPTLPSSQDLHQFWANIWENPVQHKTNADWFSNLRDTTHINNMNSDFISIDTLIQIIKRTHNWKAPGTDNIHNYWYKKLTCTHPFIHNHINNFIQTPHTMPNFISHGITYMLPKGTDSINPANYRPITCLQTIYKIITGCISHLIYKHLDVHKVLAEQQKGCRKSSQGCKEQLTIDTIIMKQAHIGKRNIHTMYIDYKKAFDSVPHSWLLHTLHLYKIHPTLITFLSSTMLHWQTSLKLIQNNSTLTTDPIKIQRGIFQGDSLSPLWFCIALNPLSELLNNTNIGFKLKHNNSCHTISHLLYMDDIKIYSTNNTQLTELADITQTFSTDIYMQFGVDKCKIHSIVKGKSQPNSYILNSGEQIEHMDEHNTYKYLGFHQSKQIQQKETKLDLTKKFKIRLNQILRTHLDSRNTVKAINTYAIPVLTYSFGIINWSQTDLLKLQRMINTHMTTHRKHHPRSCVQRLTLPRQDGGQGLIDIQNLHNTLVTKLRTYFHNKAENSELHKYVNAIDKKLTPLNLSNNISQPIITSRQQKIDIWSQKSLHGRHLADLNQPHVDKNASNEWLRRGELFPETEAFMIAIQDQVIDTRNYQKYIIRLPNLTTDLCRRCHSSSETIQHITGACKSIVQTDYKHRHDQVASIIHQNLAYTHSFIHKRVAYYKYKPETVLENNSVKLYWDRTIITDKTIHFNRPDITLLDKTKNIVYLIDIAVCNTHNLLSTFNEKITKYVDLASEIKRQWQVDNVKILPIVLSTTGVIPKSLSTSLNSLQMPFSTTILLQKAAILNTCRLTRKFLATSTSP

SEQ ID NO: 23092 - protein, 1380 aa, Schrankia costaestrigalis
MESRPSKYNLRPLPGVRRGTSGADAGCHSMRTVGDGGLNRRVPLDKNTTAGRSSIITLSEHSPFSDIPSPSSTHSLFRSSHSSPHTSPCSSPSSTITLRSIRSTAVVQEALATNPASTAGPSRARKRWTKDMNRFIWRTYLLITKCETTQLNSYLELLHQEFDNKFPDMQASRQRVGDQRRAILRRKLLTQITFDEIFNEINQLINTHSTNHSLTRYTNTQLTTPMLTQYSTTSSRIRWSDEMNDDIIRFYFEVTKLETDKTAYRKKLHEIFIEKHPQLSHITEQRIADQRRILFNNKIYTNKINNIKAEVQQKLNEYNTELELDTLHVNTQTLNTTETIVDNTDHQNSMDTLATLTQIQPFTQTLSDPDFENQQISQIELEFNKALSHFSNTDPESRPFIPKQKLSRKFSQIIYHLNNIIIPKHLNHELDFLKLHTIIYSSAFAAAICNGTRLQLDNNTRINKQNRIPTWQRRIEEKIKKYRLEIGRLTQYIAGNRQPKILNTVNEIKLKYKTHSQYEEPNSVPQHFLDTLKQKLNAASSRLKRYMACTKRKQQNLTFKNNERQFYRSLGNSNSNNTNPSPTLPSSQDLHQFWANIWENPVQHKTNADWFSNLRDTTHINNMNSDCISIDTLIQIIKRTHNWKAPGTDNIHNYWYKKLTCTHPFIHNHINNFIQTPHTMPNFISHGITYIMLPKGTDSINPANYRPITCLQTIYKIITGCISHLIYKHLDVHKVLAEQQKGCRKSSQGCKEQLTIDTIIMKQAHIGKRNIHTMYIDYKKAFDSVPHSWLLHTLHLYKIHPTLITFLSSTMLHWQTSLKLIQNNSTLTTDPIKIQRGIFQGDSLSPLWFCIALNPLSELLNNTNIGFKLKHNNSCHTISHLLYMDDIKIYSTNNTQLTELADITQTFSTDIHMQFGVDKCKIHSIVKGKSQPNSYILNSGEQIEHMDEHNTYKYLGFHQSKQIQQKETKLDLTKKFKIRLNQILRTHLDSRNTVKAINTYAIPVLTYSFGIINWSQTDLLKLQRMINTHMTTHRKHHPRSCVQRLTLPRQDGGQGLIDIQNLHNTLVTKLRTYFHNKAENSELHKYVNAIDKKLTPLNLSNNITQPIITSRQQKIDIWSQKSLHGRHLADLNQPHVDKNASNEWLRRGELFPETEAFMIAIQDQVIDTRNYQKYIIRLPNLTTDLCRRCHSSSETIQHITGACKSIVQTDYKHRHDQVASIIHQNLAYTHSFIHKKVAYYKYKPETVLENNSVKLYWDRTIITDKTVHYNRPDITLLDKTKNIVYLIDIAVCNTHNLFSTFNEKKTKYVDLASEIKRQWQVDNVKILPIVISTTGVIPKSLLTSLKYLQMQVSTTILLQKAAILNTCRLTRKFLTSSTLN

SEQ ID NO: 23093 - protein, 1384 aa, Pheosia tremula
MESQVKRYSLRPLPGGRRGASGADAGCHSMRTVGDGGLNRRVPLEQYTTADQSSSPSSIAHSEPSLFSNIPSPSSIHSLFRSPNPSPSSSYSSRTTRSTAVVQEAFAINPAPTAGYSRARKKWTEDMNHFIWRTYLLITKCETTQMNNYLGLLHQEFDNRYPEMQTTRQRIGDQRRAIIRRKLLSQNVLDEISAEVRENLQTQISQTEYNSYTHNPNHPVHPTLLPSQNTNRHARMKWSDEMNDEIVRGYFELTELEINKTAYRKKLYDYFIERYPHLSHLTEQRIADQRRLIFNNKIYTSRIKQLKREIELKLKAPYNHPLTQVEHDPIIAEQSHQSIPESNIDMTLTQIQTYEQPHTLETNTDNENNPIQIQSNEMEAKIEIEFNHAIARFSEIDPETRPYIPKQKTSRKFSQIVQCLNNVILPKHLHEAIDFTSLHTLIYSAAFAAATCNGTRFNLDNNNVLNDRNGKPTWQRRIEKRIEKYRLEIGRLTQYIAGNRRQKIVKTVEEIKIKYKTHSQYEEPNTEPQHFLDTLKQKLNAVSNRLKRYLTCTKRKQQNSTFTNNEKQFYRTLGNNHQNNTTLPSESPTPQHLQEFWANIWENPVQHDTNAEWLPKISPHTAHINQMDFENIPIDIFTQVVKRTHNWKAPGTDNIYNYWYKKLTCTHPFIYTHINQFIQSPNTMPQFITHGITYMLPKGSDPKNPANYRPITCLQTIYKIITGCISAIIYHHLNLHNVLAEQQKGCRKNSQGCKEQLTIDAIVMKQAQTKNRNIHTMYIDYKKAFDSVPHSWLLYVLEYNKIHPNLISFLNEAMLHWKTKLKLIGNNKSLITGSIKIQRGIFQGDALSPLWFCLALNPLSNLLNDTNTGFKLKHNNTHHTLSHLMYMDDIKIYATNSTELTELVNITQSFSKDIQMQFGVDKCKIHSINRGKSQHNTYTLDTGEQIDPMDEHSTYKYLGFHQCKQIQQKQTKIELTTKFKLRLNQILRTQLNSRNITKAINTYAIPILTYSFGVINWSQSDLVKLQRIINTHMTTHRKHHPRSCIQRLTLPRREGGRGLIDIQNLNNSLVTKLRNYFYAKAEHSELHKYIAHIDNKLTPLNLNDRSMQPNITSRQEKTDKWSQKSLHGRHLSDLSQTHVDKEASNEWLRRGELFPETEAFMIAIQDQIIDTRNYQKHIIRIPNLSTDLCRRCHSSSETIQHITGACKSIVQTDYKHRHDQVAAIVHQNIAHKYLFISQKVAYYKYQPSTVLENSLYKIYWDRTIITDRTIHFNRPDITILDKTKKTVFIIDIAVCNTHNLLTTHTEKMTKYIDLATEIKKQWQVDTVRILPIVISTTGVIPRTLQTNLNVLQMPKSTLTLIQKAVILNTCRLTRKFLQNSSSSP

SEQ ID NO: 23094 - protein, 903 aa, Telicota sp.
MDMRIKKYRFEIGRLTQYVAGNKNDRIVKTVEEIKVKYKTHAQYEEPNTEPQHFLDTLKQKLNAISSRLKRYLNCTMRKKQNKTFINNEKQFYRMLGTNQQCNSIQTADMPSAETLQQFWTNIWENPVEHNADIDWFHKLASTVDISPMDSENISIDTFTQIVNNTHNWKAPGTDNIHNYWYKKLTCTHPFIHNHMCQFINTPHLMPAFLTHGVTYMLRKNNETKNPANYRPIICLQTIYKILTGCISAKIYQHLEQHNILAEQQKGARKNSQGCKEQLTIDAIVMKQAQTRNRNIHTMYIDYKKAFDSVPHSWLIYVLQHYKIHPGLINFLSTAMLQWETKLKLSCHNTSITTEPIKIQRGIFQGDSLSPLWFCIALNPLSELLNKTNAGYKLKYSKTHHTLSHLMYMDDIKIYATNKIELSKLADITQTFSNDIKMQFGVDKCKIHSITRGKTEQNTYTLDTGEQIDAIDEQSTYKYLGFHQSRQIEQRQTKVELTNKFKFRLNQILRSHLNARNIIKAINTYAIPVLTYSFGIIHWSQTELIKLQRTVNTCMTTHRKHHPRSCIQRLTLPRRKGGRGLIDIKNLHNNLITKLRTYFHTKAEHIQLHKYVTDIDKKFTPLNLHNRNIQLNTISIQQKLGTWSQKSLHGRHLSDLSQTHVDKEASNEWLRRGELFPETEAFMLAIQDQVIDTRNYQKHITHIPNLTNDLCRRCHSSSETIQHITGACRTIVQTDYKHRHDQIASILHQNLAYKHGFIKKKDAYYKYQPSTVLENSTHKIYWDRTIITDKTIHFNRPDITVLEKNSKTVLIIDIAVCNTHNLVTTYSEKMSKYIDLATEIKKQWQVDTVKIIPIVISSTGVIPHSLPTNLTKLQMPRSTLTLMQKAVILNTCRITRKFLSSSS

SEQ ID NO: 23095 - protein, 1408 aa, Laspeyria flexula
MITHRHSKYMKMRLRNRELPQVGTGAPCNGESRPEPSGSGSLSYSGGGNVSRKTAQSRTVVVQNHQNHQKCSFISKSSSPTPSLSKSSSPTSSSPPSIISSDHMLFSSIPSPASTHSLYRSSNSSPSSSVTSHLTRSTRSTTVVQEALATNPAPTAGQIRARKKWTEDMNRFIWRTYLIITKCETTQLNSYLEPLHQEFSSKFPEMQVTRQRLGDQRRAILRSKLLPQSTIDIIHDEVKQQIHTNSYTNSQHLTHTLPQNDITSNSRIKWTNEMNEDIIRGYFEVTKLETNKTAYRKKLHELFIQIHPHLSHITEQRIADQRRLLFNNRTNINKIDDIKKEVQLKLREPNSQAQLDVQIDIITDSIDHNQYQGTTDTPITLTQTQTLTQTQVVTQTHIEPENYLLCKIETQFNNAILQFKDTNPETRPYIPKQKTSRKFSKIIDLLNNTIVPKHLNHEIDFTTLHTIIYSAAFAAAICNGTRLQLDENCVRNRYDNKPNWQRRIENKIKQYRLQIGRLTQYIAGNRNQKILKTVDEIREKYKSHSQHEELNTEPQHFLDTLKQKLSAASNRLKRYLNCTKRKQQNHTFLNNEKQFYRNLGNNDSHDTNQSPSTPSPQDLQQFWANIWENPTLHNANADWLSKLTDTEHINMMDFENIPIDTFIQIIKRTHNWKAPGTDNIHNYWYKKLTCTHPFIHNHISQFIRSPDTMPTFISHGITFMLPKGSDPKNPANYRPITCLQTIYKIITGCISYLIYKHLDHHNILVEQQKGCRKNSQGCKEQLTIDAIVMKQVHTNNRNIHTMYIDYRKAFDSVPHSWLLYILQHYKIHPMLITFLSTAMLQWQTRLKLIQNKTSLTTEPIKIQRGIFQGDSLSPLWFCIALNPLSELLNNTDMGFKLKHNDSSHTLSHLLYMDDIKIYATNNTQLSKLADITQSFSTDIQMQFGVDKCKIHSIIRGKSQKNSYILDTGEEIDHMDEYSTYKYLGFHQSKQIQHKQTKLDLIKKFKIRLNRILRTQLNSRNSIKAINTYAIPVLTYSFGIIRWSQTDLQKLQRIINTHMTTHRKHHPKSCIQRLTLPRQDGGQGLIDVQNLHNTLVSKLRTYFHNKAEQSELHKYITEIDIKFTPLNLSNRNTQIKLTNRQDKLGTWSQKSLHGRHLADLGQAHVDRDASNEWLRRGELFPETEAFMIAIQDQVINTRNYQKHILHLPNLPSDLCRRCHSSSETIQHITGACKSIVQTDYKHRHDQVASIIHQNLAHIHTFISKKVAYYKYKPETILENSLVKIYWDRTIITDKTIHYNRPDITVLDKTNNSVFLIDIAVCNTYNLLSSYTEKMTKYVELATEIKRQWQVDNVKILPIVISTTGIIPKSLKTNLNFLQMPVSTLTLIQKAAILNTCRLTRKFLASSSST

SEQ ID NO: 23096 - protein, 1383 aa, Schrankia costaestrigalis
MESRQSKYNLRPLPGVRRGTSGADAGCHSMRSVGDGGLSRRVPLEKNTTAERSSTPSSIITLSEHSPFSDIPSPSSTHTLFRSSHFSPHSSPCSSPSSSITSRSTRSTAVVQEALATNPASTAGPSRARKRWTEDMNRFIWRTYLLITKCETTQLNSYLELLHQEFDSKFPEMQASRQRVGDQRRAILRRKLLTQATLDEIFNEISRLINTNSTNYSSTRNTNTQLTTPMITQHSTTSSRIRWSDEMNDDIIRFYFEITKLETDKTAYRKKLHEIFIEKHSQLSHITEQRIADQRRILFNNKIYANKIKDIKTDVQQELTENNTELQLDTLHVNTPTLNTTESTVDQTEHQNTMDNLVTLTQIQPFTQTLSDQNHENQQIRQIELEFNKALAHFSNTDPETRPFIPKQRLSRKFSQIVHHLNNLIIPKHLNNELDFLKLHTIIYSAAFAAAICNGTKLQFDNNARINKHNRIPRWQRRIEEKIKKYRLEIGRLTQYIAGNRQPKILNTVSEIKLKYKTHSQHEEPNTVPQHFLDTLKQKLNAASSRLKRYTACTKRKQQNLTFKNNERLFYRSLGNSDLNNTNPSPSLPSAQDLHQFWANIWENPVQHKTNADWLSDLKDTTNINNMQSDSISFDTLIQIIKRTHNWKATGSDNIHNYWYKKLTCTHPFIHNHINKFIQTPHTMPTFISHGITYMLPKGTDSINPANYRPITCLQTIYKIITGCISHLIYKHLDIHNILAEQQKGCRKSSQGCKEQLTIDTVIMKQALISKRNIHTMYIDYKKAFDSVPHSWLLHTLQLYKIHPTLIAFLSSTMLHWQTSLKLKQNNAILTTDPIKIQRGIFQGDSLSPLWFCIALNPLSELLNNSDVGFKLKNNSSYHTVSHLLYMDDIKIYATNNTQLIKLADITQTFSTDIHMEFGVDKCKIHSIVKGKSQPNSYILHSGEQIEHMDEHNTYKYLGFHQSKQIQQKDTKLDLTKKFKIRLNQILRSHLDSRNTVKAVNTYAIPVLTYSFGIINWSQTDLQKLQRIINTHMTTHRKHHPRSCVQRLTLPRQDGGQGLIDIQNLHNSLITKLRTYFYYKAEHSQLHKYVNAIDKKLTPLNLSNDIIQPIVTSRQQKIDMWSQKSLHGRHLADLNQPHVDKNASNEWLRRGELFPETEAFMIAIQDQVMDTRNYQKYIIRLPNLPTDLCRRCHSSSETIQHITGACKSIVQTDYKHRHDQVASIIHQNLAFTHSFIPKKVAYYKYKPETVLENNSVKIYWDRTIITDKTIHFNRPDITLLDKTNNTVNIIDIAVCNTHNLLSTFNEKITKYVDLASEIKRQWQVDNVKILPIVISTTGVIPKSLLTSLNSLQMPVSTTILLQKAAILNTCRLTRKFLASSTSP

SEQ ID NO: 23097 - protein, 833 aa, Schrankia costaestrigalis
MACTKRKQQNLTFKNNERQFYRSLGNSNSNNTKPSPTLPSSQDLHQFWANIWENPVQHKTNADWFSNLRDTTHINNMNSDCISIDTLIQIIKRTHNWKAPGTDNIHNYWYKKLTCTHPFIHNHINNFIQTPHTMPNFISHGITYMLPKGTDSINPANYRPITCLQTIYKIITGCISHLIYKHLDVHKVLAEQQKGCRKSSQGCKEQLTIDTIIMKQAHIGKRNIHTMYIDYKKAFDSVPHSWLLHTLHLYKIHPTLITFLSSTMLHWQTSLKLIQNNSTLTTDPIKIQRGIFQGDSLSPLWFCIALNSLSELLNNTNIGFKLKHNNSCHTISHLLYMDDIKIYSTNNTQLTELADITQTFSTDIHMQFGVDKCKIHSIVKGKSQPNSYILNSGEQIEHMDEHNTYKYLGFHQSKQIQQKETKLDLTKKFKIRLNQILRTHLDSRNTVKAINTYAIPVLTYSFGIINWSQTDLLKLQRMINTHMTTHRKHHPRSCVQRLTLPRQDGGQGLIDIQNLHNTLVTKLRTYFHDKAENSELHKYVNAIDKKLTPLNLSNNITQPIITSRQQKIDIWSQKSLHGRHLADLNQPHVDKNASNEWLRRGELFPETEAFMIAIQDQVIDTRNYQKYIIRLPNLTTDLCRRCHNSSETIQHITGACKSIVQTDYKHRHDQVASIIHQNLAYTHSFIHKKVAYYKYKPETVLENNSVKLYWDRTIITDKTVHFNRPDITLLDKTKNIVYLIDIAVCNTHNLLSTFNEKLTKYVDLASEIKRQWQVDNVKILPIVISTTGVIPKSLLTSLNSLQMQVSTTILLQKAAILNTCRLTRKFLTSSTLN

SEQ ID NO: 23098 - protein, 1405 aa, Laspeyria flexula
MITHRHKKYMKMRLRNRELPQVGTGAPCNGESRPEPSGSGSLSYSGGGNVSRKTAQSRTVVVQNHQKCSFISKSSSPTPSLSKSSSPTSSSPPSIISSDHMLFSSIPSPASTHSLYRSSNSSPSSSVTSHSTRSTRSTTVVQEALATNPAPTAGQIRARKKWTEDMNRFIWRTYLIITKCETTQLNSYLEPLHQEFSSKFPEMQVTRQRLGDQRRAILRSKLLPQSTIDIIHNEVKQQIHTNSYTNSQHLTHTLPQNDITSNSRIKWTNEMNEDIIRGYFEVTKLETNKTAYRKKLHELFIQIHPHLSHITEQRIADQRRLLFNNRTNINKIDDIKKEVQLKLREPNSQAQLDVQIDIITDSIDHNQYQGTTDTPITLTQTQTLTQTQVVTQTHIEPENYLLCKIETKFNNAILQFKDTNPETRPYIPKQKTSRKFSKIVDLLNNTIVPKHLNHEIDFTTLHTIIYSAAFAAAICNGTRLQLDENCVRNRYDNKPNWQRRIENKIKQYRLEIGRLTQYIAGNRSQKILKTVDEIREKYKSHSQHEELNTEPQHFLDTLKQKLSAASNRLKRYLNCTKRKQQNHTFLNNEKQFYRNLGNNDSHDTNQSPSTPSPQDLQQFWANIWENPTLHNANADWLSKLTDTEHINMMDFENIPIDTFIQIIKRTHNWKAPGTDNIHNYWYKKLTCTHPFIHNHISQFIRSPDTMPTFISHGITFMLPKGSDPKNPANYRPITCLQTIYKIITGCISYLIYKHLDHHNILVEQQKGCRKNSQGCKEQLTIDAIVMKQVHTNNRNIHTMYIDYRKAFDSVPHSWLLYILQHYKIHPILITFLSTAMLQWQTRLKLIQNKTSLTTEPIKIQRGIFQGDSLSPLWFCIALNPLSELLNNTDMGFKLKHNDSSHTLSHLLYMDDIKIYATSNTQLSKLADITQSFSTDIQMQFGVDKCKIHSIIRGKSQKNSYILDTGEEIDHMDEYSTYKYLGFHQSKQIQHKQTKLDLIKKFKIRLNQILRTQLNSRNSIKAINTYAIPVLTYSFGIIRWSQTDLQKLQRIINTHMTTHRKHHPKSCIQRLTLPRQDGGQGLIDVQNLHNTLVSKLRTYFHNKAEQSELHKYITEIDIKFTPLNLSNRNTQIKLTNRQEKLGTWSQKSLHGRHLADLGQAHVDRDASNEWLRRGELFPETEAFMIAIQDQVINTRNYQKHILHLPNLPSDLCRRCHSSSETIQHITGACKSIVQTDYKHRHDQVASIIHQNLAHIHTFISKKVAYYKYKPETILENTLVKIYWDRTIITDKTIHYNRPDITVLDKTNNSVFLIDIAVCNTHNLLSTYTEKMTKYVELATEIKRQWQVDNVKILPIVISTTGIIPKSLKTNLNFLQMPVSTLTLIQKAAILNTCRLTRKFLASSSST

SEQ ID NO: 23099 - protein, 1371 aa, Apodemia virgulti
MAMVNIKTMKGLNKRYNLRPLPGGRRGTSGASAGCHSMRTVGDGGLNRRVPLEQSSTADRSFSPSSTTYSEHSLFYNFSSPSSTHTLFHSPNISPSSSYSSCSIRTTADVQEAVAINSAPNVCPSRARKKWNEDMNRFIWRTYLVITKNETTQMNNYLDPLHKEFNSKYPDMEATRQRLGDQKRAILRRKLLSQETLNEIRNEVSQQIYTDSYTYIDTQNSTNVHLTHNSTQIKAITKSRMRWSDQINEDIICFYLKVTELETNMTAYRKKLHEMFIEKYPHLSHITEQRIADQRRVIFNNKAYTNKIHELRRHMVQLNTQHNDTVIEDLDYSQSEGIRNTPTIHAHIDTQTQLLTQTLNTNMEHENNLVCKIEKEFNDAVSRFRGTNPETRPFIPKQKPSRKFSIIVSHLNNTIIPKHLNHDLDFPSLHTIIYSAAFAAAICNGTKFNTNENRGSNHFSRKPRWQRRIEIKIAKYRLEIGRLTQYISGNRRQKILKTVNEIKLKYKTHSQHEEPNTEPQHFLDTLKQKLNAAANRLKRYLSCTQRKQQNLNFTNREKQFYRNLGNNQPNNNQTLDSPSPQELQQYWASIWEKPLQHNTNADWLSKLSNSIHINSMEFESIPVDTFTQIINRTHNWKAPGTDNIHNYWYKKLTYAHPFIYNHITQFIHSPNSMPKFITHGITFMISKGSDPKNPANYRPITCLQTIYKIITGCISHLIYKYLDRHNILAEQQKGCRKNSQGCKEQLTIDAVVMKQAHTKHRNIHTMYIDYTKAFDSVPHSWLQFILSHYKIHPSLISFLRIAMSQWETKLKICQNNKSVITDSIKIQRGIFQGDSLSPLWFCMALNPLSELLNLSNIGFKLKYDNSHHILSHLLYMDDIKIYATSNTELKKLADITQTFSEDIQMQFGVDKCKIHSIIRGKSQHNTYLLNSGEQVEPMDEHSTYKYLGFHQSKQIQQKQTKLDLIKKFKIRLNQVLRTQLNSRNSIKAINTYAISILTYSFGIINWSQTDLVKLQRIINTHMTIHRKHHPKSCIQRLTLPRRDGGQGLIDIQNLHNNLISKLRTYFYNKSDHSQLHKYITKIDNKLTPLNLNDRNFVLNSISKQQKFDLWSQKSLHGRHLADLSQSHVDTVTSNEWLRRGELFPETEAFMIAIQDQVIDTLNYQKHIIRTPNLPSDLCRHCRSSSETIQHITGACKSIVQTDYKYRHDQVAAIIHQNLAHIHSFIDKKIAYYKYNPKAVLENSFLKIYWDRTIITDKTVHFNRPDITVLDKTNRVAFLIDIAVCNTHNLLNTYTEKITKYVDLATEIKIQWQIDKVKIIPIVISTTGVVPKSLQTNLNTLQMPASTLTLIQKSVILNTCRLTRKFLTSSTF

SEQ ID NO: 23100 - protein, 1374 aa, Colias croceus
MEKNMDSTNKRYNLRPLPGGRRGTSGANAGCDSMRTVGDGGLSRRVPLEQWTTADRSSSPSSIASSEHSLFSNAPSPSSTHTLFRSSTSSPSSDYSLYSTRTTTVVQEALAIDPAPTVGQIRARKKWTEDMNRFIWRTYLIITKCETTQMNNYLESLHLQFNSKYPNMQATRQRIGDQKRAILRNKLLPQETLDQIYNEVTKQIQTTQNSYTTPHNTNESTQQTSINSTQNTRMKWTDEMNEEIIRSYLTVTELESDLTAYRSKLHAMFIEKLPHLSHISEQRIADQRRIIFRNKLFAHKICELRKEVEQKLLVSNTNLSCNIQPAITDDTNFSLNEEVIDTLNTLTRQDSGIQSHIDTSIPNISHDSHLYSKIETEFNNAIERFKNVNPETRPYIPKQKPSRKLSQIISHLNTTVIPKTLNHELDFCSLHTIIYSAAYTAALCNGTKFYSNQNIDNTSKNRKPTWQRRIESKIKKYRLEIGRLTQFIAGNRNNKIIKTVNEIKLKYRSHSQHEEPNTEPQHFLDTLKQKLNVASCRLKRYTNCTKRKQQNFTFVNNEKLFYRTLSDNRSETIQTFDAPSSQEFHKFWADLWENPVEHNTNATWLTKTSDTTHITSMEFDNLPIDTFLQVINRTHNWKAPGTDNIHNYWYKKLTCTQPFIHAHINKFIHSPDMLPEFILHGVTYMIPKGGDPQNPANYRPITCLQTIYKIITGCISHLIYHHLDTHHILAEQQKGCRKNRQGCKEQLTIDAIVMKQAQTKNRNIHTMYIDYKKAFDSIPHSWLLQILEHYKIHPMLQSFLGTAMLHWQTKLKLQYQNVSLTTESIKIQRGIFQGDALSPLWFCIALNPLSELLNNTNLGFKLKHNGSYFTLSHLLYMDDIKIYATNSQELKKLADITQTFSTDIKMQFGVDKCKIHSVIKGKSQYNTYLLDSGEQIEPMDEYSTYKYLGFHQSRQIHQKRAKLDLIKKFKVRLNQILRTQLHSRNTVKAINSYAIPVLTYSFGIINWSQTDLLKLQRIINTHMTAHRKHHPRTCIQRLTLPRCDGGRGLIDIQNLHNNLIVKLRTYFQIMSERSQLHKYVTEIDTKLTPLNLSNKNFQPKLYNKQQKLNLWSQKSLHGRHHADLGQQHVDRDASNEWLKRGELFPETEAFMIAIQDQVIDTRNYQKHIIRVPNLHTDLCRRCHSSSETIQHITGACKSIVQTDYKHRHDQVAAIIHQNLAHKHSFVSKKIAYYKYKPNTILENDSIKIYWDRTIITDKTIHFNRPDITVFDKTKNTVLLIDIAVCNTHNLLNTYTEKMSKYIELATEIKRQWQVHTVNIIPIVISTTGVTPKSLISNLKILQMPLSTLSLIQKAVILNTCRLTRKFLSNTPTST

SEQ ID NO: 23101 - protein, 1385 aa, Notodonta dromedarius
MESQLKRYSLRPLPGGRRGASGADAGCHSMRTIGDGGLSRRVPLEKNTTADLSSSPSSIAHSEPSLFSNIPSPSSTHSLFRSPNSSPSSSYSSRTRSTVVVQEASATNPAPTAGYSRARKKWTEDMNRFIWRTYLFITKCETTHMNNYLEVLHQEFDNRYPEMQTTRQRIGDQKRAIIRRKLLSQDILDQINSDVRDHLQIENCQSEYHSSTFTHHSNHPVSPIHMASLTNTTSNTRIKWSDEMNDEIIRCYFEVTELEMYKTAYRKKLYELFIERLPHLSHLTEQRIADQRRLLFSNRTYTSRIQDLKREVGLKLIGLNNHPQPQQDVTIVAHPHYTQPEDTINTTPRQTHTLTESSPGTLASTDIELNLNQIQSTEVENDKIEVEFNNAMERFREVDPETRPYIPKQKTSRKFSQIVQCLNAVILPKYLNHELDFNSLHTLIYSAAFAAASCNGTRFNLDANTPPNNRNKKPAWQRRIQSRIDKYRLEIGRLTQYIAGNRNQRIVQTVEEIKIKYQNHSQHEQPNTEPQHFLDTLKQKLNAASNRLKRYLICTKRKQQNLTFTNNEKQFYRTLGNHQQNNTTLNSEVPTPQRLQQFWGDIWEHPVQHNTDAEWLHKISSYTAHITQMNSENIPIETFTQIVKRTHNWKAPGTDNIHNYWYKKLTCTHPFIYSHICQFIQSPHIMPTFLTHGITYMLPKGSDPKNPANYRPITCLQTIYKIITGCISAIIYQHLDQHTVLAEQQKGCRKNSQGCKEQLTIDAIVMRQAQTKHRNIHTMYIDYKKAFDSVPHSWLIYVLELYKIHPSLISFLNIAMLHWETKLKLIDNNTSLITEPIKIQRGIFQGDALSPLWFCLALNPLSELLNDTNTGFRLKHNNRYHILSHLMYMDDIKIYATNNAELTKLADITQSFSTDIQMQFGVDKCKIHSINRGKSQHNTYTLDTGEQIEPMDEHSTYKYLGFHQSKQIQQKQVKIELTRKFKLRLNQILRTQLNSRNIIKAINTYAIPILTYSFGIINWSQTDLVKLQRMINTHMTTHRKHHPRSCVQRLTLPRREGGIGLIDIQNLHNSIITKLRSYFYAKAEHTNLHKYIADIDIKLTPLNLSYRDMQLNVTSRQNKIDKWSQKSLHGRHLADLSQTHVDREASNEWLRRGELFPETEAFMIAIQDQVMDTRNYQKHIIRLPNLPTDLCRRCHSSSETIQHITGACKSIVQTDYKHRHDQVAAIVHQNIAHKYSFIPKKVAYYKYQPSTILENSSYKVYWDRTIITDRTIHFNRPDITILDKANKAVFIIDIAVCNTHNLLTTHTEKMTKYIDLATEIKRQWQVDTVKIIPIVISTTGVIPSTLHTSLNTLQMPKSTLSLMQKAVILNTCRLTRKFLQNSSSS

SEQ ID NO: 23102 - protein, 1406 aa, Lychnuchoides ozias
MVLTTYHNKKTPTRTNDPKPFRRRFIMESQPRRYSLRPLPGGRRGASGANAGCHSMRTVGDGGLSRRVPLEQNATAEQSHSPSSISLSENSLFSSPSSISAFSSPQSTSSSSSQSSRITGPTNVVQEAIAFDPAPITGHIRARKKWTQEMNHFIWRTYLMITKCETTQANTYLETLHKEFVRKYPEMQATRQRIGDQRRAIIRRKLLSDNILDDIRNEIKQHIETESDFVTQNTINSSQFTTLTPSQTNITSIRMKWSNAINEDIVRCYLEVTELQTNSTAYRKKLYDKFIEIHPNLSHLTEQRIADQRRVIFSRKIFANRIKEIKRETELKLMERHRQSQINIQQNYTIQNNSCNTLLENIADITLTNTPTRSHTPTSALASVTRIVEHDNNSFDTLNNKIDFVNITKEFQNAITHFSSIDPEARPYIPKQKISGKFHQIVLFLNHKILPNYLNDDLDFGSLHTIIYSAAFTAASFNGTKFRSNEKIDPNSSNGKPTWQRRLERKIEKYRLEIGRLTQYIAGNRKHKVVKTVEDISIKYKTHSQYEEPNFEPQHFLDTLKQKLNATSNRLRRYLNCTKRKQQNLTFANNEKQFYRMLGKNQQGSTKQTPDIPSPECLQQFWANIWENPTQHNTDAKWLHKLSDTSHINEMDSDNITLDTFIKIVNRTHNWKAPGTDNLHNYWYKKLTCTHRFIHRHICLFIQSPHLMPEFLTHGITYMLPKGPNLKDPGNFRPITCLQTMYKIITSCISDKIYRHVHQHEILAEQQKGARKHSQGCKEQLTIDAIIMKQAQTKNRNIHTLYIDYKKAFDSVPHSWLLYVLQHYKIDPKLVTFLNTVMRKWETKLKLTHNNTSIHTETIKIQRGIFQGDALSPLWFCMALNPLSELLNNTSTGFRLKHNKTHHTVSHLMYMDDIKIYASNKTDLLTLTDITQLFSTDIKMQFGVDKCKIHSIVGGKTQQNPYTLDTGEQIDSMDADSTYKYLGFHQSKQIEQKQTKDELINKFKFRLNQILRTNLNSQNIIKAINTYAIPILTYSFGIINWTQTDLLKLQRLINTHMTTHRKHHPRSCVQRLTLPRREGGRGLIDIQNLHSNLITKLRNYFYTKAEKTQLHKYVTDIDTKLTPLNLHDRTLEINTISRQQKTDMWSRKSLHGRHLADLNQTHVDKQASNEWLRRGELFPETEAFMLAIQDQVIDTRNYQKHITRISSSTNDLCRRCQSSPETIQHITGACKSIVQTDYKHRHDQVAAIVHQNLAHKYAFIKKKDAYYKYQPCKVLENDTHKIYWDRTIITDKTIHFNRPDITVLDKINKTVFIIDIAVCNTHNLITTHTEKTTKYIDLASEIKTQWQVGTAKIVPIIISSTGVIPTSLHTSLTILQMPKSALKLIQKAVILNTCRLTRKFLASSSS

SEQ ID NO: 23103 - protein, 1371 aa, Apodemia mormo
MAMVNIKTMKGLNKRYNLRPLPGGRRGTSGASAGCHSMRTVGDGGLNRRVPLEQSSTADRSFSPSSTTYSEHSLFYNFSSPSSTHTLFHSPNISPSSSYSSCSIRTTADVQEAVAINSAPNVCPSRARKKWNEDMNRFIWRTYLVITKNETTQMNNYLDPLHKEFNSKYPDMEATRQRLGDQKRAILRRKLLSQETLNEIRNEVSQQIYTDSYTYLDTQNSTNVHLTHNSTQIKAITKSRMRWSDQINEDIICFYLKVTELETNMTAYRKKLHEMFIEKYPHLSHITEQRIADQRRVIFNNKAYTNKIHELRRHMVQLNTQHNDTVIEDLDYSQSEGIRNTPTIHAHIDTQTQLLTQTLNTNMEHENNLVCKIEKEFNDAVSRFRGTNPETRPFIPKQKPSRKFSIIVSHLNNTIIPKHLNHDLDFPSLHTIIYSAAFAAAICNGTKFNTNENRGSNHFSRKPRWQRRIEIKIAKYRLEIGRLTQYISGNRRQKILKTVNEIKLKYKTHSQHEEPNTEPQHFLDTLKQKLNAAANRLKRYLSCTQRKQQNLNFTNREKQFYRNLGNNQPNNNQTLDSPSPQELQQYWASIWEKPLQHNTNADWLSKLSNSIHINSMEFESIPVDTFTQIINRTHNWKAPGTDNIHNYWYKKLTYAHPFIYNHITQFIHSPNSMPKFITHGITFMISKGSDPKNPANYRPITCLQTIYKIITGCISHLIYKYLDRHNILAEQQKGCRKNSQGCKEQLTIDAVVMKQAHTKHRNIHTMYIDYTKAFDSVPHSWLQFILSHYKIHPSLISFLRIAMSQWETKLKICQNNKSVITDSIKIQRGIFQGDSLSPLWFCMALNPLSELLNLSNIGFKLKYDNSHHILSHLLYMDDIKIYATSNTELKKLADITQTFSEDIQMQFGVDKCKIHSIIRGKSQHNTYLLNSGEQVEPMDEHSTYKYLGFHQSKQIQQKQTKLDLIKKFKIRLNQVLRTQLNSRNSIKAINTYAISILTYSFGIINWSQTDLVKLQRIINTHMTIHRKHHPKSCIQRLTLPRRDGGQGLIDIQNLHNNLISKLRTYFYNKSDHSQLHKYITKIDNKLTPLNLNDRNFVLNSISKQQKFDLWSQKSLHGRHLADLSQSHVDTVTSNEWLRRGELFPETEAFMIAIQDQVIDTLNYQKHIIRTPNLPSDLCRHCRSSSETIQHITGACKSIVQTDYKYRHDQVAAIIHQNLAHIHSFIDKKIAYYKYNPKAVLENSFLKIYWDRTIITDKTVHFNRPDITVLDKTNRVAFLIDIAVCNTHNLLNTYTEKITKYVDLATEIKIQWQIDKVKIIPIVISTTGVVPKSLQTNLNTLQMPASTLTLIQKSVILNTCRLTRKFLTSSTF

SEQ ID NO: 23104 - protein, 1149 aa, Pheosia gnoma
MKWSDEMNDEIVRGYFELTELEINKTAYRKKLYDYFIERYPHLSHLTEQRIADQRRLIFNNKIYTSRIKQLKREIELKLKTPYNHPLTQVEHDPIIAELSHQSIPESNIDMTLTQIQTYEQPHTLETNTDNENNPIQIQSNEMETKIEIEFNHAIARFSEIDPETRPYIPKQKTSRKFSQIVQCLNNVILPKHLNQAIHFTSLHTLIYSAAFAAATCNGTRFNLDNNNVLNDRNGKPTWQRRIEKRIEKYRLEIGRLTQYIAGNRSQKIVRTVEEIKIKYKTHSQYEEPNTEPQHFLDTLKQKLNAVSNRLKRYLTCTKRKQQNSTFTNNEKQFYRTLGNNHQNNTTLPSESPTPQHLQEFWANIWENPVQHDTNAEWLPKISPHTAHINQMDFENIPIDIFTQVIKRTHNWKAPGTDNIYNYWYKKLTCTHPFIYNHINQFIQSPHTMPQFITHGITYMLPKGSDPKNPANYRPITCLQTIYKIITGCISAIIYHHLNLHNVLAEQQKGCRKNSQGCKEQLTIDAILMKQAQTKNRNIHTMYIDYKKAFDSVPHSWLLYVLEYNKIHPNLISFLNEAMLHWKTKLKLIGNNKSLITGSIKIQRGIFQGDALSPLWFCLVLNPLSNLLNDTNTGFKLKHNNTHHTLSHLMYMDDIKIYATNSTELTELVNITQSFSKDIQMQFGVEKCKIHSIIRGKSQHNTYTLDTGEQIDPMDEHSTYKYLGFHQCKQIQQKQTKIELTTKFKLRLNQILRTQLNSRNITKAINTYAIPILTYSFGVINWSQSDLVKLQRIINTHMTTHRKHHPRSCIQRLTLPRREGGRGLIDIQNLNNSLVTKLRNYFYAKAEHSELHKYIAHIDNKLTPLNLNDRSMQPNITSRQEKTDKWSQKSLHGRHLSDLSQTHVDKEASNEWLRRGELFPETEAFMIAIQDQIIDTRNYQKHIIRIPNLSTDLCRRCHSSSETIQHITGACKSIVQTDYKHRHDQVAAIVHQNIAHKYLFISQKVAYYKYQPSTVLENSLYKIYWDRTIITDRTIHFNRPDITILDKTKKTVFIIDIAVCNTHNLLTTHTEKMTKYIDLATEIKKQWQVDTVRILPIVISTTGVIPRTLQTNLNVLQMPKSTLTLIQKAVILNTCRLTRKFLQNSSSSP

SEQ ID NO: 23105 - protein, 1376 aa, Colias croceus
MEKNMDSTNKRYNLRPLPGGRRGTSGANAGCDSMRTVGDGGLSRRVPLEQWTTADRSSSPSSIASSEHSLFSNAPSPSSTHTLFRSSTSSPSSDYSLYSTRTTTVVQEALAIDPAPTVGQIRARKKWTEDMNRFIWRTYLIITKCETTQMNNYLESLHLQFNSKYPNMQATRQRIGDQKRAILRNKLLPQETLDQIYNEVTKQIQTTQNSYTTPHNTNESTQQTSINSTQNTRMKWTDEMNEEIIRSYLTVTELESDLTAYRSKLHAMFIEKLPHLSHISEQRIADQRRIIFRNKLFAHKICELRKEVEQKLLVSNTNLSCNIQPAITQTDDTNFSLNEEVIDTLNTLTRQDSGIQSHIDTSIPNISHDSHLYSKIETEFNNSIERFKNVNPETRPYIPKQKPSRKLSQIISHLNTTVIPKTLIHELDFCSLHTIIYSAAYTAALCNGTKFYSNQNIDNTSKNRKPTWQRRIESKIKKYRLEIGRLTQFIAGNRNNKIIKTVNEIKLKYRSHSQHEEPNTEPQHFLDTLKQKLNVASCRLKRYTNCTKRKQQNFTFVNNEKLFYRTLSDNRSETIQTFDAPSSQEFHKFWADLWENPVEHNTNATWLTKTSDTTHITSMEFDNLPIDTFLQVINRTHNWKAPGTDNIHNYWYKKLTCTQPFIHAHINKFIHSPDMLPEFILHGVTYMIPKGGDPQNPANYRPITCLQTIYKIITGCISHLIYHHLDTHHILAEQQKGCRKNRQGCKEQLTIDAIVMKQAQTKNRNIHTMYIDYKKAFDSIPHSWLLQILEHYKIHPMLQSFLGTAMLHWQTKLKLQYQNVSLTTESIKIQRGIFQGDALSPLWFCIALNPLSELLNNTNLGFKLKHNGSYFTLSHLLYMDDIKIYATNSQELKKLADITQTFSTDIKMQFGVDKCKIHSVIKGKSQYNTYLLDSGEQIEPMDEYSTYKYLGFHQSRQIHQKRAKLDLIKKFKVRLNQILRTQLHSRNTVKAINSYAIPVLTYSFGIINWSQTDLLKLQRIINTHMTAHRKHHPRTCIQRLTLPRCDGGRGLIDIQNLHNNLIVKLRTYFQIMSERSQLHKYVTEIDTKLTPLNLSNKNFQPKLYNKQQKLNLWSQKSLHGRHHADLGQQHVDRDASNEWLKRGELFPETEAFMIAIQDQVIDTRNYQKHIIRVPNLHTDLCRRCHSSSETIQHITGACKSIVQTDYKHRHDQVAAIIHQNLAHKHSFVSKKIAYYKYKPNTILENDSIKIYWDRTIITDKTIHFNRPDITVFDKTKNTVLLIDIAVCNTHNLLNTYTEKMSKYIELATEIKRQWQVHTVNIIPIVISTTGVTPKSLISNLKILQMPLSTLSLIQKAVILNTCRLTRKFLSNTPTST

SEQ ID NO: 23106 - protein, 1375 aa, Vanessa cardui
MEKTMESRNKIYSLRPLPGGRRGTSGANAGCHSMRTVGDGGLSRRVPLEKSTTAERSSSTSSNSSSEHSPYSNIPSPSSTHSLFRSLNSSPSSSYSLRSTRSTTVVQEALATKPVPTADLPRARKKWTQDMNRFIWRTYLIITKCETTRMNTYLDSLHKEFDSKFPEMQASRQRLGDQRRAILRTKLLSQRTLDDIRGEVKQLIQTDSHDHSHARKTNSPFDFTHTLTQIKSTTTRMKWTDEINEEIIRCYFLVTELETNKTAYRKKMHELFVKKYPHLSHITEQRIADQRRLLFNNKTNINKLDILKREVEQKLAELNVHLPQTTEKHITLQNLDNNKPEISIDTSSALTQIQPQAQLPTLIADTDLENHLLQKVETEFSNAMAQFNDTNPETRPYIPKQKSSRKLSQIVYYLNNTIVPKYLNHDQHFNTVHTIIYSAAYTAALCNGTRFHAAENAVRNSRNKKPTWQRRIENKIEKYRLEIGRLTQYIAGNRSHKIIKTVDEIKIKHKTHSQHEEPNTEPQHFLDTLKQKLNAASHRLKRYLNCTKRKQQNHTFINNEKQFYRTMNTNHKDNTIQNSNTPTPQGLQQFWASIWENPVQHNSNAEWLLKSTNTGHIIAMDFENIPIDTFTQIIKRTHNWKAPGTDNIHNYWYKKLTCVHPFIHSHINQFIHAPHTMPSFISHGITYMVSKGSDPKNPANYRPITCLQTIYKIITGCISHLIYSHIDQHNILVEQQKGCRKNSQGCKEQLTIDAIVMKQAHTKKINIHTMYIDYKKAFDSVPHSWLLYILQHYKIHPNLITFLHATMLQWQTKLKLIQNNTSLTTETIKIQRGIFQGDSLSPLWFCIALNPLSELLNKTEMGIQMKHHDSYHTLSHLLYMDDIKIYAKNNAELTKLADITQSFSTDIQMQFGVDKCKIHSIIKGKSQRNTYILDTGEQIEYMDEHSTYKYLGFHQSKQIEQKQTKLDLIKVFKIRLNQILRTQLNSRNTVKAINTYAIPVLTYSFGIISWSQTDLLKLQRMISTHMSHHRKRHPRSCVQRLTLPRQDGGQGLIDIKNLHNTLTDKLRTYFYSKADHSQIHKHAIEIDKKLTPLNLSNRSIQPKLINRQQKIDLWSQKSLHGRHLADLGQSHVDKDASNEWLRRGELFPETEAFMIAIQDQVIDTRNYQKHVIRLPNLPTDLCRRCHSSSETIQHITGACKSIVQTDYKHRHDQVAAIIHQNLAHAHSLITKKVAYYKYTPDTVLENSTFKIYWDRTIITDKTIHFNRPDITVIDKNKNIVIIIDIAVCNTHNLLNTYTEKITKYLELANEIKRQWQVDNIKILPIVISTTGVVPKTLSNNLNALQMPSSTIRLIQKAVILNTCRLTRKFLALSDP

SEQ ID NO: 23107 - protein, 1386 aa, Ptilodon capucinus
METRSKSKRIGPLPGGDRRGASGADAGCYSMRTVSDGGLSRRVPLEQCTTADPSSSPSSTTSSVPSLFLNIPSPSSTHSLLRSRTSSPSSSYSSRTTRSTAVVQEALATNPKPTVGLLRARKKWTEDMNRFIWRTYLLVTKCETTQKNNYLEVLHQEFDNRYPEMQATRQRIGDQRRAIIRRKLLSENILNQIHAEVREYTQTENIQSESHSSTFTHNNKTAQTNATRNSRIRWSDEMNDEIVRCYFEVTELEIYKTAYRKKLHELFIERHPHLSHLTEQRIADQRRLIFSNRAYASKIEDLKKEVQLKLIDLNNHPQPQLDQDLPIAEDPLHTQLHSTLDTTFAQIPTNEPTHILTDSLMQASYSIDAENNPMQTQSNDIEINKIEIEFNNAKARFSDIDPEARPYIPKQKSSRKFSKIIQCLNNVILPKHLNHALDFSSLHTIIYSAAFTAAICNGTRFSFDTTVVNKRNRKPAWQRRIEGRIEKYRQEIGRLTQYIAGNRNQKINRTVEEIKIKYKTHSQHEEPNTEPQHFLDTLKQKLNAASNRLKRYLTCTKRKQQNFTFANNEKQFYRTLGNNIQSETTVSPEAPLPQDLQQFWAKIWENPVQHNTNADWLHKISSHTTHINQMDFEKVPMHIFTQIVKRTHNWKAPGTDHIHNYWYKKLTCTHPFIYNHICQFIQSPHIMPVFITHGITYMLSKGSDSKNPANYRPITCLQTIYKIITGCISAIIYQHLDQYDVLAEQQKGCRKNSQGCKEQLTIDAIVMKQAQTKNRNIHTMYVDYKKAFDSVPHSWLLYILEHYKIHPNLISFLNSAMLQWKTKLKLNDNKTPFTTEPIKIQRGIFQGDALSPLWFCLALNPLSELLNDTNTGFKLKHNSTYHTLSHLMYMDDIKIYASNNSELTKLADITQSFSVDIQMQFGVDKCKIHSINRGKTELNTYTLDTGEQIEPMDEHSTYKYLGFHQTKQIQQKQTKIELTRKFKLRLNQILRTQLNSRNNTKAINTYAIPILTYSFGIINWSQSDLVKLQRMINTHMTTHRKHHPRSCIQRLTLPRRVGGRGLIDIQNLHNRLINKIRSYFHAKAEHTELHKYIADIDTKLTTLNLNDRDMQLNEISREQKIEKWSQKSLHGRHLADLRQTHVDKEASNEWLRRGELFPETEAFMLAIQDQVIDTRNYQKHIIRIPNLPTDLCRQCHSSSETIQHITGACKSIVQTDYKHRHDQVAAIVHQNIAHKHCFISQKVAYYKYKPSTVLENNQYKIYWDRTIITDRTIHFNRPDITILDKNNKKVYIIDIAVCNTHNLLTTHTEKMTKYIDLATEIKRQWQVDVVKIIPIVISTTGVVPSTLQINLNKLQMPKSTLTLIQKAVILNTCRLTRKFLQNSSSP

SEQ ID NO: 23108 - protein, 1377 aa, Vanessa atalanta
MEKIMESRNKIYSLRPLPGGRRGTSGANAGCHSMRTVGDGGLSRRVPLEKLTTAERSSSPSSNSSSEHSLFSNIPSPSSTHSLFRSLNSSPSSLYSLRSTRSTAVVQKALAINPVPTADLPRVRKKWTDDMNRFIWRTYLIITKCETTHMNSYLESLHKEFDCKFPEMQASRQRLGDQRRAILRRKLLSQSTLDDIRDEVKQQIQTDSHIIHNHSEAHQTNSLMHLTPTLTQNKPTNSRMKWSDAINDEIIRCYFIVTELETNKTAYRKKLHELFIEKHPHLSHITEQRIADQRRLLFNNKINLNKLHRLKREVEQKLSELNIHPQLQTPGKNITIENFDNNKPKIATDTSNSLTQIRPQTQIQTLITDIDPENHLLQKIEIEFSNAIAQFSDTNPETRPYIPKQKSSRKFSQIVYYLNSTVVPKHLNHDQNFNTLHTIIYSAAYTAAACNGTRFFAAEYTVRNSRNRKPTWQKRIENKIEKYRLEIGRLTQYIAGNRSHKILKTVDEIKIKYKTHSRHEEPNTEPQHFLDTLKQKLNAASNRLKRYLNCTKRKQQNLTFINNEKQFYRTINTNHEDNTTQNSNTPSPQDLQQFWASIWENPVQHNTNADWLLKSADTGRITAMDFENISIDIFIQIIKRTHNWKAPGTDNIHNYWYKKLTCVHPFIHSHINQFIHSPHTMPKFISHGITYMLSKGADSKNPANYRPITCLQTIYKIITGCISHLIYTHIDHHNILAEQQKGCRKNGQGCKEQLTIDAIVMKQALTKKLNIHTMFIDYKKAFDSVPHSWLLYILQHYKIHPNLITFLRVTMLHWQTKLKLIQNNTSLTTETIKIQRGIFQGDSLSPLWFCIALNPLSELLNKTEMGLQLKHNDSHHTLSHLLYMDDIKIYAKNNAELTKLADITQSFSTDIQMQFGVDKCKIHSIIKGKSQTNSYVLDTGEQIEHMNEHNTYKYLGFHQSKQIEQKQTKLDLIKTFKIRLNQILRTQLNSRNTVKAINTYAIPVLTYSFGIITWSQTDLLKLQRMINTHMSSHRKRHPRSCIQRLTLPRQDGGQGLIDIKNLHNTLTNKLRNYFYSKADHSQLHKHAIEIDKKLTPLNLSNRSIQAKLITRQQKIDLWSQKSLHGRHLADLGQSHVDKDASNEWLRRGELFPETEAFMIAIQDQVIDTRNYQKHIIRLPNLPTDLCRRCHSSSETIQHITGACKSIVQTDYKHRHDQVAAIIHQNLAHAYSLLTKKVAYYKYTPDTVLENSTFKLYWDRTIITDKTIHYNRPDITVIDKNKNIVFIIDIAVCNTHNLLNTYTEKISKYVELATEIKRQWQVDNVKILPIVISTTGVIPKTLSTNLNALQMPASTITLIQKAVILNTCRLTRKFLSSS

SEQ ID NO: 23109 - protein, 1331 aa, Pheosia gnoma
MESQVKRYSLRPLPGGRRGASGADAGCHSMRTVGDGGLNRRVPLEQYTTADQSSSPSSIAHSEPSLFSNIPSPSSMHSLFRSPNPSPTSSYSSRTTRSTAVVQEAFAINPVPTAGYSRARKKWTEDMNRFIWRTYLLITKCETTQMNNYLGLLHQEFDNRYPEMQTTRQRIGDQRRAIIRRKLLSQNVLDEISAAVRENLQTQISQTEYNSYTHNPSHPVHPTLLLSHNTNRHARMKWSDEMNDEIVRGYFELTELEINKTAYRKKLYDYFIERYPHLSHLTEQRIADQRRLIFNNKIYTSRIKQLKREIELKLKAPYNHPLTQVEHDPIIAELSHQSIPESNIDMTLTQIQTYEQPHTLETNTDNENNPIQIQSNEMEAKIEIEFNHAIARFSEIDPETRPYIPKQKTSRKFSQIVQCLNNVILPKHLNQAIDFTSLHTLIYSAAFAAATCNGTRFNLDNNNVLNDRNGKPTWQRRIEKRIEKYRLEIGRLTQYIAGNRSQKIVRTVEEIKIKYKTHSQYEEPNIEPQHFLDTLKQKLNAVSNRLKRYLTCTKRKQQNSTFTNNEKQFYRTLGNNHQNNTTLPSESPTPQHLQEFWANIWENPVQHDTNAEWLPKISPHTAHINQMDFENIPIDIFTQVVKRTHNWKAPGTDNIYNYWYKKLTCTHPFIYNHINQFIQSPHTMPQFITHGITYMLPKGSDPKNPANYRPITCLQTIYKIITGCINAIIYHHLNLHNVLAEQQKGCRKNSQGCKEQLTIDAIVMKQAQTKNRNIHTMYIDYKKAFDSVPHSWLLYVLEYNKIHPNLISFLNEAMLHWKTKLKLIGNNKSLITGSIKIQRGIFQGDALSPLWFCLALNPLSNLLNDTNTGFKLKHNNTHHTLSHLMYMDDIKIYATNSTELTELVNITQSFSKDIQMQFGVEKCKIHSIIRGKSQHNTYTLDTGEQIDPMDEHSTYKYLGFHQCKQIQQKQTKIELTTKFKLRLNQILRTQLNSRNITKAINTYAIPILTYSFGVINWSQSDLVKLQRIINTHMTTHRKHHPRSCIQRLTLPRREGGRGLIDIQNLNNSLVTKLRNYFYAKAEHSELHKYIAHIDNKLTPLNLNDRSMQPNITSRQEKTDKWSQKSLHGRHLSDLSQTHVDKEASNEWLRRGELFPETEAFMIAIQDQIIDTRNYQKHIIRIPNLSTDLCRRCHSSSETIQHITGACKSIVQTDYKHRHDQVAAIVHQNIAHKYLFISQKVAYYKYQPSTVLENSLYKIYWDRTIITDRTIHFNRPDITILDKTKKTVFIIDIAVCNTHNLLTTHMEKMTKYIDLATEIKKQWQVVPLEFYP

SEQ ID NO: 23110 - protein, 1385 aa, Notodonta dromedarius
MESQLKRYSLRPLPGGRRGASGADAGCHSMRTVGDGGLSRRVPLEKNTTADQSSSPSSIAHSEPSLFSNIPSPSSTHSLFRSPNSSPSSSYSSRTRSTVVVQEASATNPAPTAGYSRARKKWTEDMNRFIWRTYLFITKCETTHMNNYLEVLHQEFDNRYPEMQTTRQRIGDQKRAIIRRKLLSQDILDQINSDVRDHLQTEKCQSEYHSSTFTHHSNHPVSPTHMASLTNTTSNTRIKWSDEMNDEIIRCYFEVTELEMYKTAYRKKLYELFIKRLPHLSHLTEQRIADQRRLLFSNRTYTSRIQDLKREVGLKLIGLNNHPQPQQDVTIAAHQHYTQPEDTINTTPRQTHTLTESSPATLASTDIELNLNQIQSTEVENDKIEVEFNNAMERFREVDPETRPYIPKQKTSRKFSQIVQCLNAVILPKYLNHELDFNSLHTLIYSAAFAAASCNGTRFNLDANTPPNNRNKKPAWQRRIQSRIDKYRLEIGRLTQYIAGNRNQRIVKTVEEIKIKYKNHSQHEQPNTEPQHFLDTLKQKLNAASNRLKRYLTCTKRKQQNLTFTNNEKQFYRTLGNHQQNNTTLNSEVPSPQRLHQFWGDIWEHPVQHNTDAEWLHKISSYTAHITQMNSENIPIETFTQIVKRTHNWKAPGTDNIHNYWYKKLTCTHPFIYSHICQFIQSPHIMPTFLTHGITYMLPKGSDPKNPANYRPITCLQTIYKIITGCISAIIYQHLDQHTVLAEQQKGCRKNSKGCKEQLTIDAIVMKQAQTKHRNIHTMYIDYKKAFDSVPHSWLIYVLELYKIHPSLISFLNIAMLHWETKLKLIDNNTSLITEPIKIQRGIFQGDALSPLWFCLALNPLSELLNDTNNGFRLKHNNRYHILSHLMYMDDIKIYATNNAELTKLADITQSFSTDIQMQFGVDKCKIHSINRGKSQHNTYTLDTGEQIEPMDEHSTYKYLGFHQSKQIQQKQAKIELTRKFKLRLNQILRSQLNSRNIIKAINTYAIPILTYSFGIINWSQTDLVKLQRMINTHMTTHRKHHPRSCVQRLTLPRREGGIGLIDIQNLHNSIITKLRSYFYAKAEHTNLHKYIADIDIKLTPLNLSYRDMQLNVTSRQNKIDKWSQKSLHGRHLADLSQTHVDREASNEWLRRGELFPETEAFMIAIQDQVMDTRNYQKHIIRLPNLPTDLCRRCHSSSETIQHITGACKSIVQTDYKHRHDQVAAIVHQNIAHKYSFIPKKVAYYKYQPSTILENSSYKVYWDRTIITDRTIHFNRPDITILDKANKAVFIIDIAVCNTHNLLTTHTEKMTKYIDLATEIKRQWQVDTVKIIPIVISTTGVIPSTLHTSLNTLQMPKSTLSLMQKAVILNTCRLTRKFLQNSSSS

SEQ ID NO: 23111 - protein, 1363 aa, Apodemia ares
MKGTNKRYNLRPLPGGRRGASGANAGCYSMRTVGDGGLNRRVPLEQSSTADRSFSPSSTTNSEHSLFHNFPSPSSTHSLFCSSNTSPSSSYSSCSTRTTSVVQEALATNSASNVCPSRARKKWNEDMNRFIWRTYLIITKNETTQMNNYLDPLCKEFNCKYPDMKATRQRLGDQKRAILRRKLLSQETLNEIRNEINQQIYTGSYTNSITQNSTNIHSIHNSTQIKDVTKSRMRWSDEMNEDIICFYFNVTESETNTTAYRKKLHEMFIGKYPHLSHITEQRIADQRRAIFNNKTYTNKIHELRRHVAQLDTQHRDARIESLDYSQLGIIRDTSTTYEHADTQIQSPTQTLDTNMEHENNLVCKIEVEFNNAIARFSDTNPETRPYIPKQKSSRKFSLIVSHLNNTIIPKHLNHDLDFVSLHTIIYSAAFAAAICNGTKFNATEKRDKNNFSKKPTWQRRIESKIKIYRLEIGRLTQYIEGNRRQKILKTFNEIKLKYKTHSQHEEPNTEPQHFLDTLKQKLNATANRLRRYLSCTQRKQQNLTFSNKEKQFYRNLGNNHADLDQTLGAPTPQELQQYWANIWENPLQHNTNAEWLSKITNSMHIDPMEFENIPVDTFTQIINRVHNWKAPGTDNVHNYWYKKFTSTHPFIHNHISQFIHSPNSLPKFITHGITFMIPKGSDPKNPANYRPITCLQTIYKIITGCISHLIYKHLDFHNILAEQQKGCRRNSQGCKEQLTIDAIVMKQANTKHRNIHTMYIDYKKAFDSVPHSWLQHILTHYKIHPSLLSFLSIAMSQWETKLKICQNNKTVTTESIKIQRGIFQGDSLSPLWFCMALNPLSELLNLSNIGFKLKYNDSHHTLSHLLYMDDIKIYATSNTELKKLADITQTFSEDIQMQFGVDKCKIHSIIRGKSQHNTYLLNSGEQVEPMDEHSTYKYLGFHQSKQIEQKQTKLDLTKKFKIRLNQILRTQLNSRNSIKAINTYAISILTYSFGIINWSQTDLVKLQRIINTHMTVHRKHHPKSCIQRLTLPRRDGGQGLIDIQNLHNNLITKLRTYFYNKSDQSQLHKFITNIDNKLTPLNLNNKNYALNSTSRQRKLDLWSQKSLHGRHLADLSQSHVDKIASNEWLRRGELFPETEAFMIAIQDQVIGTLNYQKHIIRIPDLPNDLCRRCRNSPETIQHITGACKSIVQTDYKHRHDQVAAIIHQNLAHIHSFIDKKIAYYKYNPKAVLENSLLKIYWDRTIITDKTIHCNRPDITVLDKTNRVAFLIDVAVCNTHNLLNTYTEKITKYAELATEIKIQWQINKVKIIPIVISTTGVIPKSLQINLNTLQMPASTLTLIQKATILNTCRLTRKFLASSTF

SEQ ID NO: 23112 - protein, 1430 aa, Aeromachus stigmata
MEQSHNSKYNLRSLPGGRRGASGAGAGCYSMRDTGGAALSRRASVTQYTTADRRGLSRRARDVNATAEASSSEGIPPTDKRYANLPSSSSPSSSLSTDSLFQTPNSSPRSFMDSGSSSSSSQPSSSSCMPSSEYSIHSWIPSPSSPESSRSTSVVQKAFAIEPTPTVGLKRARMKWTEEMNRFIWRAYLTITKCETIQKNSYLEQLHREFDHKYPEIQATRQRIGDQRRAILRRNLLSQNILDQIRNEVKLHIRTENNSFTQNPNHNTNISLTTSLVPQINQLNTNSNRMKWSDEVNDDIVRFYFEITELESNKTAYRKLLYKKFIEKHPDLSHLTEQRIADQRRIIFSRKSYINRIAEIKKEVKIKIIELRRLPQVDVEENNTEEYISNTPTENSNTLTNATAQLHKSTLSAEHAESNIENEAEGEQQNHNTEYITIEFEKAVERYTELNPESRPYIPKQKSSRKFAQIVHILNKVILPKYLNDEVDFISLHTLIYSAAFTAAYFNGTKFRCNERGTPIKNMKPTWQRRLEKKIEKYRLEIGRLTQYLAGNRSRKIVQTVEEIKIKYRIHTSHEEFNSEPQHFLDTLKQKLNATSNRLKRYLTCVKRKQENITFNNNEKLFYRKLDTCNTKNNLDAPSAENLHQFWSNIWESPVQHNSNADWLPKLNTAHIEQMDAANISIETLTQIINRTHNWKAPGSDNIHNYWYKKLTCTHSYIHNQINQFIQSPHLMPEFLTHGLTYMLPKASDLGNAANYRPITCLQTIYKIITSCISEKVYRHLENNNILAEQQKGARKNSQGCKEQLTIDAIVMKQAQTRNRNIHTMYIDYKKAFDSVPHSWLIYVLQHYKIHSDLITFLNKTMLNWKTKLKLIQNNNSLITEYIKIQRGIFQGDALSPLWFCIALNPLSELLNNTKAGFKLKYDQSNYTISHLMYMDDIKIYATNNAELLKLADITQTFSTDIQMHFGVDKCKMHSITRGKTHTNTYTLETGEQIDAMDENSTYKYLGFHQSKQIEQKFTKVEIINKFKYRLNQILRTTLNSRNTIKAINTYAIPILTYSFGIIKWTKTDLNKLQRIINTHMTKHRKHHPKSCTQRLTLPRRDGGRGLIDILNLHNNILNNLRKYFYTTSENSKLHKYVTNIDKKLTPLNLHDKTIQLHVTSKQHKIDAWSQKSLHGRHLADLNQTHVDKEASNEWLRRGELFPETEAFMLAIQDQVIDTRNYQKHIIHIPNLTNDLCRRCKSGSETIQHITGACKSIVQTDYKHRHDQIAAIVHQNLAHKYAFIDKKDPYYKYKPSTVLENNSHKIYWDRTIITDKTIHFNRPDIVVFDKNNNSVFIIDIAVCNTHNLVSTHSEKVSKYIDLSTEIKKQWQVHTVKIIPIVISSTGVIPHSLKLNLTKLNMPKSTVTLMQKAVILNTCRITRKFLSSPSI

SEQ ID NO: 23113 - protein, 1401 aa, Schrankia costaestrigalis
MIIYNNNTYPTNDPKTPKNLMESRPSKYNLRPLPGVRRGTSGAYAGCHSMRTVGDGGLNRRVPLDKNTTAERSSSPSSIITLSEHSPFSDIPSPSSTHSLFRSSHSSPHTSPCSSPSSTITLRSTRSTAVVQEALATNPASTAGPSRTRKRWTEDMNRFIWRTYLLITKCETTQLNSYLELLHQEFDNKFPDMQAWRHRVGDQRRAILRRKLLTQTTFDEIFNEINQLINTHSTNHSLTRYTNTQLTTPMLTQYSTTSSRIRWSDEMNDNIIRFYFEVTKLETDKTAYRKKLHEIFIEKHPQLSHITEQRIADQRRILFNNKIYTNKINNIKAEVQQKLNEYNTELELDTLHVNTQTLNTTETIVDNTDHQNSMDTLATLTQIQPFTQTLSDPDFENQQISQIELEFNKALSHFSNTDPESRPFIPKQKLSRKFSQIIYHLNNIIIPKHLNHELDFLKLHTIIYSSAFAAAICNGTRLQLNNNTRINKQNRIPTWQRRIEEKIKKYRLEIGRLTQYIAGNRQPKILNTVNKIKLKYKTHSQYEEPNSVPQHFLDTLKQKLNAASSRLKRYMACTKRKQQNLTFKNNERQFYRSLGNSNNTNPSPTLPSSQDLHQFWANIWENPVQHKTNADWFSNLRDTTHINNMNSDCISIDTLIQIIKRTHNWKAPGTDNIHNYWYKKLTCTHPFIHNHINNFIQTPHTMPNFISHGITYMLPKGTDSINPANYRPITCLQTIYKIITGCISHLIYKHLDVHKVLAEQQKGCRKSSQGCKEQLTIDTIIMKQAHIGKRNIHTMYIDYKKAFDSVPHSWLLHTLHLYKIHPTLITFLSSTMLHWQTSLKLIQNNSTLTTDPIKIQRGIFQGDSLSPLWFCIALNPLSELLNNTNIGFKLKHNNSCHTISHLLYMDDIKIYSTNNTQLTELADITQTFSTDIHMQFGVDKCKIHSIVKGKSQPNSYILNSGEQIEHMDEHNTYKYLGFHQSKQIQQKETKLDLTKKFKIRLNQILRTHLDSRNTVKAINTYAIPVLTYSFGIINWSQTDLLKLQRMINTHMTTHRKHHPRSCVQRLTLPRQDGGQGLIDIQNLHNTLVTKLRTYFHNKAENSELHKYVNAIDKKFTPLNLSNNISQPIITSRQQKIYIWSQKSLHGRHLADLNQPHVDKNASNEWLRRGELFPETEAFMIAIQDQVIDTRNYQKYIICLPNLTTDLCRRCHSSSETIQHITGACKSIVQTDYKHRHDQVASIIHQNLAYTYSFIHKRVAYYKYKPETVLENNSVKLYWDRTIITDKTIHFNRPDITLLDKTKNIVYLIDIAVCNTHNLLSTFNEKITKYVDLASEIKRQWQVDNVKILPIVLSTTGVIPKSLSTSLNSLQMPFSTTILLQKAAILNTCRLTRKFLASSTSP

SEQ ID NO: 23114 - protein, 757 aa, Schrankia costaestrigalis
MQSDSISFDTLIQIIKRTHSWKATGSDNIHNYWYKKLTCTHPFIHNHINKFIQTPHTMPTFISHGITYMLPKGTDSINPANYRPITCLQTIYKIITGCISHLIYKHLDIHNILAEQQKGSRKSSQGCKEQLTIDTVIMKQALISKRNIHTMYIDYKKAFDSVPHSWLLHTLQLYKIHPTLIAFLSSTMLHWQTSLKLKQNNAILTTDPIKIQRGIFQGDSLSPLWFCIALNPLSELLNNSDVGFKLKNNSSYHTVSHLLYMDDIKIYATNNTQLIKLADITQTFSTDIHMEFGVDKCKIHSIVKGKSQPNSYILHSGEQIEHMDEHNTYKYLGFHQSKQIQQKDTKLDLTKKFKIRLNQILRSHLDSRNTVKAVNTYAIPVLTYSFGIINWSQTDLQKLQRIINTHMTTHRKHHPRSCVQRLTLPRQDGGQGLIDIQNLHNSLITKLRTYFYYKAEHSQLYKYVNAIDKKLTPLNLSNDIIQPIVTSRQQKIDMWSQKSLHGRHLADLNQPHVDKNASNEWLRRGELFPETEAFMIAIQDQVMDTRNYQKYIIRLPNLPTDLCRRCHSSSETIQHITGACKSIVQTDYKHRHDQVASIIHQNLAFTHSFIPKKVAYYKYKPETVLENNSVKIYWDRTIITDKTIHFNRPDITLLDKTNNTVNIIDIAVCNTHNLLSTFNEKITKYVDLASEIKRQWQVDNVKILPIVISTTGVIPKSLLTSLNSLQMPVSITILLQKAAILNTCRLTRKFLASSTSP

SEQ ID NO: 23115 - protein, 1298 aa, Pheosia tremula
MESQVKRYSLRPLPGGRRGASGADAGCHSMRTVGDGGLNRRVPLEQYTTADQSSSPSSIAHSEPSLFSNIPSPSSIHSLFRSPNPSPSSSYSSRTTRSTAVVQEAFAINPAPTAGYSRARKKWTEDMNHFIWRTYLLITKCETTQMNNYLGLLHQEFDNRYPEMQTTRQRIGDQRRAIIRRKLLSQNVLDEISAEVRENLQTQISQTEYNSYTHNPNHPVHPTLLPSQNTNRHARMKWSDEMNDEIVRGYFELTELEINKTAYRKKLYDYFIERYPHLSHLTEQRIADQRRLIFNNKIYTSRIKQLKREIELKLKAPYNHPLTQVEHDPIIAEQSHQSIPESNIDMTLTQIQTYEQPHTLETNTDNENNPIQIQSNEMEAKIEIEFNHAIARFSEIDPETRPYIPKQKTSRKFSQIVQCLNNVILPKHLHEAIDFTSLHTLIYSAAFAAATCNGTRFNLDNNNVLNDRNGKPTWQRRIEKRIEKYRLEIGRLTQYIAGNRRQKIVKTVEEIKIKYKTHSQYEEPNTEPQHFLDTLKQKLNAVSNRLKRYLTCTKRKQQNSTFTNNEKQFYRTLGNNHQNNTTLPSESPTPQHLQEFWANIWENPVQHDTNAEWLPKISPHTAHINQMDFENIPIDIFTQVVKRTHNWKAPGTDNIYNYWYKKLTCTHPFIYTHINQFIQSPNTMPQFITHGITYMLPKGSDPKNPANYRPITCLQTIYKIITGCISAIIYHHLNLHNVLAEQQKGCRKNSQGCKEQLTIDAIVMKQAQTKNRNIHTMYIDYKKAFDSVPHSWLLYVLEYNKIHPNLISFLNEAMLHWKTKLKLIGNNKSLITGSIKIQRGIFQGDALSPLWFCLALNPLSNLLNDTNTGFKLKHNNTHHTLSHLMYMDDIKIYATNSTELTELVNITQSFSKDIQMQFGVDKCKIHSINRGKSQHNTYTLDTGEQIDPMDEHSTYKYLGFHQCKQIQQKQTKIELTTKFKLRLNQILRTQLNSRNITKAINTYAIPILTYSFGVINWSQSDFVKLQRIINTHMTTHRKHHPRSCIQRLTLPRREGGRGLIDIQNLNNSLVTKLRNYFYAKAEHSELHKYIAHIDNKLTPLNLNDRSMQPNITSRQEKTDKWSQKSLHGRHLSDLSQTHVDKEASNEWLRRGELFPETEAFMIAIQDQIIDTRNYQKHVIRIPNLSTDLCRRCHSSSETIQHITGACKSIVQTDYKHRHDQVAAIVHQNIAHKYLFISQKVAYYKYQPSTVLENSLYKIYWDRTIITDRTIHFNRPDITILDKTKKNSIYYRHSGMQHT

SEQ ID NO: 23116 - protein, 995 aa, Vanessa cardui
MQWHSLMTQTQRQDHIYIPKQKSSRKLSQIVYYLNNTIVPKYLNHDQHFNTVHTIIYLAAYTAALCNGTRFHAAENAVRNSRNKKPTWQRRIENKIEKYRLEIGRLTQYIAGNRSHKIIKTVDEIKIKHKTHSQHEEPNTEPQHFLDTLKQKLNAASHRLKRYLNCTKRKQQNHTFINNEKQFYRTMNTNHKDNTIQNSNTPTPQGLQQFWASIWENPVQHNSNAEWLLKSTNTGHIIAMDFENIPIDTFTQIIKRTHNWKAPGTDNIHNYWYKKLTCVHPFIHSHINQFIHAPHTMPSFISHGITYMVSKGSDPKNPANYRPITCLQTIYKIITGCISHLIYSHIDQHNILVEQQKGCRKNSQGCKEQLTIDAIVMKQAHTKKINIHTMYIDYKKAFDSVPHSWLLYILQHYKIHPNLITFLHATMLQWQTKLKLIQNNTSLTTETIKIQRGIFQGDSLSPLWFCIALNPLSELLNKTEMGIQMKHNDSYHTLSHLLYMDDIKIYAKNNAELTKLADITQSFSTDIQMQFGVDKCKIHSIIKGKSQRNTYILDNGEQIEYMDEHSTYKYLGFHQSKQIEQKQTKLDLIKAFKIRLNQILRTQLNSRNTVKAINTYAIPVLTYSFGIISWSQTDLLKLHRMISTHMSHHRKRHPRSCVQRLTLPRQDGGQGLIDIKNLHNTLTDKLRTYFYSKADHSQLHKHAIEIDKKLTPLNLSNRSIQPKLINRQQKIDLWSQKSLHGRHLADLGQSHVDKDASNEWLRRGELFPETEAFMIAIQDQVIDTRNYQKHIIRLPNLPTELCRRCHSSSETIQHITGACKSIVQTDYKHRHDQVAAIIHQNLAHAHSLITKKVAYYKYTPDTVLENSTFKIYWDRTIITDKTIHYNRPDITVIDKNKNIVIIIDIAVCNTHNLLNTYTEKITKYLELANEIKRQWQVDNIKILPIVISTTGVVPKTLSNNLNALQMPSSTIRLIQKAVILNTCRLTRKFLALSDP

SEQ ID NO: 23117 - protein, 757 aa, Schrankia costaestrigalis
MQSDSISFETLIQIIKRTHNWKATGSDNIHNYWYKKLTCTHPFIHNHINKFIQTPHTMPTFISHGITYMLPKGTDSINPANYRPITCLQTIYKIITGCISHLIYKHLDIHNILAEQQKGCRKSSQGCKEQLTIDTVIMKQALISKRNIHTMYIDYKKAFDSVPHSWLLHTLQLYKIHPTLIAFLSSTMLHWQTSLKLKQNNAILTTDPIKIQRGIFQGDSLSPLWFCIALNPLSELLNNSDVGFKLKNNSSYHTVSHLLYMDDIKIYATNNTQLIKLADITQTFSADIHMEFGVDKCKIHSIVKGKSQPNSYILHSGEQIEHMDEHNTYKYLGFHQSKQIQQKDTKLDLTKKFKIRLNQILRSHLDSRNTVKAVNTYAIPVLTYSFGIINWSQTDLQKLQRIINTHMTTHRKHHPRSCVQRLTLPRQDGGQGLIDIQNLHNSLITKLRTYFYYKAEHSQLHKYVNAIDKKLTPLNLSNDIIQPIVTSRQQKIDMWSQKSLHGRHLADLNQPHVDKNASNEWLRRGELFPETEAFMIAIQDQVMDTRNYQKYIIRLPNLPTDLCRRCHSSSETIQHITGACKSIVQTDYKHRHDQVASIIHQNLAFTHSFIPKKVAYYKYKPETVLENNSVKIYWDRTIITDKTIHFNRPDITLLDKTNNTVNIIDIAVCNTHNLLSTFNEKITKYVDLASEIKRQWQVDNVKILPIVISTTGVIPKSLLTSLNSLQMPVSTTILLQKAAILNTCRLTRKFLASSTSP

SEQ ID NO: 23118 - protein, 758 aa, Laspeyria flexula
MMDFENIPIDTFIQIIKRTHNWKAPGTDNIHNYWYKKLTCTHPFIHNHISQFIRSPDTMPTFISHGITFMLPKGSDPKNPANYRPITCLQTIYKIITGCISYLIYKHLDHHNILVEQQKGCRKNSQGCKEQLTIDAIVMKQVHTNNRNIHTMYIDYRKAFDSVPHSWLLYILQHYKIHPMLITFLSTAMLQWQTRLKLIQNKTSLTTEPIKIQRGIFQGDSLSPLWFCIALNPLSELLNNTDMGFKLKHNNSSHTLSHLLYMDDIKIYATNNTQLSKLADITQSFSTDIQMQFGVDKCKIHSIIRGKSQKNSYILDTGEEIDHMDEYSTYKYLGFHQSKQIQHKQTKLDLIKKFKIRLNRILRTQLNSRNSIKAINTYAIPVLTYSFGIIRWSQTDLQKLQRIINTHMTTHRKHHPKSCIQRLTLPRQDGGQGLIDVQNLHNTLVSKLRTYFHNKAEQSELHKYITEIDIKFTPLNLSNRNTQIKLTNRQDKLGTWSQKSLHGRHLADLGQAHVDRDASNEWLRRGELFPETEAFMIAIQDQVINTRNYQKHILHLPNLPSDLCRRCHSSSETIQHITGACKSIVQTDYKHRHDQVASIIHQNLAHIHTFISKKVAYYKYKPETILENSLVKIYWDRTIITDKTIHYNRPDITVLDKTNNSVFLIDIAVCNTHNLLSTYTEKMTKYVELATEIKRQWQVDNVKILPIVISTTGIIPKSLKTNLNFLQMPVSTLTLIQKAAILNTCRLTRKFLASSSST

SEQ ID NO: 23119 - protein, 1464 aa, Schrankia costaestrigalis
MYAFQRTGSPIDPSIMEKRNIIIIIITPPGDHLDVVGGLTGTRYWNIAYNIYCRLNRTNILTIIYNNNTYSTNDPKTPKTLMESRQSKYNLRPLPGVRRGTSGADAGCHSMRSVGDGGLSRRVPLEKNTTAERSSTPSSIITLSEHSPFSDIPSPSSTHTLFRSSHFSPHSSPCSSPSSSITSRSTRSTAVVQEALATNPASTAGPSRARKRWTEDMNRFIWRTYLLITKCETTQLNSYLELLHQEFDSKFPEMQASRQRVGDQRRAILRRKLLTQATLDEIFNEISRLINTHSTNYSSTRNTNTQLTTPMITQHSTTSSRIRWSDEMNDDIIRFYFEITKLETDKTAYRKKLHEIFIEKHSQLSHITEQRIADQRRILFNNKIYANKIKDIKTDVQQKLTENNTELQLDTLHVNTPTHNTTESTVDHTEHQNTMDNLVTLTQIQPFTQTLSDQNHENQQIRQIELEFNKALAHFSNTDPETRPFIPKQRLSRKFSQIVHHLNNLIIPKHLNNELDFLKLHTIIYSAAFAAAICNGTKLQFDNNARINKHNRIPRWQRRIEEKIKKYRLEIGRLTQYIAGNRQPKILNTVSEIKLKYKTHSQHEEPNTVPQHFLDTLKQKLNAASSRLKRYTACTKRKQQNLTFKNNERLFYRSLGNSDLNSNNPSPSLPSSQDLHQFWANIWENPVQHKTNADWLSDLKDTTNINNMQSDSISFETLIQIIKRTHNWKATGSDNIHNYWYKKLTCTHPFIHNHINKFIQTPHTMPTFISHGITYMLPKGTDSINPANYRPITCLQTIYKIITGCISHLIYKHLDIHNILAEQQKGCRKSSQGCKEQLTIDTVIMKQALISKRNIHTMYIDYKKAFDSVPHSWLLHTLQLYKIHPTLIAFLSSTMLHWQTSLKLKQNNAILTTDPIKIQRGIFQGDSLSPLWFCIALNPLSELLNNSDVGFKLKNNSLYHTVSHLLYMDDIKIYATNNTQLIKLADITQTFSADIHMEFGVDKCKIHSIVKGKSQPNSYILHSGEQIEHMDEHNTYKYLGFHQSKQIQQKDTKLDLTKKFKIRLNQILRSHLDSRNTVKAVNTYAIPVLTYSFGIINWSQTDLQKLQRIINTHMTTHRKHHPRSCVQRLTLPRQDGGQGLIDIQNLHNSLITKLRTYFYYKAEHSQLHKYVNAIDKKLTPLNLSNDIIQPIVTSRQQKIDMWSQKSLHGRHLADLNQPHVDKNASNEWLRRGELFPETEAFMIAIQDQVMDTRNYQKYIIRLPNLPTDLCRRCHSSSETIQHITGACKSIVQTDYKHRHDQVASIIHQNLAFTHSFIPKKVAYYKYKPETVLENNSVKIYWDRTIITDKTIHFNRPDITLLDKTNNTVNIIDIAVCNTHNLLSTFNEKITKYVDLASEIKRQWQVDNVKILPIVISTTGVIPKSLLTSLNSLQMPVSTTILLQKAAILNTCRLTRKFLASSTSP

SEQ ID NO: 23120 - protein, 1401 aa, Schrankia costaestrigalis
MIIYNNNTYPTNDPKTPKNLMESRPSKYNLRPLPGVRRGTSGADAGCHSMRTVGDGGLNRRVPLDKNTTAERSSSPSSIITLSEHSPFSDIPSPSSTHSLFRSSHSSPHTSPCSSPSSTITLRSTRSTAVVQEALATNPASTAGPSRARKRWTEDMNRFIWRTYLLITKCETTQLNSYLELLHQEFDNKFPDMQASRQRVGDQRRAILRRKLLTQTTFDEIFNEINQLINTHSTNHSLTRYTNTQLTTPMLTQYSTTSSRIRWSDEMNDDIIRFYFEVTKLETDKTAYRKKLHEIFIEKHPQLSHITEQRIADQRRILFNNKIYTNKINNIKAEVQQKLNEYNTELELDTLHVNTQTLNTTETIVDNTDHQNSMDTLATLTQIQPFTQTLSDPDFENQQISQIELEFNKALSHFSNTDPESRPFIPKQKLSRKFSQIIYHLNNIIIPKHLNHELDFLKLHTIIYSSAFAAAICNGTRLQLDNNTRINKQNRIPTWQRRIEEKIKKYRLEIGRLTQYIAGNRQPKILNTVNEIKLKYKTHSQYEEPNSVPQHFLDTLKQKLNAASSRLKRYMACTKRKQQNLTFKNNERQFYRSLGNSNNTNPSPTLPSSQDLHQFWANIWENPVQHKTNADWFSNLRDTTHINNMNSDFISIDTLIQIIKRTHNWKAPGTDNIHNYWYKKLTCTHPFIHNHINNFIQTPHTMPNFISHGITYMLPKGTDSINPANYRPITCLQTIYKIITGCISHLIYKHLDVHKVLAEQQKGCRKSSQGCKEQLTIDTIIMKQAHIGKRNIHTMYIDYKKAFDSVPHSWLLHTLHLYKIHPTLITFLSSTMLHWQTSLKLIQNNSTLTTDPIKIQRGIFQGDSLSPLWFCIALNPLSELLNNTNIGFKLKHNNSCHTISHLLYMDDIKIYSTNNTQLTELADITQTFSTDIHMQFGVDKCKIHSIVKGKSQPNSYILNSGEQIEHMDEHNTYKYLGFHQSKQIQQKETKLDLTKKFKIRLNQILRTHLDSRNTVKAINTYAIPVLTYSFGIINWSQTDLLKLQRMINTHMTTHRKHHPRSCVQRLTLPRQDGGQGLIDIQNLHNTLVTKLRTYFHNKAENSELHKYVNAIDKKLTPLNLSNNISQPIITSRQQKIDIWSQKSLHGRHLADLNQPHVDKNASNEWLRRGELFPETEAFMIAIQDQVIDTRNYQKYIIRLPNLTTDLCRRCHSSSETIQHITGACKSIVQTDYKHRHDQVASIIHQNLAYTHSFIHKRVAYYKYKPETVLENNSVKLYWDRTIITDKTIHFNRPDITLLDKTKNIVYLIDIAVCNTHNLLSTFNEKITKYVDLASEIKRQWQVDNVKILPIVLSTTGVIPKSLSTSLNSLQMPFSTTILLQKAAILNTCRLTRKFLATSTSP

SEQ ID NO: 23121 - protein, 1154 aa, Schrankia costaestrigalis
MITQHSTTSSRIRWSDEMNDDIIRFYFEITKLETDKTAYRKKLHEIFIEKHSQLSHITEQRIADQRRILFNNKIYANKIKDIKTDVQQKLTENNTELQLDTLHVNTPTLNTTESTVDHTEHQNTMDNLVTLTQIQPFTQTLSDQNHENQQIRQIELEFNKALAHFSNTDPETRPFIPKQRLSRKFSQIVHHLNNLIIPKHLNNELDFLKLHTIIYSAAFAAAICNGTKLQFDNNARINKHNRIPRWQRRIEEKIKKYRLEIGRLTQYIAGNRQPKILNTVSEIKLKYKTHSQHEEPNTVPQHFLDTLKQKLNAASSRLKRYTACTKRKQQNLTFKNNERLFYRSLGNSDLNNNNPSPSLPSSQDLHQFWANIWENPVQHKTNADWLSDLKDTTNINNMQSDSISFDTLIQIIKRTHNWKATGSDNIHNYWYKKLTCTHPFIHNHINKFIQTPHTMPTFISHGITYMLPKGTDSINPANYRPITCLQTIYKIITGCISHLIYKHLDIHNILAEQQKGCRKSSQGCKEQLTIDTVIMKQALISKRNIHTMYIDYKKAFDSVPHSWLLHTLQLYKIHPTLIAFLSSTMLHWQTSLKLKQNNAILTTDPIKIQRGIFQGDSLSPLWFCIALNPLSELLNNSDVGFKLKNNSSYHTVSHLLYMDDIKIYATNNTQLIKLADITQTFSTDIHMEFGVDKCKIHSIVKGKSQPNSYILHSGEQIEHMDEHNTYKYLGFHQSKQIQQKDTKLDLTKKFKIRLNQILRSHLDSRNTVKAVNTYAIPVLTYSFGIINWSQTDLQKLQRIINTHMTTHRKHHPRSCVQRLTLPRQDGGQGLIDIQNLHNSLITKLRTYFYYKAEHSQLHKYVNAIDKKLTPLNLSNDIIQPIVTSRQQKIDMWSQKSLHGRHLADLNQPHVDKNASNEWLRRGQLFPETEAFMIAIQDQVMDTRNYQKYIIRLPNLPTDLCRRCHSSSETIQHITGACKSIVQTDYKHRHDQVASIIHQNLAFTHSFIPKKVAYYKYKPETVLENNSVKIYWDRTIITDKTIHFNRPDITLLDKTNNTVNIIDIAVCNTHNLLSTFNEKITKYVDLASEIKRQWQVDNVKILPIVISTTGVIPKSLLTSLNSLQMPVSTTILLQKAAILNTCRLTRKFLASSTSP

SEQ ID NO: 23122 - protein, 1385 aa, Notodonta dromedarius
MESQLKRYSLRPLPGGRRGASGADAGCHSMRTVGDGGLSRRVPLEKNTTADQSSSPSSIAHSEPSLFSNIPSPSSTHSLFRSPNSSPSSSYSSRTRSTVVVQEASATNPAPTAGYSRARKKWTEDMNRFIWRTYLFITKCETTHMNNYLEVLHQEFDNRYPEMQTTRQRIGDQKRAIIRRKLLSQDILDQINSDVRDHLQTENCQSEYHSSTFTHHSNHPISPTHMASLTNTTSNTRIKWSDEMNDEIIRCYFEVTELEMYKTAYRKKLYELFIERLPHLSHLTEQRIADQRRLLFSNRTYTSRIQDLKREVGLKLIGLNNHPQPQQDVTIAAHPHYTQPEDTINTTPRQTHTLTESSTATLASTDIELNLNQIQSTEVENDKIEVEFNNAMERFRKVDPETRPYIPKQKTSRKFSQIVQCLNAVILPKYLNHELDFNSLHTLIYSAAFAAASCNGTRFNLDANTPPNNRNKKPAWQRRIQSRIDKYRLEIGRLTQYIAGNRNQRIVQTVEEIKIKYKNHSQHEQPNTEPQHFLDTLKQKLNAASNRLKRYLTCTKRKQQNLTFTNNEKQFYRTLGNHQQNNTTLNSEVPSPQRLQQFWGDIWEHPVQHNTDAEWLHKISSYTAHITQMNSENIPIETFTQIVKRTHNWKAPGTDNIHNYWYKKLSCTHPFIYSHICQFIQSPNIMPTFLTHGITYMLPKGSDPKNPANYRPITCLQTIYKIITGCISAIIYQHLDQHTVLAEQQKGCRKNSQGCKEQLTIDAIVMKQAQTKHRNIHTMYIDYKKAFDSVPHSWLIYVLELYKIHPSLISFLNIAMLHWETKLKLIDNNTSFITEPIKIQRGIFQGDALSPLWFCLALNPLSELLNDTNTGFRLKHNNRYHILSHLMYMDDIKIYATNNAELTKLADITQSFSTDIQMQFGVDKCKIHSINRGKSQHNTYTLDTGEQIEPMDEHSTYKYLGFHQSKQIQQKQAKIELTRKFKLRLNQILRTQLNSRNIIKAINTYAIPILTYSFGIINWSQTDLVKLQRMINTHMTTHRKHHPRSCVQRLTLPRREGGIGLIDIQNLHNSIITKLRSYFYAKAEHTNLHKYIADIDIKLTPLNLSSRDMQLNVTSRQNKIDKWSQKSLHGRHLADLSQTHVDREASNEWLRRGELFPETEAFMIAIQDQVMDTRNYQKHIIRLPNLPTDLCRRCHSSSETIQHITGACKSIVQTDYKHRHDQVAAIVHQNIAHKYSFIPKKVAYYKYQPSTILENSLYKVYWDRTIITDRTIHFNRPDITILDKANKAVFIIDIAVCNTHNLLTTHTEKMTKYIDLATEIKRQWQVDTVKIIPIVISTTGVIPSTLHTSLNTLQMPKSTLSLMQKAVILNTCRLTRKFLQNSSSS

SEQ ID NO: 23123 - protein, 994 aa, Notodonta dromedarius
MERFREVDPETRPYIPKQKTSRKFSQIVQCLNNVILPKYLNHELDFNSLHTLIYSAAFAAASCNGTRFNLDANTPPNNRNKKPAWQRRIQSRIDKYRLEIGRLTQYIAGNRNQRIVQTVEEIKIKYKNHSQHEQPNTEPQHFLDTLKQKLNAASNRLKRYLTCTKRKQQNLTFTNNEKQFYRTLGNHQQNNTTLNSEVPSPQRLRQFWGDIWEHPVQHNTDAEWLHKISSYTAHITQMNSENIPIETFTQIVKRTHNWKAPGTDNIHNYWYKKLTCTHPFIYSHICQFIQSPHIMPTFLTHGITYMLPKGSDPKNPANYRPITCLQTIYKIITGCISAIIYQHLDQHTVLAEQQKGCRKNSQGCKEQLTIDAIVMKQAQTKHRNIHTMYIDYKKAFDSVPHSWLIYVLELYKIHPSLISFLNIAMLHWETKLKLIDNNTSLITEPIKIQRGIFQGDALSPLWFCLALNPLSELLNDTNTGFRLKHNNRYHILSHLMYMDDIKIYATNNAELTKLADITQSFSTDIQMQFGVDKCKIHSINRGKSQHNTYTLDTGEQIEPMDEHSTYKYLGFHQSKQIQQKQAKIELTRKFKLRLNQILRTQLNSRNIIKAINTYAIPILTYSFGIINWSQTDLVKLQRMINTHMTTHRKHHPRSCVQRLTLPRREGGRGLIDIQNLHNSIITKLRSYFYAKAEHTDLHKYIADIDIKLTPLNLSYRYMQLNITSRQNKIDKWSQKSLHGRHLADLSQTHVDREASNEWLRRGELFPETEAFMIAIQDQVMDTRNYQKHIIRLPNPPTDLCRRCHSSSETIQHITGACKSIVQTDYKHRHDQVAAIVHQNIAHKYSFIPKKVAYYKYQPSTILENSLYKVYWDRTIITDRTIHFNRPDITILDKANKAVFIIDIAVCNTHNLLTTHTEKMTKYIDLATEIKRQWQVDTVKIIPIVISTTGVIPSTLHTSLNTLQMPKSTLSLMQKAVILNTCRLTRKFLQNSSSS

SEQ ID NO: 23124 - protein, 1377 aa, Vanessa atalanta
MEKIMESRNKIYSLRPLPGGRRGTSGANAGCHSMRTVGDGGLSRRVPLEKLTTAEPSSSPSSNSSSEHSLFSNIPSPSSTHSLFRSLNSSPSSLYSLRSTRSTAVVQKALAINPVPTADLPRVRKKWTDDMNRFIWRTYLIITKCETTHMNSYLESLHKEFDCKFPEMQASRQRLGDQRRAILRRKLLSQSTLDDIRDEVKQQIQTDSHIIHNHSEAHQTNSLMHLTPTLTQNKPTNSRMKWSDAINDEIIRCYFIVTELETNKTAYRKKLHELFIEKHPHLSHITEQRIADQRRLLFNNKINLNKLHRLKREVEQKLSELNIHPQLQTPGKNITIENFDNNKPKIATDTSNSLTQIRPQTQIQTLITDIDPENHLLQKIEIEFSNAIAQFSDTNPETRPYIPKQKSSRKFSQIVYYLNSTVVPKHLNHDQNFNTLHTIIYSAAYTAAACNGTRFFAAEYTVRNSRNRKPTWQKRIENKIEKYRLEIGRLTQYIAGNRSHKILKTVDEIKIKYKTHSRHEEPNTEPQHFLDTLKQKLNAASNRLKRYLNCTKRKQQNLTFINNEKQFYRTMNTNHEDNTTQNSNTPSPQDLQQFWASIWENPVQHNTNADWLLKSADTGRITAMDFENISIDIFIQIIKRTHNWKSPGTDNIHNYWYKKLTCVHPFIHSHINQFIHSPHTMPKFISHGITYMLSKGADSKNPANYRPITCLQTIYKIITGCISHLIYTHIDHHNILAEQQKGCRKNSQGCKEQLTIDAIVMKQALTKKLNIHTMYIDYKKAFDSVPHSWLLYILQHYKIHPNLITFLRVTMLHWQTKLKLIQNNTSLTTETIKIQRGIFQGDSLSPLWFCIALNPLSELLNKTEMGLQLKHNDSHHTLSHLLYMDDIKIYAKNNAELTKLADITQSFSTDIQMQFGVDKCKIHSIIKGKSQTNSYVLDTGEQIEHMNEHNTYKYLGFHQSKQIEQKQTKLDLIKTFKIRLNQILRTQLNSRNTVKAINTYAIPVLTYSFGIITWSQTDLLKLQRMINTHMSSHRKRHPRSCIQRLTLPRQDGGQGLIDIKNLHNTLTNKLRNYFYSKADHSQLHKHAIEIDKKLTPLNLSNRSIQAKLITRQQKIDLWSQKSLHGRHLADLGQSHVDKDASNEWLRRGELFPETEAFMIAIQDQVIDTRNYQKHIIRLPNLPTDLCRRCHSSSETIQHITGACKSIVQTDYKHRHDQVAAIIHQNLAHAYSLLTKKVAYYKYTPDTVLENSTFKLYWDRTIITDKTIHYNRPDITVIDKNKNIVFIIDIAVCNTHNLLNTYTEKISKYVELATEIKRQWQVDNVKILPIVISTTGVIPKTLSTNLNALQMPASTITLIQKAVILNTCRLTRKFLSSS

SEQ ID NO: 23125 - protein, 1379 aa, Lycaena phlaeas
MESQFNRYSLRPLPGGRRGASGADAGCHSMRTVGDGGLSRRVPLEQNITADRSSSPSSISQSESSLFSNIPSPSSTHSLFRSPNSSPSSTYSSRTTRSTAVVQEASAINPAPTVGYSCARKKWTVDMNSFIWRTYLLITKCETTQMNNYLEPLHREFDNRYPEMKATRQRVGDQRRAILRRKLLSQNTLEQINADIREQIQTENFQTEYHSYTSTHHSNHSVYPTNTPSQTNTASNNRIKWSEELNDEIVRCYFEVTELEKYKTSYRNKLHELFIARHPHLSHLTEQRIADQRRLIFNNTKHISRIQSLKKEVELKLKRLNHPQHDVEQDLTIAEHPQTETQTHQQTYTFTEPLLLSQPFTLTNINSIQVEINDIVAQNIEVEFNNAKERFSSIDPEKRPFIPKQKTSRKFSQIVQYLNNVVLPKHLNHALDFISLHTLIYAAAFTAASCNGTRFKLDANTPANSRNKKPAWQRRIESKIDKYRLEIGRLTQFLAGNRNRKIVITVEEIKIKYKTHSQHEEPNTEPQHFLDTLKQKLNAASNRLKRYLSCTKRKQQNSTFTKNEKQFYRSLNNNQQNKKSAEIPSPQHLQQFWANIWENPVQHNSNAEWLNKIISHRANVNQMDFENIPMQTFTQIVKRTHNWKAPGSDNIHNYWYKKLTSTHPFIFNHICEFIQSPHTMPTFITRGITYMLSKGSDSKNPANYRPITCLQTIYKIITGCISEIIYQHLDQHSILAEQQKGCRKNSQGCKEQLIIDAIAMKQAQTKNRNIHTMYIDYKKAYDSVPHSWLLYILEHYKIHPNLISFLNTAMLQWETKLKLIDNNTSLITEPIKIQRGIFQGDALSPLWFCLALNPLSELLNDTNIGFKLKYHNTHHTLSHLMYMDDIKIYATNNTELTQLAVITQSFSTDIQMQFGVNKCKIHSIIRGKSQHNTYTLYTGELIEPMDEHSTYKYLGFHQSKQIQQKQTKSDLTSKFKFRLNQILRTQLTSRNSIKAINTYAIPILTYSFGIINWSQSDLVKLQRIINTHMTTHRKHHPRSCIQRLTLPRREGGRGLIDIQNLHNSLIIKLRSYFYTKAEHTDLHKYISNIDEKLTPLNLNDRNMQSNITSRQDKIDKWSQKSLHGRHLADLSQTHVDREASNEWLRRGELFPETEAFMIAIQDQVMDTRNYQKHIIRLPNLPTDLCRRCHSSSETIQHITGACKSIVQTDYKHRHNQVAAIVHQNIAHKYSFIPQKVAYYKYQPSTVLENNSYKVYWDRTIITDRTIHYNRPDITILDKTNKTVFIIDIAVCNTHNLLTTHTEKITKYIDLATEIKRQWEVDTVKIVPIVISTTGVIPSTLQNNLNILQIPKSTITLIQKAVILNTCRLTRKFLQNSSST

SEQ ID NO: 23126 - protein, 1377 aa, Vanessa atalanta
MEKIMESRNKIYSLRPLPGGRRGTSGANAGCHSMRTVGDGGLSRRVPLEKLTTAERSSSPSSNSSSEHSLFSNIPSPSSTHSLFRSLNSSPSSLYSLRSTRSTAVVQKALAINPVPTADLPRVRKKWTDDMNRFIWRTYLIITKCETTHMNSYLESLHKEFDCKFPEMQASRQRLGDQRRAILRRKLLSQSTLDDIRDEVKQQIQTDSHIIHNHSEAHQTNSLMHLTPTLTQNKPTNSRMKWSDAINDEIIRCYFIVTELETNKTAYRKKLHELFIEKHPHLSHITEQRIADQRRLLFNNKININKLHRLKREVEQKLSELNIHPQLQTPGKNITIENFDNNKPKIATDTSNSLTQIRPQTQIQTLITDIDPENHLLQKIEIEFSNAIAQFSDTNPETRPYIPKQKSSRKFSQIVYYLNNTVVPKHLNHDQNFNTLHTIIYSAAYTAAACNGTRFFAAEYTVRNSRNRKPTWQKRIENKIEKYRLEIGRLTQYIAGNRSHKILKTVDEIKIKYKTHSRHEEPNTEPQHFLDTLKQKLNAASNRLKRYLNCKKRKQQNLTFINNEKQFYRTMNTNHEDNTTQNSNTPSPQDLQQFWASIWENPVQHNTNADWLLKSADTGRITAMDFENISIDIFIQIIKRTHNWKAPGTDNIHNYWYKKLTCVHPFIHSHINQFIHSPHTMPKFISHGITYMLSKGADSKNPANYRPITCLQTIYKIITGCISHLIYTHIDHHNILAEQQKGCRKNSQGCKEQLTIDAIVMKQALTKKLNIHTMYIDYKKAFDSVPHSWLLYILQHYKIHPNLITFLRVTMLHWQTKLKLIQNNTSLTTETIKIQRGIFQGDSLSPLWFCIALNPLSELLNKTEMGLQLKHNDSHHTLSHLLYMDDIKIYAKNNAELTKLADITQSFSTDIQMQFGVDKCKIHSIIKGKSQTNSYVLDTGEQIEHMNEHNTYKYLGFHQSKQIEQKQTKLDLIKTFKIRLNQILRTQLNSRNTVKAINTYAIPVLTYSFGIITWSQTDLLKLQRMINTHMSSHRKRHPRSCIQRLTLPRQDGGQGLIDIKNLHNTLTNKLRNYFYSKADHSQLHKHAIEIDKKLTPLNLSNRSIQAKLITRQQKIDLWSQKSLHGRHLADLGQSHVDKDASNEWLRRGELFPETEAFMIAIQDQVIDTRNYQKHIIRLPNLPTDLCRRCHSSSETIQHITGACKSIVQTDYKHRHDQVAAIIHQNLAHAYSLLTKKVAYYKYTPDTVLENSTFKLYWDRTIITDKTIHYNRPDITVIDKNKNIVFIIDIAVCNTHNLLNTYTEKISKYVELATEIKRQWQVDNVKILPIVISTTGVIPKTLSTNLNALQMPASTITLIQKAVILNTCRLTRKFLSSS

SEQ ID NO: 23127 - protein, 1306 aa, Vanessa cardui
MILIIISPSSTHSLFRSLNSSPSSSYSLRSTRSTTVVQEALATKPVPTADLPRARKKWTQDMNRFIWRTYLIITKCETTRMNTYLESLHKEFDSKFPEMQASRQRLGDQRRAILRTKLLSQRTLDDIRGEVKQLIQTDSHDHSHARKTNSPFDFTHTLTQIKSTTTRMKWTDEINEEIIRCYFLVTELETNKTAYRKKMHELFVKKYPHLSHITEQRIADQRRLLFNNKTNINKLDILKREVEQKLAELNVHLPQTTEKHITLQNLDNNKPEISIDTSSALTQIQPQAQLPTLITDTDLENHLLQKVETEFSNAMAQFNDTNPETRPYIPKQKSSRKLSQIVYYLNNTIVPKYLNHDQHFNTVHTIIYSAAYTAALCNGTRFHAAENAVRNSRNKKPTWQRRIENKIEKYRLEIGRLTQYIAGNRSHKIIKTVDEIKIKHKTHSQHEEPNTEPQHFLDTLKQKLNVASHRLKRYLNCTKRKQQNHTFINNEKQFYRTMNTNHKDNTIQNSNTPTPQGLQQFWASIWENPVQHNSNAEWLLKSTNTGHIIAMDFENIPIDTFTQIIKRTHNWKAPGTDNIHNYWYKKLTCVHPFIHSHINQFIHAPHTMPSFISHGITYMVSKGSDPKNPANYRPITCLQTIYKIITGCISHLIYSHIDQHNILVEQQKGCRKNSQGCKEQLTIDAIVMKQAHTKKINIHTMYIDYKKAFDSVPHSWLLYILQHYKIHPNLITFLHATMLQWQTKLKLIQNNTSLTTETIKIQRGIFQGDSLSPLWFCIALNPLSELLNKTEMGIQMKHNDSYHTLSHLLYMDDIKIYAKNNAELTKLADITQSFSTDIQMQFGVDKCKIHSIIKGKSQRNTYILDTGEQIEYMDEHSTYKYLGFHQSKQIEQKQTKLDLIKAFKIRLNQILRTQLNSRNTVKAINTYAIPVLTYSFGIISWSQTDLLKLQRMISTHMSHHRKRHPRSCVQRLTLPRQDGGQGLIDIKNLHNTLTDKLRTYFYSKADHSQLHKHAIEIDKKLTPLNLSNRSIQPKLINRQQKIDLWSQKSLHGRHLADLGQSHVDKDASNEWLRRGELFPETEAFMIAIQDQVIDTRNYQKHIIRLPNLPTDLCRRCHSSSETIQHITGACKSIVQTDYKHRHDQVAAIIHQNLAHAHSLITKKVAYYKYTPDTVLENSTFKIYWDRTIITDKTIHYNRPDITVIDKNKNIVIIIDIAVCNTHNLLNTYTEKITKYLELANEIKRQWQVDNIKILPIVISTTGVVPKTLSNNLNALQMPSSTIRLIQKAVILNTCRLTRKFLALSDP

SEQ ID NO: 23128 - protein, 1160 aa, Notodonta dromedarius
MASLTNTTSNTRIKWSDEMNDEIIRCYFEVTELEMYKTAYRKKLYELFIERLPHLSHLTEQRIADQRRLLFSNRTYTSRIQDLKREVGLKLIELNNHPQPQQDVTIAAHPHYTQREDTINTTPRQTHTLTESSPATLASTDIEHNLNQIQSTEVENDKIEVEFNNAIERFREVDPETRPYIPKQKTSRKFSQIVQCLNNVILPKYLNHELDFNSLHTLIYSAAFAAASCNGTRFNLDANTPPNNRNKKPAWQRRIQSRIDKYRLEIGRLTQYIAGNRNQRIVQTVEEIKIKYKNHSQHEQPNTEPQHFLDTLKQKLNAASNRLKRYLTCTKRKQQNLTFTNNEKQFYRTLGNHQQNNTTMNSEVPSPQRLQQFWGDIWDHPVQHNTDAEWLHKISSYTAHITQMNSENIPIETFTQIVKRTHNWKAPGTDNIHNYWYKKLTCTHPFIYSHICQFIQSPHIMPTFLTHGITYMLPKGSDPKNPANYRPITCLQTIYKIITGCISAIIYQHLDQHTVLAEQQKGCRKNSQGCKEQLTIDAIVMKQAQTKHRNIHTMYIDYKKAFDSVPHSWLIYVLELYKIHPSLISFLNIAMLHWETKLKLIDNNTSLITEPIKIQRGIFQGDALSPLWFCLALNPLSELLNDTNTGFRLKHNNRYHILSHLMYMDDIKIYATNNAELTKLADITQSFSTDIQMQFGVDKCKIHSINRGKSQHNTYTLDTGEQIEPMDEHSTYKYLGFHQSKQIQQKQAKIELTRKFKLRLNQILRTQLNSRNIIKAINTYAIPILTYSFGIINWSQTDLGKLQRMINTHMTTHRKHHPRSCVQRLTLPRQEGGRGLIDIQNLHNSIITKLRSYFYAKAEHTDLHKYIADIDIKLTPLNLSYRDMQLNITSRQNKIDKWSQKSLHGRHLADLSQTHVDREASNEWLRRGELFPETEAFMIAIQDQVMDTRNYQKHIIRLPNLPTDLCRRCHSSSETIQHITGACKSIVQTDYKHRHDQVAAIVHQNIAHKYYFIPKKVAYYKYQPSTILENSLYKVYWDRTIITDRTIHFNRPDITILDKANNAVFIIDIAVCNTHNLLTTHTEKMTKYIDLATEIKRQWQVDKVKIIPIVISTTGVIPSTLHTSLNTLQMPKSTLSLMQKAVILNTCRLTRKFLQNSSSS

SEQ ID NO: 23129 - protein, 1406 aa, Laspeyria flexula
MITHRHTKYMKMRLRNRELPQVGTGAPCNGESRPEPSGSGSLSYSGGGNVSRKTAQSRTVVVQNHQKCSFISKSSSPTPSLSKSSSPTSSSPPSIISSDHMLFSSIPSPASTHSLYRSSNSSPSSSVTSHSTRSTRSTTVVQEALATNPAPTAGQIRARKKWTEDMNRFIWRTYLIITKCETTQLNSYLEPLHQEFSSKFPEMQVTRQRLGDQRRAILRSKLLPQSTIDIIHDEVKQQIHTNSYTNSQHLTHTLPQNDFTSNSRIKWTNKMNEDIIRGYFEVTKLETNKTAYRKKLHELFIQIHPHLSHITEQRIADQRRLLFNNRTNINKIDDIKKEVQLKLREPNSQAQLDVQIDIITDSIDSIDHNQYQGTTDTPITLTQTLTQTQVVTQTHIEPENYLLCKIETQFNNAILQFKDTNPETRPYIPKQKTSRKFSKIIDLLNNTIVPKHLNHEIDFTTLHTIIYSAAFAAAICNGTRLQLDENCVRNRYDNKPNWQRRIENKIKQYRLEIGRLTQYIAGNRSQKILKTVDEIREKYKSHSQHEELNTEPQHFLDTLKQKLSAASNRLKRYLNCTKRKQQNHTFLNNEKQFYRNLGNNDSHDTNQSPSTPSPQDLQQFWANIWENPTLHNANADWLSKLTDTEHINMMDFENIPIDTFIQIIKRTHNWKAPGTDNIHNYWYKKLTCTHPFIHNHISQFIRSPDTMPTFISHGITFMLPKGSDPKNPANYRPITCLQTIYKIITGCISYLIFKHLDHHNILVEQQKGCRKNSQGCKEQLTIDAIVMKQVNTNNRNIHTMYIDYRKAFDSVPHSWLLYILQHYKIHPMLITFLSTAMLQWQTRLKLIQNKTSLTTEPIKIQRGIFQGDSLSPLWFCIALNPLSELLNNTDMGFKLKHNDSSHTLSHLLYMDDIKIYATNNTQLSKLADITQSFSTDIQMQFGVDKCKIHSIIRGKSQKNSYILDTGEEIDHMDEYSTYKYLGVHQSKQIQHKQTKLDLIKKFKIRLNQILRTQLNSRNSIKAINTYAIPVLTYSFGIIRWSQTDLQKLQRIINTHMTTHRKHHPKSCIQRLTLPRQDGGQGLIDVQNLHNTLVSKLRTYFHNKAEQSELHKYITEIDIKFTPLNLSNRNTQIKLTNRQEKLGTWSQKSLHGRHLADLGQAHVDRDASNEWLRRGELFPETEAFMIAIQDQVINTRNYQKHILHLPNLPSDLCRRCHSSSETIQYITGACKSIVQTDYKHRHDQVASIIHQNLAHIHTFISKKVAYYKYKPETILENSLVKIYWDRTIITDKTIHYNRPDITVLDKTNNSVFLIDIAVCNTHNLLSTYTEKMTKYVELATEIKRQWQVDNVKILPIVISTTGIIPKSLKTNLNFLQMPVSTLTLIQKAAILNTCRLTRKFLASSSST

SEQ ID NO: 23130 - protein, 1275 aa, Perichares adela
MESQLRRYSLRPLPGGRRGASGANAGCHSMRTVGDGGLSRRVPLEQYATAEQSFSPSSISFSEPSLFSSPSSTSSVFPSPQSSPSSSQSSRTTRSATVVQEAIAIDSAPNADHNRARKKWTQDMNRFIWRTYLVVTKCETINANTYLEPLHIEFDRKYPEMHASRQRIGDQRRAIIRRKLIPDNIMEEIRNEVILLIQTENHSPTQNTNNSTHFTEFIPSQTNTISTRMKWSNEINDDIVRCYFEVTELGSNNTAYRKKLYDKFIEKHPNLSHLTEQRIADQRRIIFSRKAYVNQIITLKREIELKLKEVHRLSQINTQQNIVDLDKHSCNTQPENITNTTLNSTPTRVSTSSSSQVVAGTKNNEIDFDNINTEFKNAVARFNSTNPECRPYIPKQKTSRKFSQIIQYLNRKILPEYLNDELDFTSLHTIVYSAAFTAASFNGTKFKWNVIIDQNKYNRKPTWQRRLEKKIEKYRLEIGRLTQYIAGNRKQKILKTIEDIKNKYKTHSQHEEPNAEPQHFLDTLKQKLNAFSNRLKRYLNCTKRKKENLTFANNEKQFYRMLNKNQSGKITQSPDTPTSECLQHFWANIWDNPVQHYPDAEWLHKLADTTHINQMDSDNISIDTLTKIVNRTHNLKAPGTDNLHNYWYKKLTCIHPFIHKHICQFIQSPHLMPDFLTRGITYMLPKGTNSKDPANYRPITCLQTMYKIITSCISDKIYQHVQKHDILAEQQKGARKNSQGCKEQLTIDAIVMKQARTKNRNIHTLYIDYKKAFDSVPHSWLIYVLQHYKIDPEIVTFLNTVMLKWETKLKLSNNNASVYTENIKIRRGIFQGDALSPLWFCIALNPLSELLNNTKAGFQLKHDRTHHTISHLMYMDDIKIYASNNTDLLNLTDITQTFSTDIQMQFGVDKCKIHSIVRGKTKQNSYTLETGEEIEAMDEDSTYKYLGFHQSKQIEQKQTKEELINKFKFRLNRILRTQLNSQNIIKAINTYAIPILTYSFGIISWSQTDLLKLQRTINTRMTAHRKHHPRSCIQRLTLPRREGGRGLIDIQNLHNNLLTKLRKYFYTKAAKTELHKYIVDIDKKLTPLNLHDRTVQINILSKQQKLDMWSQKSLHGRHFADINQTQVDKEASNEWLRRGELFPETEAFMLAIQDQVIDTRNYQKHITRVSSSTNDLCRRCQSSSETIQHITGACRSIAQTDYKHRHDQIAGIIHQNLAHTYRFITKKDAYYKYQPSKILENDTYKIYWDRTIITDKTIHFNRPDITVLDKINKTV

SEQ ID NO: 23131 - protein, 945 aa, Lycas argentea
MVYSAAFTAASFNGTKFKCYENINQNNYNRKPTWHRRIEKKIDKYRLEIGRLTQYIAGNRKHKIVKTVEDIKIKYKTHSQHEEPNSEPQHFLDTLKQKLNAAASRLKRYLNCTKRKQENLTFSNNEKQFYRMLNRNQHGETTQFADTPSPECLQHFWANIWDNPVQHNSNSEWLHKLSDTTHINQMDFEDISIDTLTRIINRTHNWKAPGTDNIHNYWYKKFTCIHPFIHKHICQFIDSPHLMPEFLTHGITYMLSKGPNSKDPANYRPITCLQTIYKILTSCISDIIYQHVQTHDILAEQQKGARKNSQGCKEQLTIDAIVMKQARTKNRNIHTLYIDYKKAFDSVPHSWLIYVLQHYKIDPKLVTFLNTVMLKWETRLKLSHNNTSIVTENIKIRRGIFQGDALSPLWFCIALNPLSELLNNTNAGFQLKHDKTHHTISHLMYMDDIKIYSSNNIDLLKLADVTQAFSTDIQMQFGVDKCKIHSVVRGKTQENTYTLDTGEKIDAMDKDSTYKYLGFHQAKQIEQKQTKEELINKFKFRLNQILKTHLNSQNIIKAINTYAIPILTYSFGIITWNQTDLLKLQRTINTRMTAHRKHHPRSCTQRLTLPRREGGRGLIDIQNLHNNLITKLRNYFYAKAAKTELHKYVTDIDKRLTPLNLHDRAVQLNTQSKQQKLDTWSQKSLHGRHLADLNQTHVDKEASNEWLRRGELFPETEAFMLAIQDQVIDTRNYQKHITHVSNSSNDLCRRCHSSSETIQHITGACRSIAQTDYKHRHDQIAAIIHQNLAHKYGFITNKYPYYKYQPNKILESDTYKIYWDRTIITDKTIHFNRPDITILDKMNNTVFIIDIAVCNTHNLHSTQTEKMTKYIDLATEIKTQWHVDIVKIVPIVISSTGVVPIALQSSLSTLKMPKSTLSLMQKAVILNTCRLTRKFLASSSAYHPN

SEQ ID NO: 23132 - protein, 809 aa, Vanessa cardui
MNTNHKENTIQNSNTPTPQGLQQFWASIWENPVQHNSNAEWLLKLTNTGHIIAMDFENIPIDTFTQIIKRTHNWKAPRTDNIHNYWYKKLTCVHPFIHSHINQFIHAPHTMPSFISHGITYMVSKGSDPKNPANYRPITCLQTIYKIITGCISHLIYSHIDKHNILVEQQKGCRKNSQGCKEQLTIDAIVMKQAHTKKINIHTMYIDYKKAFDSVPHSWLLYILQHYKIHLNLITFLHATMLQWQTKLKLIQNNTSLTTETIKIQRGIFQGDSLSPLWFCIALNPLSELLNKTEMGIKMKHNDSYHTLSHLLYMDDIKIYAKNNAELTKLADITQSFSTDIQMQFGVDKCKIHSIIKGKSQRNTYILDTGEQIEYMDEHSTYKYLGFHQSKQIEQKQTKLDLIKAFKIRLNQILRTQLNSRNTVKAINTYAIPVLTYSFGIISWSQTDLLKLQRMISTHMSHHRKRHPRSCVQRLTLPRQDGGQGLIDIKNLHNTLTDKLRTYFYSKADHSQLHKHAIEIDKKLTPLNLSNRSIQPKLINRQQKIDLWSQKSLHGRHLADLGQSHVDKDASNEWLRRGELFPETEAFMIAIQDQVIDTRNYQKHIIRLPNLPTDLCRRCHSSSETIQHITGACKSIVQTDYKHRHDQVAAIIHQNLAHAHSLITKKVAYYKYTPDTVLENSTFKIYWDRTIFTDKTINYNRPDITVIDKNKNIVIIIDIAVCNTHNLLNTYTEKITKYLELANEIKRQWQVDNIKILPIVISTTGVVPKTLSNNLNALQMPSSTIRLIQKAVILNTCRLTRKFLALSDP

SEQ ID NO: 23133 - protein, 1385 aa, Notodonta dromedarius
MESQLKRYSLRPLPGGRRGASGADAGCHSMRTVGDGGLSRRVPLEKNTTADQSSSPSSIANSEPSLFSNIPSPSSTHSLFRSPNSSPSSSYSSRTRSTVVVQEASATNPAPTAGYSRARKKWTEDMNRFIWRTYLFITKCETTHMNNYLEVLHQEFDNRYPEMQTTRQRIGDQKRAIIRRKLLSQDILDQINSDVRDHLQTENCQSEYHSSTFTHHSNHPVSPTHMASLTNTTSNTRIKWSDEMNDEIIRCYFEVTELEMYKTAYRKKLYELFIERLPHLSHLTEQRIADQRRLLFSNRTYTSRIQDLKREVGLKLIGLNNHPQPQQDVTIAAHPHYTQPEDTINTTPRQTHTLTESSTATLASTDIEINLNQIQSTEVENDKIEVEFNNAMERFRKVDPETRPYIPKQKTSRKFSQIVQCLNAVILPKYLNHELDFNSLHTLIYSAAFAAASCNGTRFNLDANTPPNNRNKKPAWQRRIQSRIDKYRLEIGRLTQYIAGNRNQRIVQTVEEIKIKYKNHSQHEQPNTEPQHFLDTLKQKLNAASNRLKRYLTCTKRKQQNLTFTNNEKQFYRTLGNHQQNNTTLNSEVPSPQRLQQFWGDIWEHPVQHNTDAEWLHKISSYTAHITQMNSENIPIETFTQIVKRTHNWKAPGTDNIHNYWYKKLSCTHPFIYSHICQFIQSPNIMPTFLTHGITYMLPKGSDPKNPANYRPITCLQTIYKIITGCISAIIYQHLDQHTVLAEQQKGCRKNSQGCKEQLTIDAIVMKQAQTKHRNIHTMYIDYKKAFDSVPHSWLIYVLELYKIHPSLISFLNIAMLHWETKLKLIDNNTSFITEPIKIQRGIFQGDALSPLWLCLALNPLSELLNDTNTGFRLKHNNRYHILSHLMYMDDIKIYATNNAELTKLADITQSFSTDIQMQFGVDKCKIHSINRGKSQHNTYTLDTGEQIEPMDEHSTYKYLGFHQSKQIQQKQAKIELTRKFKLRLNQILRTQLNSRNIIKAINTYAIPILTYSFGIINWSQTDLVKLQRMINTHMTTHRKHHPRSCVQRLTLPRREGGIGLIDIQNLHNSIITKLRSYFYAKAEHTNLHKYIADIDIKLTPLNLSSRDMQLNVTSRQNKIDKWSQKSLHGRHLADLSQTHVDREASNEWLRRGELFPETEAFMIAIQDQVMDTRNYQKHIIRLPNLPTDLCRRCHSSSETIQHITGACKSIVQTDYKHRHDQVAAIVHQNIAHKYSFIPKKVAYYKYQPSTILENSLYKVYWDRTIITDRTIHFNRPDITILDKANKAVFIIDIAVCNTHNLLTTHTEKMTKYIDLATEIKRQWQVDTVKIIPIVISTTGVIPSTLHTSLNTLQMPKSTLSLMQKAVILNTCRLTRKFLQNSSSS

SEQ ID NO: 23134 - protein, 1253 aa, Furcula furcula
MNRFIWRTYLLLTKCETTQMNNYLEPLHLEFSKKYPEMQVARQRIGDQRRAILRRNLLSQDILDEIASEVGVQIQTESLQTDNLPLTQNTNLSPDIAPIPSQTRSSQCTRMKWSKEINEEIARCYFEVTDLETNKTEYRKKLHELFIERHSHLSHLTEQRIADQRRFIFNNRIIDINRLDELKREIEIKLRGFFEQITTDGHSNDTQIDYTTNNTHMSMQTNTQTSRDVDTVVENNLLRTQNEGTQFDNIEAVFKDTVTRFSQIHPESRPYIPKQKTSRKFSQIIQHLNNTILPKYLKHDLDFNSLHTLIYSAAYTAAIFNGIRFTSSENIPRNTHERKPVWQLRLENRIGKYRLEIGRLTQYIAGNRSRRVVNTVEEIKIKYKTHTQYEEPNTEPQHFLDTIKQKLVAVSSRLKRYLNCTKRKQQNSIFTNNEKLFYRNMGNSRNQQNNVTMSSESPSAPELQQFWAGIWEQPVQHNTNAEWLTRLTDTTHINQMDFENITIDTFTQVVKRTHNWKAPGTDNIHNYWYKKLTCTHLYIYHHICQFIQSPHTMPEFITNGITYLLPKGSEPQNPANYRPITCLQTLYKIITGCISEVIHQHLNTYNILAEQQKGCRKSSQGCKEQLIIDSIVMKQAQTRKRNIHTMYIDYKKAFDSVPHSWLLRVLQHYKIHPNITAFLASAMHQWKTKLKLTHNNTPLTTESIKIQRGIFQGDALSPLWFCIALNPLSELLNSTNTGFKLKHNNTHHTLSHLMYMDDIKIYATNNTELRKLADITQSFSTDIRMQFGVDKCKIHSIVRGKTQQNTYTLDSGEQVESMVDDSTYKYLGFRQSRQILQKQTKLELIKKFKQRLNQILRTHLNSRNSTKAINAYAIPILTYSFGVINWSQTDLTKLQRMINTHMTTHRKHHPKSCTQRLTLPRRDGGRGIIDIRNLHNNTITKLRTYFHNKAEKTPLHKYVTDIDMKLTPLNLQDKSTQINQHFVSRQQKIELWSQKSLHGRHFADLEQPYVDKDASNEWLQRGELFPETEAFIMAIQDQVIDTRNYQKHIIRAPITSDLCRRCHSSSETIQHITGACKSIVQTDYKHRHDQVAAIVHQNLAHKHTFISKKVAYYKYQPNTILENSFYKIYWDRTIITDKTIHFNRPDITVLDKINKTVFIIDIAVCNTHNLLTTYTEKMTKYIDLATEIKRQWQVDTAKIIPIVISTTGVIPKTLQSNLNTLQMPKSTLSLIQKAVILNTCRLTRKFLASSSSS

SEQ ID NO: 23135 - protein, 1253 aa, Furcula furcula
MNRFIWRTYLLLTKCETTQMNNYLEPLHLEFSKKYPEMQVARQRIGDQRRAILRRNLLSQDILDEIASEVGVQIQTESLQTDNLPLTQNTNLSPDIAPIPSQTRSSQCTRMKWSKEINEEIARCYFEVTDLETNKTAYRKKLHELFIERHSHLSHLTEQRIADQRRFIFNNRIIDINRLDELKREIEIKLRGFFEQITTDGHSNDTQIDYTTNNTHMSMQTNTQTSRDVDTVVENNLLRTQNEGTQFDNIEAVFKDTVTRFSQIHPESRPYIPKQKTSRKFSQIIQHLNNTILPKYLKHDLDFNSLHTLIYSAAYTAAIFNGIRFTSSENIPRNTHERKPVWQLRLENRIGKYRLEIGRLTQYIAGNRSRRVVNTVEEIKIKYKTHTQYEEPNTEPQHFLDTIKQKLVAVSSRLKRYLNCTKRKQQNSIFTNNEKLFYRNMGNSRNQQNNVTMSSESPSAPELQQFWAGIWEQPVQHNTNAEWLTRLTDTTHINQMDFENITIDTFTQVVKRTHNWKAPGTDNIHNYWYKKLTCTHLYIYHHICQFIQSPHTMPEFITNGITYLLPKGSEPQNPANYRPITCLQTLYKIITGCISEVIHQHLNTYNILAEQQKGCRKSSQGCKEQLIIDSIVMKQAQTRKRNIHTMYIDYKKAFDSVPHSWLLRVLQHYKIHPNITAFLASAMHQWKTKLKLTHNNTPLTTESIKIQRGIFQGDALSPLWFCIALNPLSELLNSTNTGFKLKHNNTHHTLSHLMYMDDIKIYATNNTELRKLADITQSFSTDIRMQFGVDKCKIHSIVRGKTQQNTYTLDSGEQVESMVDDSTYKYLGFRQSRQILQKQTKLELIKKFKQRLNQILRTHLNSRNSTKAINAYAIPILTYSFGVINWSQTDLTKLQRMINTHMTTHRKHHPKSCTQRLTLPRRDGGRGIIDIRNLHNNTITKLRTYFHNKAEKTPLHKYVTDIDMKLTPLNLQDKSTQINQHFVSRQQKIELWSQKSLHGRHFADLEQPYVDKDASNEWLQRGELFPETEAFIMAIQDQVIDTRNYQKHIIRAPITSDLCRRCHSSSETIQHITGACKSIVQTDYKHRHDQVAAIVHQNLAHKHTFISKKVAYYKYQPNTILENSFYKIYWDRTIITDKTIHFNRPDITVLDKINKTVFIIDIAVCNTHNLLTTYTEKMTKYIDLATEIKRQWQVDTAKIIPIVISTTGVIPKTLQSNLNTLQMPKSTLSLIQKAVILNTCRLTRKFLASSSSS

SEQ ID NO: 23136 - protein, 814 aa, Furcula furcula
MGNSRNQQNNVTMSSESPSAPELQQFWAGIWEQPVQHNTNAEWLTRLTDTTHINQMDFENITIDTFTQVVKRTHNWKAPGTDNIHNYWYKKLTCTHLYIYHHICQFIQSPHTMPEFITNGITYLLPKGSEPQNPANYRPITCLQNLYKIITGCISEVIHQHLNTYNILAEQQKGCRKSSQGCKEQLIIDSIVMKQAQTRKRNIHTMYIDYKKAFDSVPHSWLLHVLQHYKIHPNITAFLASAMHQWKTKLKLTHNNTPLTTESIKIQRGIFQGDALSPLWFCIALNPLSELLNSTNTGFKLKHNNTHHTLSHLMYMDDIKIYATNNTELRKLADITQSFSTDIRMQFGVDKCKIHSIVRGKTQQNTYTLDSGEQVESMVDDSTYKYLGFRQSRQILQKQTKLELIKKFKQRLNQILRTHLNSRNSTKAINAYAIPILTYSFGVINWSQTDLTKLQRMINTHMTTHRKHHPKSCTQRLTLPRRDGGRGIIDIRNLHNNTITKLRTYFHNKAEKTPLHKYVTDIDMKLTPLNLQDKSTQINQHFVSRQQKIELWSQKSLHGRHFADLEQPYVDKDASNEWLQRGELFPETEAFIMAIQDQVIDTRNYQKHIIRAPITSDLCRRCHSNSETIQHITGACKSIVQTDYKHRHDQVAAIVHQNLAHKHTFISKKVAYYKYQPNTILENSFYKIYWDRTIITDKTIHFNRPDITVLDKINKTVFIIDIAVCNTHNLLTTYTEKMTKYIDLATEIKRQWQVDTAKIIPIVISTTGVIPKTLQSNLNTLQMPKSTLSLIQKAVILNTCRLTRKFLASSSSSS

SEQ ID NO: 23137 - protein, 1378 aa, Deilephila porcellus
MESQTKRYSLRSLPGGRRGASGADAGCHSMRTVGDGGLNRRVPLDKYTTAEPPSSSSSPRSSTSPSNRSLFSNIPSPTSSNSLFRSPNSSPSSTSSSRTTRPTNAVQEALAICPAPIAGPSRARKKWTYDMNRFIWRTYLIITKCETTQLNNYLEPLHLQFINKYPEMQVSRQRIGDQRRAILRSKLLSQDILDAIRCEVEEQIQTDTHTVDNSLHIHNLNPPARSPPIPRTSTRMKWSKEINEDIVICYFEVTEIERDLTAYRKKLYELFVEKHPHLSHLTEQRIADQRRLLFNNKNFENRIKELKIQVELKLAGRKNTLVETTPQSLSTDTTHVTAIDTLPVQPDLQTDTQLLIPSEIHLVNNNSNVIVRNEIDVSMIEREFDNAILRFHNTDPEERPYIPKQHSSRKFSQIVQYINSTLLPKHLNNDLDFTSLHTIIYSAAYAAATCNGTKFNLNRTSIGERKPYWQIRIERRIEKYRLEIGRLTQYTLGNRTQRILKTVEEIKTKYKIHSRHEEPNTEPQHFLDTLKQKLNVASNRLKRYVTCSKRKQQNKIFSNNEKLFYRTLGKNHQNNPHNSSKIPSSQDLRQFWANIWENPAQHNINADWLQGINDTTRINQMDFDSISVDRLTSIINRTHNWKAPGTDKIHNYWYKKLTCTHPLIQYHIMQFIQFPHTLPSFITNGVTYMLSKGPDQENPANYRPITCLQTIYKIITGCISEIIYEHIEDENILAEQQKGCRKNSQGCKEQLTIDAVVIKQAHAKNRNIHTAYIDYKKAFDSVPHSSLIYALEHYKVHPKVIAFLKAAMAQWKTKLKLKQHDSTITTDMIKIQRGIFQGDALSPLWFCIALNPLSELLNNTKSGFKLNDNNSQYTISHLMYMDDIKIYATNNKELNKLVDITHSFSTDIQMQFGVDKCRIQSIIRGKTQNNSYPLNTGELIESMDENSTYKYLGFHQSKVILQKQAKLEMTQKFKLRLNQILRSQLNSRNTIKAINTYAVPILTYSFGIINWSKSDLNKLQRIINTLLTKHRKHHPKSCTQRLTLSRRNGGRGLIHISNLHNNLITKLRHYFHTKAESVELHKYIAEIDKKLTPLNLHDRTIQPNQHIITIQNKLDTWSQKSLHGRHFADLNQIHVDKEASNEWLRRGELFPETEAFMAAIQDQVINTRNYQKHIIRRHTLPTDICRRCYSSSETIQHITGACKSIAQTDYKHRHDQVASIIHQSLAFKYSLITHKVPYYKYKPASILESPQFKLYWDRTVITDKTIHFNRPDILLHDKSNSIVYLIDIAIPNTHNLASTHSEKIAKYTDLSIELKSQWRVQTVKTIPIVLSSTGVIPHTLHTSLKSLGMHKLSYILLQKATILNTCRIVRKFLSIDQS

SEQ ID NO: 23138 - protein, 1388 aa, Hemaris fuciformis
MESQTKRYSLRPLPGGRRGASGANAGCHSLRTVGDGGLNRRVPLEKYTTAEPSFSPSSSPSPSSDRSLFSNIPSPSSTNSLYRSANSSPSSSTYSSITTRSTTVVQEAYATKPASSAVPCRVRKKWTESMNRFIWRTYLIITRCETVQMNNYLEPLHLQFIEKYPEMQVTRQRIGDQRRAIIRKNLLPQNILEEIRHEVGKTIEPVINRADHATLTGRPNIELHFSQSQSSNTRMKWSAEINDEIILCYFEVTDLEKNKTAYRKKLYDLFIEKHPHLSHLSEQRIADQRRLIFNNKKLECRIKELKTHMEFKLNRRINLIQSREDQDVNNLEITPIISPIVRDPENSIEIVPMQSFSHIDTSTHLPIPTQSNINNDNNTAIEIHKNEIDFNLIETEFNRAVSLFKCIDPEERPYIPKQHTSRKFSQIVQYINKTLVPKHLNENLDFCTLHTIIYSAAYAAASCNGTKFNLNVTCNNMNRKPHWQIRIERRIEKYRLEIGRLTQYILGNRTHKILKTVEEIKTKYKTHSQHEEPNREPQHFLDTIKQKLNAAATRLKRYVTCTKRKQQNKTFWKNEKLFYRSLGKQDNTSHSSKLPSPQHLQQFWADIWENPVQHNINAVWLQDVTDTRHIDQMNSDSISVDRLQNIINRTHNWKAPGTDKIHNYWYKKLTCTHPFLHKFITQFIQSPHTLPTFVTHGITYMLSKGSDHENPANYRPITCLQTIYKIITGCISEVIYQHLDDHNVVSEQQKGCKKNSQGCKEQLTIDAVIMKQAQTRNRNLHTMFIDYKKAFDSVPHSWLIYVLEMYKIHPQIITFLKQTMSNWQTSLRLNLENKTISTNTIKIQRGIFQGDALSPLWFCIALNPLSKLLNNTNSGFKLKYNDTHHSISHLMFMDDIKIYATNIVELTKLADITELFSTDIQMQFGVDKCKIQSINRGKIEKNTYTLETGEVIEPMDEHSTYKYLGFHQAKIILQKQAKLEITQKFKLRLNQILRTQLNSRNTIKAINSYAVPILTYSFGIIKWSQTDLSKLQRTINTLMTKHRKHHPKSCTQRLTISRRNGGRGLIDIGNLHANLITKLREYFYVKAENTELHRYIVNIDTKMTPLNLHDRTTQPNQNIVTVQNKLDLWSQKSLHGRHIADLSQTHVDKEASNEWLRRGQLFPETEAFIAAIQDQVINTRNYQKYIIHTHNLPTDLCRRCHSNSETIQHIIGACKSIAQTDYRHRHDQVASIIHQHLALKYSLITKKVPFYKYAPATILESDNYKLYWDRTIITDKTIHFNRPDILLHDKNNSTIYLIDIAIPNTHNLVSTCSEKIAKYVDLSIELKNQWRAQSVKTIPIVLSSTGVIPHTLHTSLQTLGIPKSSYILLQKATILNTCRIVRKFLSLD

SEQ ID NO: 23139 - protein, 758 aa, Deilephila porcellus
MDFDSISVDRLTSIINRTHNWKAPGTDKIHNYWYKKLTCTHPLIQYHIMQFIQFPHTIPSFITNGVTYMLSKGPDQENPANYRPITCLQTIYKIITGCISEIIYEHIEDENILAEQQKGCRKNSQGCKEQLTIDAVVMKQAHAKNRNIHTAYIDYKKAFDSVPHSWLIYALEHYKVHPKIIAFLKAAMAQWKTKLKLKQHDSTITTDMIKIQRGIFQGDALSPLWFCIALNPLSELLNNTKSGFKLNDNNSQYTISHLMYMDDIKIYATNNKELNKLVDITHSFSTDIQMQFGVDKCRIQSIIRGKTQNNSYPLNTGELIESMDENSTYKYLGFHQSKVILQKQAKLEMTQKFKLRLNQILRSQLNSSNTIKAINTYAVPILTYSFGIINWSKSDLNKLQRIINTLLTKHRKHHPKSCTQRLTLSRRNGGRGLIHISNLHNNLITKLRHYFHTKAESVELHKYIAEIDKKLTPLNLHDRTIQPNQHIITIQNKLDTWSQKSLHGRHFADLSQIHVDKEASNEWLRRGELFPETEAFMAAIQDQVINTRNYQKHIIRRHTLPTDICRRCYSSSETIQHITGACKSIAQTDYKHRHDQVASIIHQSLAFKYSLITHKVPYYKYKPASILESPQFKLYWDRTVITDKTIHFNRPDILLHDKSNSIVYLIDIAIPNTHNLASTHSEKNSKYTDLSIELKSQWRVQTVKTIPIVLSSTGVIPHTLHTRLKSLGMHKLSFILLQKATILNTCRIVRKFLSIDQS

SEQ ID NO: 23140 - protein, 1378 aa, Deilephila porcellus
MESQTKRYSLRSLPGGRRGASGADAGCHSMRTVGDGGLNRRVPLDKYTTAEPPSSSSSPRSSTSPSNRSLFSNIPSPTSSNSLFRSPNSSPSSTSSSRTTRPTNAVQEALAICPAPIAGPSRARKKWTYDMNRFIWRTYLIITKCETTQLNNYLEPLHLQFINKYPEMQVSRQRIGDQRRAILRSKLLSQDTLDAIRCEVEEQIQTDTHTVDNSLHIHNLNPPARSPPIPRTSTRMKWSKEINEDIVICYFEVTEIERDLTAYRKKLYELFVEKHPHLSHLTEQRIADQRRLLFNNKNFENRIKELKIQVELKLAGRKNTLVETTPQSLSTDTTHVTAIDTLPVQPDLQTDTQLLIPSEIHLVNNNSNVIVRNEIDVSMIEREFDNAILRFHNTDPEERPYIPKQHSSRKFSQIVQYINSTLLPKHLNNDLDFTSLHTIIYSAAYAAATCNGTKFNLNRTSIGERKPYWQIRIERRIEKYRLEIGRLTQYTLGNRTQRILKTVEEIKTKYKIHSRHEEPNTEPQHFLDTLKQKLNVASNRLKRYVTCSKRKQQNKIFSNNEKLFYRTLGKNHQNNPHNSSKIPSSQDLRQFWANIWENPAQHNINADWLQGINDTTRINQMDFDSISVDRLTSIINRTHNWKAPGTDKIHNYWYKKLTCTHPLIQYHIMQFIQFPHTLPSFITNGVTYMLSKGPDQENPANYRPITCLQTIYKIITGCISEIIYEHIEDENILAEQQKGCRKNSQGCKEQLTIDAVVMKQAHAKNRNIHTAYIDYKKAFDSVPHSWLIYALEHYKVHPKVIAFLKAAMAQWKTKLKLKQHDSTITTDMIKIQRGIFQGDALSPLWFCIALNPLSELLNNTKSGFKLNDNNSQYTISHLMYMDDIKIYATNNKELNKLVDITHSFSTDIQMQFGVDKCRIQSIIRGKTQNNSYPLNTGELIESMDENSTYKYLGFHQSKVILQKQAKLEMTQKFKLRLNQILRSQLNSRNTIKAINTYAVPILTYSFGIINWSKSDLNKLQRIINTLLTKHRKHHPKSCTQRLTLSRRNGGRGLIHISNLHNNLITKLRHYFHTKAESVELHKYIAEIDKKLTPLNLHDRTIQPNQHIITIQNKLDTWSQKSLHGRHFADLNQIHVDKEASNEWLRRGELFPETEAFMAAIQDQVINTRNYQKHIIRRHTLPTDICRRCYSSSETIQHITGACKSIAQTDYKHRHDQVASIIHQSLAFKYSLITHKVPYYKYKPASILESPQFKLYWDRTVITDKTIHFNRPDILLHDKSNSIVYLIDIAIPNTHNLASTHSEKIAKYTDLSIELKGQWRVQTVKTIPIVLSSTGVIPHTLHTSLKSLGMHKLSYILLQKATILNTCRIVRKFLSIDQS
